United States Patent Application Publication US 2006/0046253 A1 - sequence listing, part 8

SEQ ID NO: 79166 - DNA, 3855 bp, Saccharomyces pastorianus
atgtttcaaagttttttccacaacaatgggcccgctgctgccggtgaaacgttttcagatagcagatcgtaccctttaacgaatcatcaagaagtacccaggaatggactgaatgagttggcctcatctgcaaccaaggcgcaacaacaacctacacacatattaaactcatatccaattaccgggtccaacccactcatgagggcaagcgcaatgggggcgacctctggcagcatcaatcctaatatgtccaacatgaatgagcacattcgtgtttccgggatggggacttctaagcccctggacttagcgggaaagtacattgaccatctacaacataaagatagtaacactcccgtactcgacgaacgatcttattataacagcggggtagattataacttcagcagagaaaaaaacggcttaggagcgtttactccatttgaaaagcaagatgtgttcaacattccggacgagattttgcatgaattttccacttcacagacaaaaactgatatgggtattttcccggagttaaatcgatgttggataactattgataataaactgatactctggaatattaacaatgacaatgagtatcaggtggtagatgatatgaagcataccattcaaaaagtcgccttggtaagacctaagccaaacacctttgtgcctgccgtgaagcatctacttttgataagcacgacaatggagcttttcatgtttgctatttccttagacaaacccaccaacgaactcagtgtattcaatacacatctatcagtccctgtacaaggcattgatgtaatagacattgtgtctcatgaaagatcgggtagaattttcttcgcaggccaagccagtggcctgaatatctgggagttgcactactcaggttccgatgactggttcaatagtaaatgtagtaaggtctgtctgacaaagtctgccctattaagtcttctacctactaacatgttatcgcagattccaggtgttgattttattcaggctttgttcgaagataattctaacggtaatggcggattttctcaagagaccatcacgcaactaactattgaccaacaaagaggaatcatctattcattatcctccaaatccaccattagagcatacgtaataacagaaaaatcactggaaggacccatgtcaattgagcctgcctacatcagtaggatcataggtaccacgacggcaagggcagcaccgattttgggccccaaatacctaaaaattgtcaagataagctctgttgcaccagaagaaaacaacaatttgtttttagttgctttaacagtaggtggtgtgcgtttgtactttaatggttccatgggcagatttaacatcgaagctttgaggttagaatcgatcaagttcccccctagttctgtaactcctgaagtcatccaacaagaattactacatcaacaacaggaacaggcgaagagaagctttcctttcttttcaaatctaatgtcttccgaaccagtcctcttaaaattccaaaagaaatcatctgtattactagagactacaaaagcaagtacaattatttccccaggcatatttttttccgctgtgatcaaatcatctcagcaaactcatcaacaagaaaaaaaagagaactcatctgttactggaacgaccgctaccgcagggtctaaaactgtcaaacaacagccagttactttacaacataagcttttcgttagtgttccagattatggtatcttgaaaacacacggtaagtacgttgaaaatgccacgtttttggaaactgcgggcccagttcaacaaattattcccttatcggggttgtttaatgcaacgacaaagccacaaggatttgctaacgaatttgcgacacagtacacatcagaaactttaagggtagcagttttgacgagcacttctatcgaaatttataaatatcgtactcctgatgaaatttttgaggatctaatcgataatccgctgccattcgtcttaaattatggtgccgcggaagcttgttccactgcattgtttgttacttgcaaatcaaataaatctgaaaaattaagatctaatgccctgacttttttaactatgggtattcctggcgttgttgacatcaaacctgtctacaaccgttattctgtatctacagtatcctctttattgtcaaagcccactttatcaaccgcaacaactaatctccaacaatcaataactggctttagtaaaccctcccctgcaaacaaggaagattttgacttagatgacgtaatattatcccccagattttacggtatcgcattattgattaccagactacttcgagatatttgggggagacatgtcttcatgacttttacagataatagggcgacatcccatgctttcatttcttcttctgatccaatcactccatctaataataacctaaaaactgatgaaatttcacaaaataggaacataatatcgaaggtttctatttccaaggattgtatcgagtactatctatcttcaattaacattttaaatgaatttttcatcacttatggtgattccatttcccaaatatcagctccctacgtattagcgaacaattctaacggcagggttattgataaaacagaagaagttgcaaaccaagcggaaagtatagcgattaatgcgatgatcaaaatggtacagtccataaaggaaggtctatcattcttgaacgttttatacgaggaaagcgaagtcgaaggattcgacaaccaataccttggtttcaaggatataatcagttttgtaagcttggacgtccaaaaagatttagtcaaactagattttaaagatttatttgctccaaatgacaaaacaaaatcattaattagagaaattttattatccatcatcaataggaatattaccaaaggtgcgtcgatagagtataccgcaacagctttacaagaacgctgtggatcattctgctctgcaagtgatatattaggatttagagccattgaacatctcagaagggctaaagaaattggcttgcgtaactatgattctctaaactatcacctgaaaaatgctactgctttacttgaacaaattgtggatgatctttctatcgagaaattgaaagaagctgtatcaatgatgctgagtgtaaattattacccaaaatctattgaattcttattgaatattgccaactctatggacaaaggcaaactagcttgtcaatatgtggcaaatggatttttagaaaatgatgacaggaaacaatattacgacaaacgtatcttagtttatgacctagtttttgatactttaataaaagtagacgaacttgccgaaaaaaaacagtcatcaaaaactcaaaaccaaatttcgatatcgaatgacgatgaagtgaaactgagacaaaaaagttatgaagtcgctctaaaatataacgatagattattccactatcatatgtatgattggcttgtgtctcagaacagagaggaaaaactattagatattgaaactccattcatactcccttatttaatggaaaaggcaggtagttcattgaagatatctaatatactctgggtctattattcaagaagatctaaatttttcgaatctgctgaaattctttaccgtttagctacatcgaattttgacatcacattgtttgaaagaattgagtttctttcacgcgccaatggtttttgcaacagtgtgtcaccattaagccagaaacaaagaattgtacaattagctagtaggatccaagatgcatgtgaagttgctggtatcaaggtgatatattgtcgctcgtgtatacagacgcaagaatag

SEQ ID NO: 79167 - DNA, 2592 bp, Saccharomyces pastorianus
atgttattggcccaggaaaaaactcaattggtcgcatggactacgactccatggactttaccttccaatttgtcgttatgtgttaacgctgatttcgaatatgtaaagatttacgacgaaaccagagatcgttatttcatcttattagaatctttgattaaaaccttgtataagaagcctaagaatgaaaaatataagattgtggaaaaaattaaaggttctgatttggttggtttgaagtatgaaccattgttcccatatttcgctgaacagttccatgaaacagcttttagagttatttcagatgattatgttactagtgattccggtactggtattgttcataacgctcccgctttcggtgaagaggataatgctgcttgtttgaagaacggcgtcatatccgaagattcagtgttacctaacgccattgatgaccttggtagattcacgaaagacgttcctgattttgagggtgtttatgtcaaggacgctgataagttgattattaagtacttaactaatactggaaatttgttattggcatcccaaattcgccattcctatccattctgttggagatccgataccccattgttataccgttctgttccagcttggttcgttcgtgttaaaaacattgtccctcaaatgttggattctgtgatgaaatctcactgggttcctaacaccatcaaggaaaagaggttcgccaactggatcgccaatgcccgtgactggaacgtttccagaaatagatattggggtactccaattcctttatgggtttcagacgattttgaggaggtcgtctgtgttggttctatcaaagaattggaagaattgaccggtgtgcgtaacatcactgacttgcatcgtgatgtcattgacaaattgacaattccatccaagcaaggtaagggtgacttaaagagaattgaagaagtttttgattgttggtttgaatctggttctatgccttatgcttctcaacattatccatttgaaaacacagaaaaatttgacgaaagagttccagctaatttcatctctgaaggtttagatcaaacaagaggttggttctacacgttagctgtcttaggtacccatctatttggctctgttccatacaagaacgtcatcgtctctggtattgtcttagctgccgatggtagaaagatgtctaaatccttgaaaaattaccctgatccatccattgttctgaacaaatatggtgcggatgcattaagattgtacttgataaactcacctgttttaaaagctgaaagtttgaaattcaaagaagagggtgttaaggaggttgtttcaaaggtcttactaccatggtggaactcctttaaatttttggacggtcaaattgccttgttgaaaaagatgtctaacatcgacttccaatatgatgattctgtgaaaagtgataatgtcatggacagatggattttagcttctatgcaatctctagtacaattcattcacgaagaaatgggtcagtacaaattatacactgtcgttccaaaacttttgaatttcattgatgaattgacaaactggtatattagatttaatcgtcgtcgtttgaagggtgaaaacggtgttgaggactgtttgaaagcattgaattctttattcgatgccttattcacatttgtccgtgccatggctccattcaccccatttttgtcagaaagcatttatttgagactgaaggaatacatcccagaagctgtcttagcaaaatacggtaaggacggaagatcagtccatttcttatcttacccagtggtcaagaaagaatactttgacgaggccatcgaaactgcagtttctagaatgcaatccgttatcgatttgggtagaaacattcgtgaaaagaaaactatttccttaaaaactccattgaagactttggtcatccttcacagtgatgaatcatacttgaaggatgtagaagccttgaagaactacattatcgaggaattaaatgttcgtgatgttgttatcacctccgatgaggcaaaatatggtgttgagtataaagcagttgctgattggcctgtattgggtaagaagttgaaaaaagacgcaaagaaggttaaagatgccctaccatcagtcacttctgagcaagtacgggagtatttggaaagcggaaaattggaggtcgctggtattgaactggttaaaggtgatttgaacgctattagaggcttgccagaatctgctgttcaagctggacaagaaaccagaaccgaccaagacgtgttaatcatcatggatacaaatatttactctgaactaaagagtgaaggtctcgcaagagagctggtcaacagaatccaaaaattgagaaagaagtgtggtttggaagccaccgacgatgttttagtggagtacgaattagttaaagatactatcgactttgaagccattgtcaaagaacattttgatatgttaagcaagacctgtagatccgacattgccaaatatgacggctcaaagatagacccaattggtgatgaagaacaatctattaatgacaccattttcaaattaaaagtgttcaaattatga

SEQ ID NO: 79168 - DNA, 714 bp, Saccharomyces pastorianus
atgtccgagagtaacgcacacttctcatttccaaaggaggaagaaaaagttctatctctttgggatgaaatagatgcctttcatacttcattagaattaacaaaagacaaaccggagttttccttcttcgatgggcctccatttgccaccggtactcctcattacggtcatattctagcttccactattaaggatattgttccaagatacgctaccatgacaggccaccacgtggaaagaagattcggttgggatacacacggtgttccaattgaacatatcattgacaagaaattaggtatcacgggtaaagatgatgtcttcaagtatggtcttgaaaactacaacaatgagtgtagatccattgttatgacttatgccagtgattggagaaaaactattggtcgtttgggtcgttggattgatttcgacaacgattacaagactatgtatccatcctttatggagtccacatggtgggctttcaagcaacttcatgaaaaaggtcaagtttaccgtggattcaaagttatgccttattctactgggctaaccactcccttaagtaactttgaagctcagcaaaactataaagatgtcaatgacccagctgtgaccattggtttcaatgttattggcccaggaaaaaactcaattggtcgcatggactacgactccatggactttaccttccaatttgtcgttatgtgttaa

SEQ ID NO: 79169 - DNA, 87 bp, Saccharomyces pastorianus
atgttttgttttataaagcgatgtattcaaacgctgttgaaaagaatgatcgtgaaaatatggcaaaagaacaagatgataatatag

SEQ ID NO: 79170 - DNA, 2244 bp, Saccharomyces pastorianus
atgatcagaagatggctaactataagtaagtctgggaagaagaaaaaggctgttaatgataccattacagaagaagtagaaaaggttgactttaagcctgtaaaccacgatataaatgatgaactctgttatagcgaatcatccgataatccctctagctcattgtttgtctctaatttggataccaaggaaacttttttgaatgaagacaataatttgcagatttcttccggactagactattcttctgaaacgtgcaatcaaggcagtaattacagccaggatgggatattttatatttcaaacgcaaaggctataaacgcatacggaggcattatcacgcaagggcccgaggcacccatattagctatgaaggtgtccgactcaatgccctatggagacggctccaacaaagtttttggatacgaaaattttggcaatacatgttactgtaactcagttcttcaatgtctctataatctgtcctcattacgtgaaaatatattgcaatttccaaaaaaatcaagagaatctgatcaaccaagaaagaaagaaatgagaggtaagaaaccaagaatatttaccgaagcaagttttgagaaaagcattgctagtaccaatggacatttgcctaaccctaaacctcaatctgttgatgatggaaagcctacccctgtaaattctgtaaattcaaatacagctgggccttcagagaagaagagtaaattttttaaaagttttagcgcgaaacatgtacaagacaataataaaaaggaaggaagtcctgctatattaaccactggaaaaccctcttctcgtcctcaagacgcacctccattgatagtcgaaacacctaatgagcctggtgctccgagcagattgagtttcgagaacgtcacagatagacctccggatgttccgcgtaaaataattgttggcagagttctcaattatgaaaatccttcaagaggtagcagtaatagtaataacctggacttgaaaggagaaagtaatagcagcttatccactccacttgataaaaaagatactagaagatctagttcctcttctcaaatatccccagaacatagaaagaaatccgcacttattcgtgggccagtgctcaatattgaccatagcttaaacggctcagataaggctactttgtattccagtttgagagatatctttgaatgcataactgagaatacgtatttaactggtgttgtatcgcctagctcttttgttgatgttctcaaaagagaaaatgtattatttaatactactatgcatcaggatgctcacgaatttttcaatttcttattaaacgagttgagtgaatatatagaacgtgagaataaaaaaatagcagccagtgatatcaacagcgatagcgaaccgagtaagagtaaaaatttcatcagtgacttgtttcaaggcactttaacgaatcaaataaaatgtctgacgtgcgataacattacatctagggatgagccatttttggatttccccatagaagttcagggagatgaggaaacagatatacaggaaattttgaaaagttatcaccagcgagaaatgctaaatggctcaaacaagttttattgtgacgaatgttgcggtttacaggaggcagagagattagttggtttgaagcaattgcctgatactttaacattacacttgaaaagattcaagtattctgagaaacaaaactgtaatattaagctttttaataacattcactatcctctgacgctaaatgtttgctcttcaataaattctaaggtttgtcaaaagtatgaattggctgggattgtcgttcatatgggcggtgggccacaacacggccattatgtttccctatgtaaacatgaaaagtttggctggttgttatttgatgacgaaacggtagaggcagttaaagaggaaacagtgttagaattcacaggtgaatctccaaatatggcaacagcatatgttttgttttataaagcgatgtattcaaacgctgttgaaaagaatgatcgtgaaaatatggcaaaagaacaagatgataatatagacagtctaatcaagtacgatgattggctaagaacttgcaatagtggtcaaaagaaaaaggaagagctgcctatagcagacgatttggatactgctatagacgacagctttgtttctaacacacccataaagtcttctaaaaaaaagtcgagaatgtttagttttaggaaaagctga

SEQ ID NO: 79171 - DNA, 198 bp, Saccharomyces pastorianus
atgacactaggtatatttggtatgggcatcacagggacatgttggagctgggatgtttcatcatttcaggaactaaagcaacgtctggaaaggcgtgccaacaacgaatttgtagtgacaaacatgcctctggataaaagaagccagcaagtagtggacagcttagttaagacacacaattcatctctttgtaaatag

SEQ ID NO: 79172 - DNA, 303 bp, Saccharomyces pastorianus
atgttattggacgcgcagcgattttttaataggtctttctctattaatgtaatatgcgaattgaaacataatgtaaacacaagaagaaaattcgaaataaaggactggccaacaataatgttagtgaacagaaacgacaagcccaaaattagcagtgaggaagtcacacattttatagacgactataaaaagaggaggaaaactcagatgacacgattcttcggaatcactatttttacacttataacatgtagaattgccatgaagaaaatgataactgcaaaaggtatgcataggcaataa

SEQ ID NO: 79173 - DNA, 627 bp, Saccharomyces pastorianus
atggaaaagatgacagtttcttcgaattacaccatagctttatgggctactttcaccgcaatctcctttgccgtgggttaccagttgggtacgtcgaacgcatcatcaactaagaaatcctcagctactttactgcgttctaaagaaatgaaggaaggaaagctacacaatgacactgatgaggaggaaagcgaaagcgaagatgagagcgatgaggacgaagatattgagtccacttcattgaatgatatacctggagaagttaggatggcattggtgattcgtcaagatcttggcatgacaaagggcaaaatagcggcacaatgctgtcacgcagcattgtcatgttttagacatattgctacaaaccccgcgcgtgcttcatacaacccaattatgacacaaagatggctaaatgctggacaggctaaaataacgttgaaatgtccagataagtttacaatggacgagttgtatgcgaaggctatatcacttggggtgaatgcagcagttattcatgatgctggtagaacacagattgctgcgggaagtgccaccgtattgggtttaggacctgctccaaaagcagtattggatcaaataacaggtgatttgaaattgtattga

SEQ ID NO: 79174 - DNA, 147 bp, Saccharomyces pastorianus
atgttgtccgcacacaatttgaatagtgccgacttgatctataaatctttgagtcactctggactagatgatggcttggaacagggcttgaatcgttctttaagcggactggatttacaaaaccaaaacaagaagaatctatggtaa

SEQ ID NO: 79175 - DNA, 1629 bp, Saccharomyces pastorianus
  modified_base (1615)..(1615): a, c, g, t, unknown, or other
atggagaccagttcttttgagaatgctcctcctgcagccatcaatgatgctcaggataataatataaatacggagactaatgaccaggaaacaaatcagcaatctatcgaaactagagatgcaattgacaaagaaaacggtgcacaaacggaaactggtgagaactctgcaaaaaatgccgaacagaacgtttcttctacaaatttgaataatgcccccaccaatggtgctttggacgatgatgttatcccaaacgctattgttattaaaaacattccgtttgctattaaaaaagagcaattgttagacattattgaagaaatggatcttccccttccttatgccttcaattaccactttgataacggtattttcagaggactagcctttgcgaatttcaccactcctgaagaaactactcaagtgataacttctttgaatggaaaggaaatcagcgggaggaaattgaaagttgaatataaaaaaatgcttccccaagctgaaagagaaagaatcgagagggagaagagagagaaaagaggacaattagaagaacaacacagatcttcatctaatctttctttgcattctttatctaaaatgagtggaagcggaaacaataatacttctaacaatcaattattctcgactctaatgaacggcattaatgctaaaagcatgatgcacagtccaatgaataataccattaacaataacagttctaataacaacaatagtggtaacatcattctgaaccaaccttcactttctgcccaacatacttcttcatcgttgtaccaaacaaacgttaataaccaaacccagatgtccactgagagattttatgcgcctttaccatcaacttccactttgcctctcccaccccaacaactggacttcaatgaccctgacactttggaaatttattcccaattattgttatttaaggatagagaaaaatattattacgagttggcttatcccatgggtatatctgcttcccacaagagaattatcaatgttttgtgctcgtacttagggctagtagaagtatatgatccaagatttattattatcagaagaaggattctggatcatgctaatttacaatctcatttgcaacaacaaggtcaaatgacatctgctcatcctttgcagccaaactccactggcggctccatgaataggtcacaatcttatacaagtttgttacaggcccatgcagcagctgcagcgaatagtattagcaatcaggccgttaacaattcttccaacagcaatactattaacagtaataacggtaacggtaacaatgtcatcattaataacaatagcgccagctcaacaccaaaaatttcttcacagggacaattctccatgcaaccaacactaacctcacctaaaatgaacatacaccataattctcaatacaattccgcggaccaaccacaacaacctgaaccacaaacacagcaaaatgttcagtcagctgcgcaacaacaacaatcttttttaagacaacaagctactttaacaccatcctcaagaattccatccggttattctgccaaccattatcaaatcaattccgttaatcccttactgagaaattctncggggatcctctag

SEQ ID NO: 79176 - DNA, 816 bp, Saccharomyces pastorianus
atgaaattgtttagcggttctgattcatacaagtttgaggaggctgctgatctttgtgtccaagcagccaccatttaccgtctaagaaaagagttaaacttggcaggagactcgtttttgaaagctgctgactatcagaaaaaggctggtaatgaagacgaagcaggaaatacctacgtagaggcttataaatgctttaaaagcggtggaaactctgtgaacgccgtggattcattagaaaatgctatccaaatttttactcatagggggcagttccggagaggtgctaatttcaagtttgagcttggagaaattctagaaaatgatttgcatgactatgcaaaagctatagattgttatgagctcgctggtgagtggtatgcccaagaccagtcggtagcattatcgaataagtgttttatcaaatgcgcagatctaaaggctcttgacggtcaatatattgaagcaagtgatatatattcgaagttgatcaagagcagcatgggcaatagattgagccaatggagtttgaaggattacttcctaaaaaaagggctttgtcagctagctgctactgatgcagtcgctgctgcaagaactttacaagagggtcaaagtgaagatccgaattttgcggattcaagggagtcaaatttcttgaaaagtttaatcgatgctgttaatgaaggtgatagcgagcagctaagcgaacactgtaaggagtttgacaattttatgagactagataaatggaaaattaccattttgaataaaattaaggagtccatccagcaacaagaagatgatttgttatga

SEQ ID NO: 79177 - DNA, 2481 bp, Saccharomyces pastorianus
atgccagcaggcgctgccactagcgctgcagtgggtgctgctgctttaggcgcctccgctttatcaagatcttccaataatgcattcaaaaaccaggatttatttgcagatggtgaagcttctgctcagttatctaatgctaccacagaaatggctaatttatctaaccaagtaaactccctgtccaagcaggcaagtataactaatgacaaaaagtcaagagcgacccaggagttgaaacgtgttactgagatgaaaaattccattcaaatcaaattgaacaatttacgttctacccatgaccaaaatgttaaacaaacggaacaactggaagcacaagtacttcaagtaaacaaagaaaacgaaacattagcgcaacagttggctgtatccgaagcaaactaccatgccgctgagtccaaactcaatgaactaactactgatttgcaagaatctcaaacaaagaacgcagaattaaaagaacaaattacgaatttgaactcgatgacagcctccttacagtcacaattaaatgaaaaacaacaacaggtcaagcaagaaaggtcaatggtagatgttaattctaaacagctagagttgaatcaagtcacagtagcaaacttgcagaaggaaatcgatggtcttggcgaaaagataagcgtttacttaactaaacaaaaggaattaaatgactaccaaaagaccgtagaggagcaacacgcacaattacaagctaaataccaggatctgtccaacaaggatactgatttaacggaccgtgaaaaacaattggaagaacgtaacagacaaattgaagaacaagaaaatctctaccatcagcacgtttctaaattgcaagaaatgttcgacgatctatcacagagaaaagcttcttttgaaaaagctgatcaagagttaaaggagagaaacatcgaatatgctaacaatgtgagagagttatccgaaagacaaatgaatttagctatggggcaattacctgaggatgctaaggacattattgcgaaaagtgcctctaatacagatacaacaaccaaagaagccacatctagaggaaatgttcacgaagacactgtatccaaatttgtcgaaactactgttgaaaattcaaacttgaatgttaatcgggttaaagatgatgaagaaaagacagaaagaaccgaaagtgacgtatttgatagagacgttccaactttgggatctcaaagcgatagtgaaaatgccaatacaaacaacggcacccagtcaggaaatgagacagcaaatccaaacttaactgaaacattaagtgataggtttgatggtgatttgaatgaatatggtattccaagaagtcaatccttgacatcgtctgttgcaaacaatgctcctcaatccgtaagagatgatgttgagctaccggaaacgttggaagaacgtgacaccatcaataatactgcgaatagagataatactggaaacttatctcacattcctggtgaatgggaagctaccccagctaccgcttccactgatgttttgagcaacgaaactacagaagttattgaagacggaaataccacaaaaagggctaattcaaatgaagacggtgagtcggtcagttctatccaagaatctccaaaaatctctgctcaaccaaaagcaaagacaataaatgaagagtttccaccaattcaggaattgcatatcgacgaaagcgattcatcctcttcagacgatgatgagtttgaagataccagagaaattccatcagcaacagtgaagacccttcaaactccctataatgcccagcccacatcaagtttggaaacccacacggaacaagtcataaaatatcccgctccaggcacttctccttcacataatgaaggtaactctcaaaaggcaagcaccaattccattttgcctgttaaggacgaatttgatgatgaattcgcagggttagaacaagcggctgtggaggaagataatggtgctgattcggaatctgaatttgagaatgttgcgaatgctgggtcgatggagcaatttgaaaccatagaccataaggatctcgatgacgaactacaaatgaacgcttttacagggacgttaactagtccctctaacccaactatcccaaaaccacaagtacaacaacagtcaaccagtgaccctgctcaagtaagcaacgatgagtgggacgagatttttgctggatttggtaactccaaagctgaaccaaccaaagtagctaccccaagcattccacaacaaccaattccattgaagaatgatcctatcgttgatgctagcttgtcaaaaggtccaatagttaaccgcggggttgcaactactccaaagtctctagccgtcgaggagttaagtggcatgggatttactgaagaagaagcgcacaatgccttgaaaaagtgcaactgggatctagaagccgccactaactttttgttggatagtgcttag

SEQ ID NO: 79178 - DNA, 93 bp, Saccharomyces pastorianus
atgagttcctcgcaagaggataagatgattgcgattgctggtatcacgtaccgcgagaatatcagcagtccattgggcaagaagttcaggtga

SEQ ID NO: 79179 - DNA, 360 bp, Saccharomyces pastorianus
atgattgacgacctcatccatttcactttgaaacaatggaacagattgaccatttctgtcactgatactgaagttgaacgtgccaaatcgctgttgaaattacaattagggcagttatacgaatctggtaatcccgtcaatgacgctaacttgttaggcgcagaagtcctaatcaagggctccaaactgtctctgggtgaggctttcaagaaaattgatgcaatcacagtcaaagatgttaaggcttgggccggtaagagattatgggaccaagatattgctattgctggtacaggccaaattgaagggttattagattacatgagaatcagaagtgacatgtccatgatgagatggtaa

SEQ ID NO: 79180 - DNA, 462 bp, Saccharomyces pastorianus
atgctaagaacagtaacttcaaagactgtatctaaccagttcaagaggtctttggctacagctgtagcaacccccaaggccgaagtaacgcaattatctaacggtatagttgtagccactgagcataatccttccgctcacacagcctctgtcggtgttgtcttcggctccggtgctgccaacgaaaacccttataacaacggggtttccaatttatggaagaacatctttctatccaaagaaaactctgctgttgccgccaaggaaggtttggcattgtcttccaatatctccagagacttccaatcttacattgtatcttctttgccaggttctaccgataatatcactagacttcttgaatcgagtctttcatccagacgaaaagggctaatttgctatgcttcttctaacttgcgaggccacgaagtaatctgtcttgaagcaagttcaagattttga

SEQ ID NO: 79181 - DNA, 1269 bp, Saccharomyces pastorianus
atggttgttgccacggaacataacccttttgcgcaatctgcctccgttggtgtggtcttcggttccggttctgctaacgaaaacccttacaacaatggggtttccaacttatggaaaaatatcttcctctccagggaaagtgcggccacggccgccaaggatggcttggccctgtcctccgctgtctccagagactttcaatcttacgttgtttcttcgttaccagattctactgctaaatcgttggattttttgaaccaatcttttatccagcaaagagccagtttgctgtcctcttctaatttcgagactacaaaaaaatccgtcttgaagcaagttcaggatttcgaagagattgatcaacccaacagagtcctggaacatttgcactccaccgctttccaaaatactccgctatctctaccaactagaggtactcaagagtccctagagaacttggtggtcgctgatatggagtcttttgctcacaaccacttcttaaattcaaacgctgtgattgtgggtaccggtaacatcaaacacgaggatttagtgaatcatattgaatccaagaacctaagcttgcagaacggcaccaagccagaactcaagaagaaatcctcttttttgggctccgaggtcaggttaagagacgacactttgcccaaggcttggatttctttggctgtggaaggtgaatctgtcacttccccacattatttcgtcgccaaattagccgctcaaatctttggctcctacaacgctttcgaacccgcttccagattgcaaggtatcaaattactagacaacatacaagaataccaattgtgtgactctttcaaccatttttcgctatcttacaaagattccggtttatgggggttctctactgccaccagaaacgtcaccaatattgacgacctgatgcatttcactctgaagcaatggaacagattgaccatttccgtgactgacactgaagtggaacgtgctaagtcactgttgaaattgcacttgggacagctataccagtccggcaaccctgccaacgacgctaacctgttaggtgcagaagtgcttgctaagggctccaaagaatctttggatgaagccttcaagaagatcgatgccgtaaccgttaaagacgtcaaggcttgggctggcaagagattatgggaccaagacatcgccatcgctggtactggtcaaatcgaagggttattagactacatgagaatcagaagtgacatgtccatgatgagatggtaa

SEQ ID NO: 79182 - DNA, 324 bp, Saccharomyces pastorianus
atgttggttactgaaattcagcctgacactgctggtgtgaaagaaacatttttaattgagaccttatggaagatgctgcaatctcctaccatttgccaacaattcaagaaatctaatatatcagagattatccaaacaatgagctatttcattatggggactgataatacgtcgtggaacttcaccagtgccgtggtattagctcgttgtttgagagtcctccaaactactccagattatactgagcaagaaaccgaacgattattcgattgtttgcctaagaatgtctttaaaatgatcatgttcatcgcctcaaacgaatag

SEQ ID NO: 79183 - DNA, 4215 bp, Saccharomyces pastorianus
atgtcgtccttcaacaatgagaccaataataacagcaacactaatacacatccagacgattccttccctttgtataccgtattcaaggacgagtctgtacccatcgaggaaaaaatggcactgcttacacggttcaaaggacatgtaaaaaaggaactagttaacgaatcgtcgatccaagcttatttcgctgcgttactgttcatctccggccattacgcttaccgttcgtacccgcggttaatcttcctatcacattcctcgctttgttacctcatcaaacgtgtggccatgcagtctccagtacaattcaatgacactctagttgagcaattactaaaccacttaattttcgagttgcctaatgagaagaaattttggctggcttccattaaagccattgaagccatttatttggttaatccatcgaagatccaagctattctagcaaatttcttgcgaagaccaagtgaaaaccaaaacggagattacctgaataggataaaatctacattattgaccatcgatgagttgatccagatcaacgagaaaaataattcaaatcatttgcaactactgaggtttttcatgctgtctttcaccaaccttttaaataacaacctaaatgaacacgcaaacgatgataacaataatgtaataatagagcttattttcgatataatgtacaagtatttgaaaatggatgacgaaaattcacaggatctgatagatggatttgttaacgatttagaagttgagaaattcaagcaaaaattcataagtttagcaaagtcacaggaccagcatggttcacaagaagataaatcgaccttgtttgacgaagagtacgagtttcaattactattagccgaagcgaaattgccgcagttatcaaacaacttgagcagtaaagacccagcgatgaaaaaaaactatgagtctttgaaccaattacaacaagacttggagaatttgttggcaccgttccaaagtgtaaaggaaacagaacaaaattggaagctaaggcaatcaaatataattgaattagacaacattatatccggcaacattcccaaagataatccagaggaatttgtcactgtaataaaggaggtgcagttgattgagttgatttcaagagctacctcgtcgttgaggacaacgttatcattaactgcattacttttcctcaagaggctaatccatatcctaaacgatcagttgcccctatcaatattggaccaaatatttgtcattttcaagaacttgttatcatctaccaagaaaatctcttcacaaactgcatttcattgtttaattactttgatcattgatataaatcatttccataataaactattccaattatcttttttattaataaatgagaaaaccgtaacaccgagattttgctctgcaatactgctgcgtagcttcctgattaagttcaacgactccaatctttcgctcaacaattcaaatacaacttcgccaacctcaaagttggagaataacatcatatacatcgaagaatggctaaaaaagggcatttcagattcacagacaaccgttagagaggcaatgaggttaactttttggtatttctacaaatgttatcctacaaatgccaaaagattattgagttcttccttttctccacagttgaaaaaagcaacagaattggcaatccctgctcatttgaatataaactatcaagtttccagggtgtcctctactgcctccgcctcctctgcaacgtctcgattgtactctcactcttcgaataattcttcaagaaaaaccagtttactggagcagaaaaggaactatccaagttatgcccaaccgactcaatcttcctccacctccctactcaacgctcctgcagtcacagctggtggaagtgtcatagccagtaaactatcaaataagctgaaaacaaacttaaggtctactagtgaatattcaagtaaagaaaatgaaaaaagggcaaggcatcatgacagtatgaactctgtttcaaacagcaacaccaaagataataataatgttactaaaagaaaagttagtgcccctccttcttctactgccgccacaaaagtatctgaaaattacacaaattttgatgactttccgtcaaaccaaatcgacttgactgatgagttatcaaatagttactctaaccctttgataaaaaaatatatggataaaaatgatgtttcgatgtcatcttctccaatctcattaaaaggcagtaataaacttggtgaatatgaaaccctttacaaaaaattcaatgatgcttcgtttccagctcagatcaaagatgctttacagtatttacaaaaggagttactgttgacatcgcaacagtcatcatcagccccaaaatttgaatttcccatgattatgaaaaagctacgccaaattatgataaagtcaccaaatgatttcaagccatttttgagtatagagaagtttacaaatggagttcccttaaattacctcattgagctatattctattaatagttttgattacgcagaaatcttaaagaatagaatgaatcctgaaaagccctacgagcttactaacttgattataaccatcgcggatttattcaatttcttgaatgccaataattgtccgactgatttcaaactatactatatgaaatacaaaaccacttttttcaattataatttcaagttacttttagagattttccgtaacttgaacataaaacatgataacactctgaggtcaggaacgaacgatctcatgcctaaaatatcaataatactctttcaaatctacggtaaagagtttgactacacatgttatttcaatctaatttttgaaatttataaattcgataataatcgttttaataaattgctagctgattttgacattgtatctaccaagatgaaaatctgtcatgaacttgaaaagaaggatgccaactttaaggtagaagacatcatttctagagaaagttctgtaagcttcactcccatcgacaataaaaaatccgaaggggatgaggaatccgacgatgctgtagacgaaaatgatgttaagaaatgcatggaaatgacaatgattaatcccttcaaaaacttggaaactgataaaacactagagttgaagaataacgttggaaaaagaacatcaagcacagacagcgtagttattcatgatgataatgacaaagataaaaagctttcagaaatgacgaaaatagtaagtgtttatcaactggaccagccaaacccagcaaaggaggaagatgatatagatatggaaaattctcaaaaatctgatttgaatttaagtgaaatttttcaaaacagtggtgaaaataccgaaaggaaattgaaggacgataatgaaccaacagtaaaattcagtacagatcctccaaagataataaatgagccagaaaaacttattggaaatgggaatgagaatgaaaagcctgatttggaaacaatgtcaccaaccaaaataaacggggacgagaatatgggtcaaaagcaaaggatcacagtaaagagagaaagagacgtagcactaactgaacaagatataaactccaaaaagatgaaactagttaataacaaaaaatcagagaagatgcatttgcctatcatggataattttccaagggattccttgactgtatatgaaattagtcatcttttaatggttgattctaatggcaacactttgatggattttgatgtctatttcaatcacatgtcaaaggcaataaacaggataaaaagtggatcgttcactatgaaacatataaattacctgatcgaacccttgattacttgttttcaaaatcaaaaaatgaccgattggttgacgaatgaaaatggttttgatgaactactggatgttgctattatgcttttgaaatctactgatgacacgccttcaattccatcaaaaatatccagtaagtccataattctcgttcattgtcttttggtttggaaaaagtttctaaatacactaagcgagaatgccgacgatgatggcgtttcggtgagaatgtgtttcgaagaagtatgggaacagatccttttaatgcttaataaattttctgattatggaaacgaaatctataaattagcgcaagagttcagggacagtctaatgttatcgcactttttcaaaaacattcggcaacaagaattctaa

SEQ ID NO: 79184 - DNA, 405 bp, Saccharomyces pastorianus
atgaaacaccatatgaaatctaatagaattgttgaagctaatttagagatgttaaaacacttgttaatcgaatctttccctaactttgacgacattcgttcgaagaacatcgatcatgattttgttgaaaagatgacaaaattaagctctggttgcgcctttattgatgtgtcaagaaatgaccctgccaaagaaaacttattcttgcctgtgtggaaaggcaacaagtgtatccaattgatggtttgtaaagaagatactcatgagctattatataggatctttcgtattgatgcgaatgccaaggctactccaagcgctgaagaaaaagaaaaagaaacgactgaatctcccgcagaaactactaccggaacctctactgaagctcctagcgctgctaattga

SEQ ID NO: 79185 - DNA, 1407 bp, Saccharomyces pastorianus
atggctagaagaaagaatttcaaaaaagggaacaagaagacttttggtgctcgtgatgactcgagagctcaaaaaaactggtctgaactggtaaaggaaaatgaaaaatgggaaaaatactataagactttagctcttttcccagaagatcaatgggaagaatttaaaaagacatgtcaagctccacttcctctaacttttagaattacaggttctagaaagcatgccggtgaggtcctgaatttgtttaaagaaagacatctaccaaacttgactaatgttgagtttgaaggtgagaagattaaggcccctgtagaattaccttggtatccagaccatcttgcttggcaattggacgttcctaagacggttattagaaagaatgaacaattcgcaaaaactcagagatttttagttgttgaaaatgccgttggtaatatctcaagacaagaagccgtttcaatgattcctccaatcgttctagaagtaaaaccccatcacactgttttggatatgtgtgctgctcctggctccaaaactgctcaattaatcgaagccttgcacaaggatacagatgaaccatctggtttcgttgtagctaatgatgccgatgccagaagatctcatatgttggttcaccaattgaagagattgaacagtgccaacttgatggttgtcaaccatgacgcccaattcttcccacgtatcagattacatggcaactcaaataataagaatgatgttttaaaatttgacagaatcctgtgtgacgttccatgttctggtgatggtaccatgaggaaaaatgttaatgtttggaaagactggaacacacaagcaggtcttggtttgcatgctgttcagctgaatatattaaacaggggtttgcatcttctaaagaacaacggtagattggtttactcaacctgttctttaaatcctattgaaaatgaagcggttgttgccgaagcgttaagaaagtggggtgacaagattagattagttaactgtgatgataagcttcctggcctaataagatccaagggtgtatccaaatggcctgtctatgacagaaatttgactgagaaaaccaaaggagacgaaggtacactagatagtttctttccaccatctgaagaagaggcatcgaaattcaatttacaaaattgtatgagggtttatcctcaccaacaaaacacaggcggatttttcattactgttttcgaaaaagtcgaagatagtactgaggcggctacagagaaactatcttctgaaaccccagctctagagtctgaaggacctcaaaccaagaaaataaaggtagaagaagtccaaaagaaagaaagactaccacgtgacgcgaacgaagagccttttgtttcgttgatccacagcacgaagctttaa

SEQ ID NO: 79186 - DNA, 774 bp, Saccharomyces pastorianus
atgaacgatcaggatcgtacatctattcatgaggctatggaacagcaaagtatttccatttccaaggccggtattgttactacattacaagcgcgctgctcaattattgctgcggcaaatcctaatggtggtagatataattcaaccttgcctttagctcagaatgtcagtttgaccgagcctattctttctagatttgatattttatgtgttgtcagagaccttgttgatgaagaggcagacgaaagattggctacatttgttgtcgattctcatgtaagatcccatccagaaaacgatgaagatcgagaaggcgaagagcttaaaaataatggcgaatcggcgatagaacaaggagaagatgaaataaatgagcagcttaatgcaaggcaaagaagacttcaaagacaaaggaagaaggaggaagagatctcgcctattccacaggaattattgatgaaatatattcactatgcgaggacaaaaatataccctaaattgcatcagatggatatggataaggttagcagggtatatgcggatttgagaagagaaagtatttctacaggttcgtttccaatcactgttcgtcatttagaatctattctaagaattgcagaatcttttgctaaaatgagattatctgaatttgtgtcttcttatgatttggatagagctatcaaagttgtagttgattcctttgttgatgcccaaaaagtcagtgttcgccgccaactccgcaggtctttcgcaatttataccttgggtcactaa

SEQ ID NO: 79187 - DNA, 1797 bp, Saccharomyces pastorianus
atgtctgataatagaagacgtagacgtgaggaagatgattcggactcagaaaatgagctaccgccatcctcacctcagcaacattttagaggggggatgaacccagtttcatcacctattggttctccagatatgattaaccctgaaggtgacgataatgaagttgacgatgtaccagatattgatgaagttgaagaacaaatgaacgaagtagatttgatggacgataatatgtatgaggattatgcggctgatcataatagagatagatatgatccagatcaagttgacgacagggaacaacaagaactatctttaagcgaacgtcgccgcattgatgctcaactaaatgaaagagataggctattgagaaatgttgcctacatagatgacgaggacgaagaacaagaaggtgcagcgcaacttgatgaaatgggccttcctgtgcaaagacgaagaaggagaaggcagtatgaggacttagagaatagtgatgacgatctattgagtgacatggacattgacccattaagagaagaacttactttagaatctctgagtaacgttaaggctaacagttactcggaatggataacacaacctaatgtctcaagaactattgccagagagttaaaatcattcctgctggaatatacagatgaaacgggtcgttctgtatatggtgcacgtattagaacattaggtgaaatgaattctgaatctttggaggttaattatagacacttagcggagtccaaagccatcctggcactatttttagctaaatgtccagaagaaatgttgaaaatattcgatctcgtggctatggaggcaacagaattgcattacccagattatgcccgtattcactccgaaattcacgtaagaatctctgattttccaacaatatacagtttacgtgaattgcgtgagtctaatttgtcctctctagtacgcgtcactggggtggtgacaagaagaacaggagtcttccctcaattaaaatatgtcaaattcaattgtttgaaatgtggctccattttgggcccattttttcaagattctaatgaagaaattagaatctcattctgtacaaactgcaaatcaaaaggtccctttagagtcaatggagaaaaaactgtgtaccgaaattatcaaagggttacgctccaggaagctcccggaaccgttcctccaggccgtctaccaagacatagagaagtcattttgttggcggatttggtagatgtatccaagccaggtgaagaggtagaagttaccggcatctacaaaaataactacgatggtaacttgaatgcaaagaacggattccccgtttttgcaacaattatcgaggcaaattctataaaaagaagagagggcaatacagctaacgaaggcgaagaagggttggatgttttcagttggactgaagaagaagagcgtgaatttagaaagatttctagggatcgtggtataattgataaaattatatcatcgatggcaccgtctatctacggtcatagagatattaaaactgcagtcgcgtgctcattatttgggggtgttccaaaaaacgtcaatggaaaacattctattcgtggtgatatcaatgtgttattattaggtgatccaggtactgccaaatctcaaatcttaaaatacgtcgagaaaacagcgcatagagcggtcttggcaactggtcagggtgcttcggctgtcggtctgacagcatccgtcaggaaagatcctattactaaagatgggcttgaaagcgtgcgctataattggtggata

SEQ ID NO: 79188 - DNA, 2160 bp, Saccharomyces pastorianus
atgttcagagaacaaattgcaactttttctgcttcaattcaatctgcgaccacgaacatttttgaggaaccagctagattggcagattttgccgctgctgtttctgccggcgaagaagacgaattacaagacatcctgtcatctttaaacattgagcacaggctagaaaagtcgctactagtccttaagaaagaattgatgaatgccgaattacagaacaaaatctccaaagatgtagagacaaagattcaaaagagacaaagagaatactatttgatggaacaattaaagggcatcaaaagagaattaggtattgacgacggccgtgacaaattgattgacacttataaagaaagaatcaagtcattaaaattgcctgatagcgttcaaaaaattttcgatgatgagataactaaattaagtaccttggagacttctatgtccgaatttggcgttatcagaaactatttggattggttaacatcgatcccatggggaaaacattccaaagaacagtattccattccgagagcaaagaaaattttagatgaagatcattatggtatggtagatgtcaaggatcgtatcttggagtttattgccgtcggtaaactattgggtaaggtcgatggtaaaatcatatgtttcgtaggacccccaggtgttggtaaaacgtccataggtaaatctatcgctagagctcttaacaggaaattcttccgattttctgtaggcggtatgaccgacgtggcagaaataaaaggtcataggagaacatatattggcgccttacctggcagagtagttcaagcattaaagaagtgccaaactcaaaatcctttgattttgatagatgaaatcgataagattggacacggcggcatacacggcgatccgtccgcggcattgttagaagtattggaccctgaacaaaacaacagcttcttggataactacttggatattcctattgacttatcaaaagtgcttttcgtttgcactgctaactctttggaaactattccaagacctttactggatcgtatggaagtcattgagttgacaggatatgttgctgaagacaaggttaagattgccgagcagtatttagttccaagtgccaagaaaagcgctggtctagaaaactctcatgttgatatgacagaagatgcaataacagcgttaatgaagtactactgtagagaaagtggtgtaaggaatttgaaaaaacacatcgagaaaatataccgtaaagcagccctacaagtggtaaagaagttgagtattgaagattccccaacgtcatcagccgacagcaagcctaaagaaagcgtttcttccgaagaaaaggcggaaaataacgccaaaagctcatcggagaagactaaggacaataattcggaaaagacaagcgatgacattgaagccttaaagacctctgaaaagatcaatgtttccatatcccagaaaaacctaaaggattacgttgggcctccagtctacactacagaccggttatacgaaacaactccaccaggggtagttatggggttggcatggactaatatgggaggttgctcactttatgtagaatctgtccttgaacaacctttacacaactgcaagcatccaacatttgaaaggaccgggcaactgggagatgttatgaaggaatcatcaagacttgcttattcattcgccaagatgtatttagcacaaaaattccctgagaacagattttttgaaaaggcgtctatccacttgcattgtcctgaaggtgctacacctaaaggtggtccatctgcaggtgtcactatggccacttccttcctttccctagcattgaataagtcgattgacccaacagttgcgatgaccggtgaattgacacttaccggtaaagttttacgtatcggtgggttgagagaaaaagctgtggccgctaaaagatctggtgccaagactattattttccctaaagataacttaaatgattgggaggaacttccagacaatgtaaaggaagggttggaacctttagctgctgattggtataatgatatattccaaaaattattcaaggatgtgaatacgaaagaaggtaattcagtatggaaggctgaatttgagattttggatgctaaaaaggaaaaggactaa

SEQ ID NO: 79189 - DNA, 309 bp, Saccharomyces pastorianus
atgacatggaggcaatggttaaataacgcattgaaacgtagttatggtatttttggtgaaggtgtagaatattcattcctgcatgttgacgataagctggcttacatcagagtaaatcatgcggataaagatacattttcttcgtccatcagtacatacatatctactgatgaactcgtcggttcaccattaacagtgtcaattctacaagaatcttccagtttgagacttctggaggtcactgacgatgaccgcctttggctgaaaaaagtaatggaagaagaagaacaagactgtacatgtatatag

SEQ ID NO: 79190 - DNA, 2622 bp, Saccharomyces pastorianus
atgacagtcaaatcagtggatatttcgtgtgagggagttccaaagaagggaacgaatgataaagaaatagtggttacagaaaacaaatttgatttcaagattcaattctatcaatactttgacacagtcaccgacgaatccctcctcatgatcaattcaagaggagaagcttatatatctcatgatggtggacaaacaataaaaaggttcgacagtaatggtgaaacaattattgaagttgtgtttaatccatacttcaattcttcagcttatctgtttggttccaaaggtagcattttctctacccatgataggggatactcttttatgactgctaaattgcccgaggctaggcagttaggtatgccattagactttaacgctaaggcacaggatacatttatctattatggtggtaagaattgtgagtcaatcttaagtccggaatgtcatgcggtagcatacctgaccaatgatgggggcgaaacgttcacggaaatgcttgataatgcaattcattgtgagtttgcgggctcacttttcaaatatccgtcaaatgaggatatggttatgtgtcaagtgaaggaaaagtcttcgcagacaagaagcttagtttcttctactgattttttccaggatgataaaaataccgtctttgaaaatattatcggctacttatccactggtggctatatcatcgttgctgttcctcatgagaacaacgaattgagagcatacgtaactatcgatggtactgagtttgccgaggcaaaattcccatatgatgaagatgttgggaagcaagaggcattcactatattagagtctgagaaaggatcgatattcttacatttagcaacaaacttagtaccaggacgcgattttggcaatcttttgaaatccaactcaaatggtacttcttttgtcacgttggagcatgccgttaatagaaacacattcggctatgttgactttgaaaaaattcaaggtctcgaaggcattattctcaccaacatcgtttcaaatagtgacaaggtcgccgagaataaagaagacaaacaattgaagacgaagatcacctttaatgaaggttcagattggaactttttgaagcctccgaagagggattcagaacgaaaaaagttttcttgcagctccaaatcactggatgagtgttcattgcacttacatggctatactgaacgtaaggatattagagatacatattcttccggttctgcattaggaatgatgttcggcgttggcaacgttggtcctaaccttttaccatataaagaatgttccaccttcatcaccaccgatggtggcgaaacgtgggctgaagttaagaagactcctcaccaatgggaatacggtgaccacggtgggattttagttttagttcctgaaaactcagaaactgattctatttcctattctaccgattttggtaaaacatggaaagattataaattctgcgctgataaggttttagtaaaggatataaccactgttcccagggattctgctttgagatttttgctgtttggagaggcagcagatattggaggcagctcatttagaacgtacacgattgattttagaaacaccttcgaaagacaatgtgatttcgacatcactggtaaggaaagcgcagattataaatactctcctctgagttccaaaagcaattgcctatttggtcaccaaaccgagtttttacgtaaaaccgatgaaaattgttttattgggaatattccactttctgaattttcaagaaatatcaaaaactgttcttgtacaagacaagatttcgagtgtgattacaacttttacaaagctaacgatggtacttgtaaattagtcaaaggactaagcccagcaaatgctgcagacgtttgtaaaaaagagccagatttaatcgaatattttgaatcgtcaggctacagaaagatccctctatcaacctgtgagggtggcctgaaattggatgctccctcatcaccacatgcttgcccaggaaaagaaaaagaattcaaggaaaagtactcagtaagtgccggtccctttgcatttattttcatttcaattcttttaataattttctttgccgcatggtttgtatatgacagaggtatcagaagaaatgggggatttgcaaggtttggagaaattaggctaggtgacgatggtttaatagaaaacaataatactgacagagttgtcaataacattgtgaaatcaggattttacgttttctcaaatatcgggtctcttttacagcacacaaaaactaatatagcgcatgctatttccaaaattagaggaaggtttggaaacagaacaggtccaagctactcatccctgatccatgatcaatttttggatgaagcagatgacctgcttgctggccacgatgaagacgccaatgacttatccagtttcatggatcagggtagtaattttgaaatcgaagaagatgatgttccaacacttgaagaagagcatacatcatatacagatcaacctacgaccaccgatgttccagatgcattaccagaaggaaatgaggaaaacatcgacaggcctgattctacagcgccatctaacgaaaaccagtag

SEQ ID NO: 79191 - DNA, 2028 bp, Saccharomyces pastorianus
atgatattacttcattttgtctattctctttgggccttacttctcattcctttaactaatgccgaagaattcacccccaaagtgacaaagactatcgcgcaagattcatttgatatattaagctttgatgattccaacactttaattagaaaacaagacacctccgttactataagctttgacgatggtgaaacatgggaaaaagttgaaggcattgaaggcgaaatcacttggatatacatcgaccccttcaatagacatgacagagccgttgcaacggcaatgaatgggtcgtacctttatataaccaatgatcaaggtaagtcatgggagcgtataactctacctgactccggagaaagtatttcacctcgtggatgctatatagaaacccatcccttgaataagaactattttcttgcaaagtgcaactattgtgagaaaacagaagtaaacaatgacaatgaagagaattcgggggacgaagagggacaatttgaaatatttaatattacacgttgcacagacaaggtttttgcaagtaatgatggtggaaaatccttttctgagatcaagtcttctctagaaaggaacgaaaatagtcctatcagcatttctgattgtggctttgccaagaccagcaaagattctgaccttgaaagtagtgatacctcaataatctgtctttttcaaaatatgcagcttattatggatgagtttagttctccttacaccgaaagtaaattggtcctaactacggactggggcaaatcactaaaagaatttgaccaatttaaagataaggtcgtcaatggttacaggatattgaaatctcacatggttgtcttaacccagggcgacagatataatgatatgtcttccatggatgtgtgggtatcaaatgatctgtcaaactttaaaatggcttacatgcctactcagttaaggcattctatgcaaggagaaatatatgaggacgctatgggaagaattatcttgcccatgagtagggaaagaagtgatcaagaggaggataagggcatcgtgtctgaaattttaatttccgactcacaagggttaaaattttcccccatcccatggaccgcaaatgaggtgtttggttatattaatctttatcaacctacttacttgaaaggaacgatgattgcctcactttaccctctatctaggcgtcgtaaccgtaaaggaaaagccaaaggagtaaagagtaagggggtaaccaaaatatctgttgataatggcctcacatggacaatgttaaaagttgttgatccagataacgcagactcattcgactgtgatattactgattttgaaaattgttcgcttcaaaatatgttttacacacgggagggttccactccaaccgccggaattctaatgacaacaggtattgttggcgatggtagtgtcttcgactggggagatcaaagaacctttatttctagggatggtggcttaacatggaaactcgcctttgattttccttgtttatatgctgttggtgattacggaaatgttattgtggctataccgtataatgcggatgaagacgacgatcctcaatccgaattttattactctttagaccaaggtaaaacttggaccgaatatcagctagaaactactatctacccaaatgaagtaatgaatacaacgcccgacggatctggagctaaatttattctaaatgggtttactttggcgcatatggatggtacaacgaatttcatctatgcaattgatttttcaacagcctttaatgataagacatgcgaagaaaatgatttcgaggattggaatttagctgaggggaagtgtgtcaatggagtcaagtacaagatcagaagaagaaaacaggacgctcagtgcttggtgaagaaagttttcgaagacttacaattatttgagactgcttgtgaccagtgtaccgaggctgattacgaatgcgcgtttgaatttgttagggacgccgaaccgggaaatgcataccagactacaacctaa

SEQ ID NO: 79192 - DNA, 321 bp, Saccharomyces pastorianus
atgactttaaaatctcttcaaaaggaagaggagtgtgagcaagagcagcatataccgcgattgcttatggcagattttactagtatggatgaagaatctttacgccaataccacgatacattgtgtcaatccattgactttttggttggtaaatcaagatcattgaagaaacaacagcgagacctcctaaaggataaggcaacttttgaaaatgtagtgacgaatttgacaggacatacccaaagactacagcgagacgaaattgcattgtataacaaaaagcgaaacaaaaagaaaaggttcagttgggtaggatactaa

SEQ ID NO: 79193 - DNA, 429 bp, Saccharomyces pastorianus
atgagcgatagagatcagatagaacctgtcacaaatgcattagatgcagaaagtgattctagtgatgattttgggaatttttcagatgcctcagttgaaaatgacctctataaccagaattctactttaacgacgtcttccgaatctgtagtagataactgcttgaataagatactaccaaagggagaatttgacctggaagaagaaaccataaagaatgactgtttcaagctgagtaaacttattgaagatgaacgaccccatgtcatttatgaacaactcgtacaattagatcctgtgttacagccattcatatggaataaatctcatatacgcagaaacttgctccacattttgagattatcggataataatggctctgagggtgttggtacgaagagggaggaagaaccgttgaatgatgagtag

SEQ ID NO: 79194 - DNA, 1200 bp, Saccharomyces pastorianus
atgcccgatcatcagagcacgaaggagctaaaccacaaacattcatcatcgaacctttcctttagaagtttgaagcataaaacatcacattcttcactaaataagctcaaagtaaggcgtaaaggaaatacacaagaactgaatcatccgatcaaaaaaacttgccaaatatcattgcctgttccagaccaagtctcaaaggacaagattcaactgaaattgaaaaattcaacatcattggcatccttatcttcagaagtcactcccataaacactttggactacaatgattcaattttgcaacaaatattacaactttgtgatgttaagtatatattacatgatctacgtgaagctcagtcattaggcttgtttacgttgaatactagatcggttcagctgtctcataacttttggcaaacttatcatagcgatatgcaaacttcactcatttgcaagaaagtatgtctaggggctctaagtgatttgactacttcaaacttgatatccttacatgagttgaaatcattacggttaatacaaggaactggcggtgtcgccaatttactgcaagcttatgttgtgccctcaaatcaatgtgaaaatgaccaaaacttgatactgtacttatttttcaaataccagggaactcctctatcaaggtgctctaacattgattactctcaagcattgtctattttctggcagtgtagcagtattttatatgttgctgaatccaaatttcagctcgaacacaggaatctaactttggaccatattttgatagactctaaagggaatgttactttaattgatatgaagtgctgtcgtttcttgaatatagataacaataaagcttcctatacaagattagaccatcattatttctttgaaggccgggggactcttcaattcgagatatatgaactgatgagaagaatgctgcctcagccaatatcctgggctacatttgaaccaagaacaaacctattatggttatatcacctaagtagcagcctgctaaaaatggccaaaaaagccgtagtcagcggcgctttgaaccgggaagaaaatatcttaatcgagttgacgcacttactcgatcctgctcgaaaacattccaaaacaattttcaaaaaggaacttgttataagaacttgcggtgatttgttatctttgaagggagaaataatgcagtaa

SEQ ID NO: 79195 - DNA, 597 bp, Saccharomyces pastorianus
atgaattttgatgcggtagcagatcagcagatgactgacagaaggtattttgctctcgaagtagcagaaagcgatgatgccgacagctcattaaattcttcatccatgggaagccccgcagtggatgtaggaagaaaagtttacaaaatcacttcgcacaagggttcagcagaagatgagagtcaatccttttttacttcttcagattctccaacatccaaaacaaggcctgtaggtaaaaccatcgaaaacgatgattactatggtaaaagatcttctacaggttcatcgctcaaacaactcttcaataaaattaatattaatgataccgctcactcttcaaacaaagaaaatgtatctcagtcggcgctatcggaaaacaagctgctctctccatctaaaaggttgtcgaagcaaggtcttacaaaggtgactaactccaagtttcgtacacccttgagacctatttcaaaccaatcgactttatcaagggatgagcctgttaaagatttagatcacttaagtttcggagcggtagtgatttcaaatgctggggtgacgagaagacaagttctcatgttcattcatccagtgtga

SEQ ID NO: 79196 - DNA, 897 bp, Saccharomyces pastorianus
atgtgccagaaggcgttgaaaagaaaattagtatctcatcgttcccatgccagattgggcatacattctttgattatgggtacaaaagaaaggagtgcatggaaaatctcaaattcagagctggagaatgatgatgcagataatgcgggtggtaagggttcagatggtacgagcaacagtattgacgacattgcagttctctcagaggaagaaaatgactttcataggatgactttgaacgccaagctaacccaggagaagatctggagcgaagagccgacaacacgatgccttctgcagtctgatgtcataccagacacagatgttgtcgttcttgaggggggtagtttagacgatatagccgttttagaaataagaaacggtgttgagagatcaatacaatttgattctgaagcacttttagataatcctaccagaatcttaggctatcaaggaggtaaaagaaccatcgagacctttattccagaagttatcatttgtgcaataggatcaaaagattgtaagtgctggtgcctagcttcagctaatggctctatttacatactttcatacaatggacagcagagaatcccaaaaatttgcctaggacataaagttattaaaatggtaacatcaagcaaatacctccttgttctaactgaaagaggtttattttttgcatgggacttgctggatttaaaattagtactgcgaaatgtacctatattaccaattttgaacggtcagccaattcatggaaacaaggtaagaatcaacaaggttattaaatgctttcgtttggatggttctagttgtgatttgcttttagaggttggcgatcctaaaaatgtgtataaatggactaaggatctgggttgttggtcgttatataaataa

SEQ ID NO: 79197 - DNA, 1755 bp, Saccharomyces pastorianus
atgaaagtggtaaagtttccatggttggctcaccgtgaagaatcgcgaaaatatgaaatatacacagtcgatgttagccacgatgggaaaaggttggccacgggcggcctagatggcaagattaggatatggtccatagattccattttgcgttgcatggaactagaatctctaactcctgagatacctcttccgcaagacttgcagatgccgttatgtagcatgagtaggcataccggctcgataacatgtgtcaaattctcaccggatggaaagtaccttgcaagtggatccgatgatcgaattttactgatatgggctcttgacgaggagcaaagctcacaacccgccttcggttctgagcatgagagagagcattggacagttcgtaaaagattggttgcacacgataacgacatacaagacatttgctgggcgccagactccagcatactagtgacagttggtttagatagatctgtcatagtctggaacggttctacatttgaaaaactgaagagatttgacgtacatcaatcacttgttaagggcgttgtttttgatcccgctaataagtattttgcgactacatctgatgatagaaccatgaagatatttagatatcacaagacgggggatatttcttttacaatagagcatataatcaccgagccattcaaagaatcacccttgactacttattttagaaggccatcgtggtctcccgatgggcagcatattgcagttccgaacgccactaatgggcccgtaagttctgtggcaattgtaaatagaggaacttgggatacaaatgttagtttaattggtcatgatgcacctacagaagtcgcaaggtttaatcctagattgtttgagagaaatgcgggtgtcaagcaaaaaaaagacgatgacccagaaaatgctctagtagggcaaaacgatgataaagttcaccattttgataaaaacatcgactctgttgtggcaacagctgggcaagataaatccttagcggtctggagtacaagtagaccaaggccaatattagttgctttcgatatcgcaaataaatcaattactgatatgtcttggaatccagacggctctttattatttgttgcgtcattagactcttcaatcaccttgtttaaattcgaaaataatgaactaggcaagccaattcctttggaaaaaaatatggagcagttatataggtacggtgttgacaaggactcattagatttccctgaaagtatcaaccaactgttactcgaagatcagacaaaatcatttaagcatacaaaaatttcaacatcgaaaccaggtgaaaaccacccaacacttgcaacaaattcagcttcaaatcaaaaagataacaatgatgcttctgtctctagaagtgaacatataaatatcttgattccaaagaggaaaaaggatgctatactgaataaagccgtaactcttaaaagcggtaaaaagcgtgtggcaccgacattgatatcgacttcatcatcttctcccttttctaatggaatcaaaaagcctacattggatagtaaaaggattgaaaataatgtaaaatcatccaccaagaccattaacagtaaaaatacattgctaaatgtgccagaaggcgttgaaaagaaaattagtatctcatcgttcccatgccagattgggcatacattctttgattatgggtacaaaagaaaggagtgcatggaaaatctcaaattcagagctggagaatga

SEQ ID NO: 79198 - DNA, 1677 bp, Saccharomyces pastorianus
atgatgcctgacatcaataactcaatgttaagaaccttgggtctgcgcgaaggtgatattgttagagtaatgaaacatcttgacaagaaatttggaagagaaaatattgcatcaattcctacaaatgccactggaaatatgttttcacaacctgatggttcactgaacgttgctacaagtccggaaacctcactgcctcagcaattgttgccacaaacaacaagtcctgctcaaacagctccttccacatcagctgagacagatgatgcttggactgttaaaccggcttctaagtctgaatctaatttgctctctaagaaatcagaatttactggttccatgcaggatttattagacttgcaacctttagaacctaaaaaggcagctgcctcgacacctgaaccaaacctaaaagatttggaacccgtgaaaactggcggcaccactgttcctgctgctccggtttcatctgctccggtttcatctgctcccgctccattggatccattcaaaaccggtggcaacaatatcttacccttatctactggctttgtgatgatgccaatgattactgggggcgctatgctgcctatgcaaagaaccggcggcttcgttgtaccacaaacaacttttggtatgcaatcgcaagttactggtggtatcctacctgttcaaaagacaggaaatgggttaattcctatctctaacactggcggcgcaatgatgccacaaactacgttcggcgcagcagctaccgtcttacctctgcaaaaaactggaggtggcctaataccaattgccaccacaggaggtgcgcaattcccgcaaacttcattcaatgtccaggggcaacaacaacttccaacaggttcaatattacctgtccaaaaaactgctaatggattaatttcagctaatactggtgtctcaatgccaactgtacaaagaacaggcggcactatgattccacaaacatcatttggcgtttcacagcaattaacaggtggtgcaataatgacccaacctcaaaatacagggagtgccatgatgcctcaaacatccttcaatgctgtaccacagattactggaggagcaatgatgcctcaaacgtccttcaatgctttaccacaagttacagggggagcaatgatgcctttgcagagaactggtggtgctttgaatacatttaatactggaggcgccatgattccccagacttcgttcagctctcaagctcaaaacactggcggattccggccgcaatcccaattcggtttgactttacaaaaaaccggaggtattgcgccattaaaccagaaccagttcactggtggagccatgaatactttaagtacagggggcgttcttcaacaacagcaaccacaaacgatgaataccttcaatactggtggtgttatgcaacagccccaaatgatgactactttcaatactggtggtgctatgcaacaaccacagatgatgaacacattcaacaccggtggaattatgcaacaaccacagatgatgaacacttttaacactgggggtgctatgcaacaaccacaacaacaagcattacagaaccaacctactggatttgggtttggtaatggacctcaacaatcaaggcaagccaacatattcaatgctactgcatcaaatccgtttggattctag

SEQ ID NO: 79199 - DNA, 1395 bp, Saccharomyces pastorianus
atgactgtgtttctgggcatctatagggccgtctatgcctatgagccgcagacaccagaagaactggccatccaagaagacgatctgttgtacctcttacagaagtcagacattgacgattggtggacagtaaagaaaagagtcattggttccgatagcgaagaaccggtgggtctagtgccctccacttacattgaagaagctcctgttttgaagaaggtaagagccatttatgattatgaacaggtgcaaaatgctgatgaagaattgacgtttcatgaaaatgacgtttttgatgtattcgatgataaagatgctgattggctgttggttaagtctaccgtttccaatgaattcggcttcattccaggcaattacgtcgaaccagagaatgggtccacttccaagcaggaacaggctcccgctgccgctgaagctcctgcagctactcctgcagccgctcctgcttctgctgccgtactacccaccaactttttaccacctcctcaacacaatgatagagctcgtatgatgcaaagtaaagaagaccaagctccagatgaggatgaagagggccctcctcctgccatgcctgcaagaccaacggctactaccgaaactactgatgccaccgctgcggctgttcgatctcgtacaagactatcatacagcgataacgataatgacgatgaagaggatgattactattacaacagcaacagcaacaacgttggaaatcacgaatacaatacagagtatcactcttggaacgttaccgaaatcgagggaaggaaaaagaagaaggccaagctatcaatcggtaacaacaagataaacttcataccccaaaaggggactcctcatgagtggtcaattgataaattggtctcttatgataacgaaaagaaacacatgttcttggaatttgttgatccatatagaagccttgaattacacactggtaataccaccacatgtgaagagatcatgaacattattggtgaatataaaggtgcttcccgtgatcctgggttgagagaagtcgaaatggcttccaaatccaaaaagagaggtattgttcaatatgacttcatggctgaatcacaggacgaattaaccataaaatcaggcgataaagtctacattttagatgataaaaaatctaaggactggtggatgtgccaactggttgattcagggaaaagcggtctcgttcctgcacagtttattgagcctgttcgtgacaaaaaacatactgaatctacagcaagcggtatcatcaagtctatcaagaaaaacttcaccaaatctccatctaggtcgagatctagatcaagatctaaatccaatgccaatgccagttggaaagatgatgaactacaaacgatgttgtag

SEQ ID NO: 79200 - DNA, 96 bp, Saccharomyces pastorianus
atgcaaagctgctctagagacacacgatgtttttcttgccggcgcaggacaattgtctctacccttccaatcacacatagagagccccaggaatag

SEQ ID NO: 79201 - DNA, 543 bp, Saccharomyces pastorianus
atgagtggaagtaatatggggtactatgacgtactcgcagggctttcggcgctggaaaaatcatcccaggtagggttcagtgcgactgagcttcaacagcttacgcaacaatctgatgctaccgacaagggcatagagggcagtgagaatagtaaagcgaaggtatccaagcccaaaagagtagctgtacatggttacctaggcggtaaagtgtcgctcgccgatgcggcacaggtggagtatgaagtaggccattcactgctgggcagttatgtgccacgccagcagttggaagccctgtcaagtgtcgacttttcgcaccatttccaccgcacgttagaatgcaaagctgctctagagacacacgatgtttttcttgccggcgcaggacaattgtctctacccttccaatcacacatagagagccccaggaatagcgaggctaaaaggaaaagaaaagtgataatatgcaaacggtgtcaatcacgatttataggtccccataggcggtctcaacttagagaacatgcctgcgtagattaa

SEQ ID NO: 79202 - DNA, 3537 bp, Saccharomyces pastorianus
atgcatgaatatgattttcctagaattttatcaactttcaaggggttaattgaagatggttataagtcctacagtgagttagagtggttacctctgttgttcacctttttacattttatcaatgataaggaagaacttgcattaagaacaaacgcatcccacgctataatgaagtttattgacttcattaacgaaaagcctaatcttaatgaagcttcaaaatcgatttctatgcttgaaggatatacttttacccagtataaggattggcctcagagactccctagagaggtacaaagtgagtatgtatcagtgctatcatatatggtaaaaaacacgaaatatttcaccgacttcgaagatatggccattttactgtacaatggtgatgaagaagcagatttttttacaaacgttaatcatattcagcttcatcgtcgtcagagagccattaaaagactaggtgaacatgctcatcaactcaaagataacagtatatcccattatttaattccaatgatcgaacattatgtcttttcggatgatgaaagatacagaaatattggaaatgagacccaaatagccatcggagggttggcgcagcacatgagttggaatcaatacaaagctcttcttagaaggtacatttctatgttgaaaaccaagcctaaccaaatgaagcaagccgtacaattaattgttcaactttctgttccacttagagaaactcttcgtatcgtaagagatggggctgagtcgaaacttactttgagcaaatttccttccaacttagatgaacccagtaattttattaagcaagaattgtatccgactctttcgaaaattcttggcactagagatgacgaaactataattgaaagaatgcctattgcggaggcattagttaatattgttttagggctcacaaatgatgatattactaatttcctccctagtattctaacaaatatttgccaagttttgagaagtaaatccgaagaattaagagatgcagtaagagtaaccttgggtaaaattagtattatcttgggcgctgagtatcttgtctttgtgataaaggaattaatggctacattaaaacgtggttctcaaattcatgtgttaagttacactgtccactacatattaaagagtatgcacggagtcttaaaacactccgatttggatacctcgtccagtatgattgttaagattataatggaaaatatctttgggttcgctggtgaagaaaaagactctgagaattatcatacaaaagtgaaagaaattaagagtaataaaagctatgatgctggtgaaattctcgcctcaaacatcagcctgacagaatttggaacattactctctcctgtgaaggctttgttgatggtcagaattaatctaagaaatcaaaacaaactgagtgaattattgagacgatatttgttgggtttaaatcataatagtgactctgagtcagaaagtatcctcaagttctgccatcagcttttccaggaatcagaaatgagtaattcccctcaaataccaaagaaaaaagtgaaagaccaagtagatgaaaaagaagactttttcttggtaaatttggagtcgaaatcttataccatcaactcaaacagtttgcttttgaacagcactttacaaaaatttgctttagacttacttaggaacgtaataacgagacaccgctcctttttaactgtctcgcacctagagggttttattccatttttgagagattcgttactttcggaaaatgaaggtgtggtaattagtactttacgtatcctgattacattaattaggttagatttttccgatgaatctagtgaaatcttcaaaaactgtgcgaggaaggtactaaatattatcaaggtttctccttcaacttcaagcgaattatgccaaatgggtttaaagtttctttctgcctttatacgtcacacagattcaacattaaaggatactgctttgagttatgttctagggagggtcttaccagatttaaatgaaccaagcagacaaggccttgcttttaatttcctaaaagcacttgtttcaaaacatatcatgcttccagaactctatgacattgcggatactactagggaaatcatggtcacaaaccactcaaaagaaattagggatgtatccaggagcgtttactaccaatttttaatggaatatgaccaaagtaagggtcgtttagaaaagcagttcaaatttatggtcgacaatttacagtatcctaccgagtccggccgtcagtccgtaatggaattgatcaatttgattattacaaaggctaatcctgctttactatccaaattatcatcttccttctttctggcgctagttaatgtttcttttaatgatgatgcgccaagatgccgtgagatggcttcagtattgatttccaccatgcttccaaagcttgaaaataaggaccttgaaattgttgaaaaatatatagccgcttggctaaaacaggttgataatgcatcctttttaaatcttgggttgagaacttataaggtctacttgaaaagtattgggtttgaacatactattgagctagacgagcttgccatcaagcgtataaggtacattttgagcgatacgtcggtaggatcagaacatcagtgggatttggtatactcagctttaaatacgttctcatcttatatggaagcaacagagagcgtttataaacatggtttcaaagacatatgggatggtatcatcacatgtctcttgtatccgcactcatgggtccgtcaatcggcagcaaatcttgttcatcaactcatagccaataaggataagctggagatatcattaaccaatctggaaattcaaaccattgcaacaagaattcttcaccaattaggtgcgccttctattccggagaatcttgcgaacgtctcaataaaaacattagttaatatcagtatcctatggaaggagcaacgcacgccgttcataatggatgtatcaaaacaaactggagaggatctaaaatatactaccgccattgattatatggtaactcgaattggtggtattatcaggtcggatgaacatcgtatggattcttttatgtcgaagaaggcgtgtattcagttattggccttattagttcaagttctggacgaagacgaagtaattgcagaaggggaaaagatattattgccgctatatggttatttagaaacatattactcaagagcagttgatgaagaacaggaagaactacgcactctttcaaacgaatgtttaaaaatactggaagacaaattgcaagtatccgattttacaaaaatatacactgctgtcaaacagaccgtattagaaagaagaaaggaaaggagatctaaaagggcaattctggctgttaacgctccacaaatttctgctgataaaaagttgagaaagcatgcgagatcgagggaaaagagaaagcatgaaaaggatgaaaatgggtattatcaaagacgtaacaaaagaaagagagcctag

SEQ ID NO: 79203 - DNA, 93 bp, Saccharomyces pastorianus
  modified_base (13)..(13): a, c, g, t, unknown, or other
tttaaaccaaagnagtacagattagaggaaggtgattatgacgaggaaaccaatggggaccccatcgatttgaaagaaaaaaagttgaattaa

SEQ ID NO: 79204 - DNA, 747 bp, Saccharomyces pastorianus
atggaaacggatagtggtatacctggtcattcatttgtgttaaagtggacaaaaaacatcttttcgcgcacattgcgtgcatctaactgtgtacctagacatgttgggttcatcatggatgggaacaggagatttgctagaaagaaagagatggacgtaaaggagggccatgaggcaggatttgttagtatgagtagaatcttagaactgtgttatgaagcaggattcgatacggctaccgtgtttgccttttcaattgaaaatttcaagaggagctcacgggaagttgaatcactgatgactttagcgcgcgaaaggatacgacaaatcacagaacgtggagagctggcctgtaagtatggggtacgcattaaaattatcggcgatctctctttgttggataagtctctattagaagatgttcgggttgctgtggaaactacaaagaacaacaaaagggccacgttaaatatctgctttccatatacaggcagggaagaaatcttgcatgccatgaaagaaacaattgttcaacataagaagggcgccgctatagacgaaagcacgttagaatcgcatctctacacggcgggggtaccccctttagatttattgattaggacaagtggcgtttccagattaagtgactttttgatatggcaggcatcgagtaagggcgtacgcatcgaattgctggattgtttatggccagagattggacctatacggatggcatggatcttatta

SEQ ID NO: 79205 - DNA, 249 bp, Saccharomyces pastorianus
atggatcaccagagcactggtcgtcatagtatgcttttttgcccatgtccaaattctgaatcgtatagcctcctttttagcccttgcacctttggtattttggctgatagattggttaaaacttctgatccaaaaaaaatggaaaatccgaaaggtgacgataagatagtcaagttttacatatactggttggcattctggatacctttacagactatcctatttgcagcttttttaccaccagcctga

SEQ ID NO: 79206 - DNA, 1224 bp, Saccharomyces pastorianus
atgattgtggggttgacactttattttgtattattccgttcaatacagtatttactggtttttttgactccaattaggcagtttgatacatcaacatcacttttattaaacgaattatgttcttctccctctgaaatcaacagttattggaacaagtatttttggaataagctactatcatgggacagtgttttttttatcaagaacataacttccaaaaacggaaaacctcaatttgagcatgaatacgcgttttctcagttgtggacttttttcgttaggctgtttattaaaagtaataacgatagcatctaccatgccttaagggttggagttgcaatagaaaatgttttattttacttatcaggtattgttttatattttctaacaaaaaaaattttcagccaaaatataaggcaatcacagtttgctagaactatcgctaaaaaaacatctctgttgtttttcttaacgagtgccgctggatttttaacaagcatatattctgaaccattatcttttttttttgcatttgttggtatttggagtcgtgaatgctccatttccgtgcccgtattgggtcaattcgatattccgtggagatattggtttccttactcctttatcagcatgacttgctttaccttagcatccttgaatcgttcaaactgtgttttgttagggatttactttatttttgaccttattgaactaacaaagaacaggaagtttgtaaaagcaatatgtttcccactattatcaggatcattaatgttttctgctctactatatcaacaatattacctaccatataagacattttgtcctcaaaggggtgaatggtgtaaatctcaattgttttcaagcatttttatcacgaaaacttctctatattcctacattcagagtcattattggggagttgggttattgaaatactggaccccaaacaacatcccaaactttttgtttgctgtcccaaatattattattttaatctattcctccatatatttcagcaaaatttatccctcctataacttgaaggctctcgtatggatcaccagagcactggtcgtcatagtatgcttttttgcccatgtccaaattctgaatcgtatagcctcctttttagcccttgcacctttggtattttggctgatagattggttaaaacttctgatccaaaaaaaatggaaaatccgaaaggtgacgataagatag

SEQ ID NO: 79207 - DNA, 990 bp, Saccharomyces pastorianus
atgatcacaagaaaggctgccgctgctttagctgtgggctgcacagtagtcatcaagccagactctcaaacgccgctatctgctttagctatggcatatttggctgaaaaggcaggctttcccaagggttcgtttaatgttattctttcacatgccaacacaccaaagcttggtaaaacattatgtgaatcaccaaaagtcaagaaagttacttttactggttctacaaacgtcggtaaaatcttaatgaaacaatcttcttctactttgaagaagctgtcttttgagctgggtggtaatgcccctttcatagtctttgaggatgccgatttggatcaagccttggaacaagccatggcttgtaaatttaggggtttgggtcaaacatgtgtgtgcgcaaatagactttacgttcactcatccataattgataaatttgcgaaattactcgcggagagggtcaaaaaattcgtaattggtcatggtttggacccaaaaactacacatggttgtgtcattaactccagcgctattgaaaaagttgaaagacataaacaggatgccattgataagggagcaaaagttgtgcttgaaggtggacgtttaactgagttaggtcctaacttttatgctccagttattttgtcacacgttccctcaacagctattgtttccaaggaggagacttttggtccattgtgtccaatcttttcttttgatactatggaagaagttgtcggatatgctaatgatactgagtttggtttagcagcatatgtcttttctaaaaatgtcaacactttatacactgtgtctgaagctttggaaactggtatggtttcatgtaatacaggtgttttttcggattgttctataccatttggtggtgttaaagagtcaggatttggaagagaaggttcgctatatggtattgaagattacactgttttgaagaccatcacaattgggaatttgccaaacagcatttaa

SEQ ID NO: 79208 - DNA, 1077 bp, Saccharomyces pastorianus
atgactttgagtaagtattctaaaccaactttaaacgaccctaatttattcagagaatctggttatattgacggaaaatgggttaagggcactgacgaagtttttgaggtggtagaccctgcttccggcgaaatcatagcaagagttcccgaacaaccagtctccgtggttgaggaagcgattgatgttgcctatgaaactttcaagacgtacaagaatacaacgccaagagagagggcaaagtggctcagaaacatgtataacttaatgcttgaaaatttggatgatctggcaaccatcattactttagaaaatggtaaagctctaggggaagctaaaggagaaatcaaatacgcggcttcgtattttgagtggtacgccgaggaagcaccccgtttatatggtgctactattcaacccttgaaccctcacaacagagtattcacaattaggcaacctgttggtgtatgcggtataatttgtccatggaattttccgagcgccatgatcacgagaaaggccgccgctgctttagctgtgggctgcacagtagtcatcaagccagactctcaaacgccgctatctgctttagcaatggcatatttggctgaaaaggcaggctttcccaagggttcgtttaatgttattctttcgcatgccaacacaccaaagcttggtaaaacattatgtgaatcaccaaaagtcaagaaagttacttttactggttctacaaacgtcggtaaaatcttgatgaaacaatcttcttctactttgaagaaactgtcttttgagctgggtggtaacgcccctttcatagtctttgaggatgccgatttggatcaagccttggaacaagccatggcttgtaaatttaggggtttgggtcaaacatgtgtgtgcgcaaatagactttacgttcactcatccataattgataaatttgcgaaattactcgcggagagggtcaaaaaattcgtaattggccatggtttggacccaaaaactacacatggttgtgtcattaactccagcgctattgaaaaagtgacagacataaacggatgccattatagggag

SEQ ID NO: 79209 - DNA, 75 bp, Saccharomyces pastorianus
ctagctattatcccgtttatactttataagtatgggccgtcattacgcgcaagatcttcatacaccgaggagtag

SEQ ID NO: 79210 - DNA, 1503 bp, Saccharomyces pastorianus
atggtatacacttcaacgtacagacacactatcgttgttgaccttttagaatatttgggtatagtgtccaacttagaaactttacagagtgcccgtgaagatgaaacaagaaaacccgagaataccgataaaaaagaatgtaaacccgactatgatatagaatgcggtcctaatagatcatgctctgaatcctctaccgattcagactctagtggttcacagatcgaaaaaaatgatcctttcagggtggattggaacggccccagtgatcctgagaacccacaaaactggcccctactgaaaaaatcattggtagtattccaaataatgttacttacttgcgtcacgtacatgggatcctccatttacacacctggccaggaatatattcaagaagagttccacgttggtcatgtagtggcaacattaaatctttctttatatgttcttggttatggtctaggtcccatccttttttcaccgctatcagaaactgcacgttatggccgtctaaatctgtacatggtgactttattttttttcatgatctttcaagttggttgtgctactgtgcataacatcggcggtttaatcgtcatgcgtttcatcagtggcatactgtgcagcccatcgttggccactggtggcggtacagtggctgatatcatttcaccagaaatggttcctctcgttttaggtatgtggtcagccggtgctgttgctgcgccagtcttggctcccttactaggcgctgctatggtcgatgctaaaaattggcgattcatattttggttattaatgtggttaagtgctgccacttttatcttgttggcatttttcttccctgaaacacaacaccataatattttgtaccgccgtgctttgaaattgagaaaagaaactggtgatgacaggtactatactgaacaggataaactcgatagagaagttgatgcaagaacttttttgatcaatactttgtataggcctttcaaaatgattatcaaagagcctgcaattttggcttttgatctctatatcgctgttgcttatggttgtttctacttattctttgaagcattccctattgtatttgtaggtatataccacttcagcttagttgaagttggcttggcctatatggggttttgcgtagggtgcgtacttgcttatggcttattcggtattttaaacatgaggattattgtaccacgttttagaaacggcacattcaccccggaagcttttttaatcgtggcaatgtgtgtctgctggtgcctgcctctgtctttgttcttatttggttggactgctcgagtgcattggattttgccagttatctcggaagtttctttcgtcctagctgtctttaacattttccaagcaacttttgcatatttggctacatgctacccaacgtatgtcgcatccgtttttgcaggcaatggtcctagtcgggcttcgtttgcctgtgcttcacgttgtatggtagagcatgtctga

SEQ ID NO: 79211 - DNA, 279 bp, Saccharomyces pastorianus
atgcatgtaatttcggccacttattattgcatcagtgatgacagatattatgaaactgcagcgatgtgtgtggttttgaaattatctcaagattgctcttttgatgtgaggcttcaacgaagtggaaatgggccatataagaatatctgggatatgccttgcggagaattacaacaacacattggttacaaaaatggtatatgctataatagtgaaaacacggtgttatcggcagtaggtgtagaacatcgatatcataaaagtgtttctcgtctataa

SEQ ID NO: 79212 - DNA, 330 bp, Saccharomyces pastorianus
atggaacagtcacccatgattgtatttagcaagactggctgcccatatagcaaaaaactgaaagctttgttgactaattcgtacacgttttctccatcttaccacgttgtagaattggataggcacgaacacacaaaagaactacaagaccagattgaaaaagtcactggtaggagaacagtcccaaacgttatcatcggtggtacttccagaggtggttatactgagatagcagagttacataaaaatgatgaacttctagattctttcaaaaaatggagcgatggggcgtttactgtaacagctaattcgcaatctgagagtgcctag

SEQ ID NO: 79213 - DNA, 306 bp, Saccharomyces pastorianus
atggtgaaggaggacctcgcctcgattttaaagcaactaactattaagtatgataatttatttgaaacgagtttcccatactcaatgggtatccatcaggctcctttgaatgcgactggtgatgaattgagtaatagttggtttcacatgcatttctacccacctttactgagatcagctactgttcggaaattcttggttggttttgaattgttaggtgagcctcaaagagatttaacttcggaacaagctgctgaaaaactaagaaatttagatggtcagattcattatctacaaagactgtaa

SEQ ID NO: 79214 - DNA, 864 bp, Saccharomyces pastorianus
atgggcattattatgcagagcatcaacatgataaaaaaaaaacagttgaatattccctcaaaaatgactgctgaagaatttgatttttctagccattcccatagacgttacaatccactaaccgattcatggatcttagtttctccacacagagctaaaagaccttggttaggtcaacaggaggctgcttacaagcccacagctccattgtatgatccaaaatgctatctatgtcctggtaacaaaagagctactggtaacctaaacccaagatatgaatcaacgtatattttccccaatgattatgctgccgttaggctcgatcaacctattttaccacagaatgattccaatgaggataatcttaaaaataggctccttaaagtgcaatctgtgagaggcaattgtttcgtcatatgttttagccccaatcataatctaaccattccacaaatgaaacaatcagatctggttcatattgttaattcttggcaagcattgactgacgatctctccagagaagcaagagaaaatcataagcctttcaaatatgtccaaatatttgaaaacaaaggtacagccatgggttgttccaacttacatccacatggccaagcttggtgcttagaatccatccctagtgaagtttcgcaagaattgaaatcttttgataaatataaacgtgaacacaatactgatttgtttgccgattacgtcaaattagaatcaagagagaagtcaagagtcgtagtggagaatgaatcctttattgttgttgttccatactgggccatctggccatttgagacctggtcatttcaaagaagaagcttgcctcaattagccaatttaaccaaatggtga

SEQ ID NO: 79215 - DNA, 339 bp, Saccharomyces pastorianus
tcccccggtcttaggccccaaaaatccccagttgattgttgttttgtggtggatgaaaatgctaagccaagtcaaatcaatactctaaacaatgaattgacgcttattgtcaaggcttttcatcccgattccaatattacattagaagttttaagtacagagccaacttatcaattttataccggtgatttcttgtctgctggttacgaagcaagacaaggttttgcaattgagcctggtagatacattgatgctatcaatcaagagaactggaaagattgtgtaaccttgaaaaacggtgaaacttacgggtccaagattgtctacagattttcctga

SEQ ID NO: 79216 - DNA, 378 bp, Saccharomyces pastorianus
atgctgatagataatgagaaggacaccgaatttccaggtgatctattggtaaccatacagtatactgtgaacgttgcccaaaaaagtttggaaatggtatataaaggtaaattgactgctggtgaagcgacgccaataaatttaacaaatcatagttatttcaatctgaacaagccatatggagacactattgagtgtacggagattatggtgcgttcaaaaaaatctgttgatgtcgacaaaaacatgattcctacgggtaatatcgtcgatagagaaattgctacctttaactctacaaagccaacggtcttaggctccaaaaatccccagtttgattgttgtttgtggtggatgaaaatgcaaagccaagtcaaa

SEQ ID NO: 79217 - DNA, 1326 bp, Saccharomyces pastorianus
atgacagctcagttacaaagtgaaagtacttctaaaattgttttggttacaggtggtgctggatacattggttcacacactgtggtagagctaattgagaatggatatgactgtgttgttgctgataacctgtcgaattcaacttatgattctgtagccaggttagaggtcttgaccaagcatcacattcccttctatgaggttgatttgtgtgaccgaaaaggtctggaaaaggttttcaaagaatataaaattgattcggtaattcactttgctggtttaaaggctgtaggtgaatctacacaaatcccgctgagatactatcacaataacattttgggaactgtcgttttattagagttaatgcaacaatacaacgtttccaaatttgttttttcatcttctgctactgtctatggtgatgctacgagattcccaaatatgattcctatcccagaagaatgtcccttagggcctactaatccgtatggtcatacgaaatacgccattgagaatatcttgaatgatctttacaatagcgacaaaaaaagttggaagtttgctatcttgcgttattttaacccaattggcgcacatccctctggattaatcggagaagatccgctaggtataccaaacaatttgttgccatatatggctcaagtagctgttggtaggcgcgagaagctttacatcttcggagacgattatgattccagagatggtaccccgatcagggattatatccacgtagttgatctagcaaaaggtcatattgcagccctgcaatacctagaggcctacaatgaaaatgaaggtttgtgtcgtgagtggaacttgggttccggtaaaggttctacagtttttgaagtttatcatgcattctgcaaagcttctggtattgatcttccatacaaagttacgggcagaagagcaggtgatgttttgaacttgacggctaaaccagatagggccaaacgcgaactgaaatggcagaccgagttgcaggttgaagactcctgcaaggatttatggaaatggactactgagaatccttttggttaccagttaaggggtgtcgaggccagattttccgctgaagatatgcgttatgacgcaagatttgtgactattggtgccggcaccagatttcaagccacgtttgccaatttgggcgccagcattgttgacctgaaagtgaacggacaatcagttgttcttggctatgaaaatgaggaaggttatttgaatcctgatagtgcttatataggcgccacgatcggcaggtatgctaatcgtatttcgaagggtaagtttagtttatga

SEQ ID NO: 79218 - DNA, 2019 bp, Saccharomyces pastorianus
atggataaacacacaaacgatatcgaggattggtctaataatattcaaacaaaagctcctctaaaggaagtagatcctcatttgaggccaaagaaatactcaaaaaagtcgttgggacacaagcgtgcttcaacctttgacttgctgaaaaaacacagctccaaaatgtttcaatttaacgaatctgtgatagatctagacacctccatgagcagttcactacaatcttctggttcatacagaggaatgacaacaatgaccactcaaaatgcttggaaactctcgaatgaaaacaaagctgtacattcccgtaatccatctactttgttgcctacatcctcgatgttttggaataaagcgacttcctctcctgtaccaggatcatcgctgattcagagtcttgattcgacgattatacatcccgatatcgttcaacaaccaccactggattttatgccatacgggtttccattgattcatactatctgttttgttacttgttattctgaggatgaagagggtttaagaaccactttagactctctttctaccacagattatccaaattcccataaactactgatggttgtttgtgatggtttaattaagggctcgggtaacgataagactactccagagatagcgttaggaatgatggacgactttgtcaccccacctgatgaagttaaaccttactcctatgtggcagtggcatcaggctctaaaagacacaatatggccaagatatatgcgggtttttacaaatatgacgattctacagttccaccagaaaatcaacaacgtgtcccaatcattacaattgtgaagtgcggtactcctgcagagcagggggccgccaaacccggtaacagaggtaagcgtgattctcaaattattctgatgtcctttttagaaaaaataacatttgatgaaagaatgactcaattggaatttcagcttttaaaaaatatttggcagattacggggctaatggcagacttctacgaaacggtacttatggttgatgctgatactaaagtctttcccgatgctttaactcatatggtcgctgaaatggttaaagatcctttgattatgggtctttgtggtgagaccaagatcgctaataaggcacaatcttgggtaactgcaattcaagtgtttgagtactatatttcgcatcatcaggctaaagcttttgaatctgtcttcggttcggtaacttgtttgccgggatgtttctcaatgtatcgtataaaatctcctaaaggttcagatggttattgggtacctgtattggcaaatccagatattgttgaaagatattcggataatgtcacaaacactttgcataagaagaacttattattacttggtgaagatagatttttatcttcattaatgttaaagactttccctaagagaaagcaagtatttgttccaaaagctgcttgtaaaactattgcccctgataaattcaaagtcttactttcccagcgtcgaagatggattaattctacggtacataacctttttgaattagttctaatcagagacttatgtggcactttctgtttttccatgcaatttgtgattggtattgaattgattggtactatggtactgccgttagccatttgctttactatttatgtcattatttttgccattgtatcaaaacctacacccgtaatcactttagttttactggcaattattcttggtctgcccggcttaattgttgttataactgctacgagatggtcgtacctatggtggatgtgcgtatatatttgtgctttgcctatttggaatttcgtactaccttcatatgcgtactggaaatttgatgacttctcatggggtgatacgagaactattgcgggaggtaataaaaaggcacaagacgagaatgaaggtgaatttgatcactcaaagattaaaatgaggacatggagggaatttgaaagggaagatattctcaatcggaaggaggaaagtgactccttagttgcatag

SEQ ID NO: 79219 - DNA, 1107 bp, Saccharomyces pastorianus
atgaccggcttgaatggagatgatcctgatgactactatctgaaccttaatcaagatgaagagtctctacttaggtcaagacacagcgtcggctcaggagcacctcatagacaaggctctttagtgcggcccgaaagaagccgactgaacaatcctgataatccacatttttattatgcgcagaaaacgcaggagcagatgaatcacctggatgttttaccatcaagtaccggtgtaaacccaaatgcaactcgtcggagtggctccctgcgctccaaaggctcagtgagaagcaaatttagtggccgcgaaacggatagctatcttttacaagatatgaatactactgacaagaaggcttccgttaaaataagtgatgaaggtgttgcggaagacgaatttgataaagatggtgatgtggacaatttcgaagaaagctccatgcagcccataaataagtctatcaaaccattaagaaaggaaacgaatgatacattgtcattttggcagatgtactgttatttcattacgttttgggcacctgctccaattcttgctttctgcgggatgccaaagaaggaaagacaaatggcgtggagagaaaaggttgctttaatttctgtcatcttgtacattggtgcgattgtggctttcctgacttttggtttcactaaaaccgtttgtagtagttcgaaactacgtttgaaaaacaacgaagtatcaacagaatttgtcgtagttaacggtaaggcttatgaattggatacttcctcgcgttccggtatacaagacgttgaagtagattcagacaccctttatgggccctggtcagatgctggtaaagatgcttcgttcttgtttcaaaatgtgaatggtaactgtcataaccttataactccaaagagtaattcttccattccccatgacgatgataataatttagcatggtattttccttgtaagttaaagaatcaagatggctcttcgaagccaaacttcacagttgaaaattacgcaggatggaactgtcatacgtctaaagaagatagggacgcattttacggtttaaagtcgaaagctgatgttacttcacttgggatggtataa

SEQ ID NO: 79220 - DNA, 261 bp, Saccharomyces pastorianus
atgtatgtaataatattaaaaacaactgtatggataatacttctggaccaatcggtgataccatcttccttatttatggtattattatcattattggaccccgccggtgctttttttttttaccttaaaagagtggttctcctccaagggacgcacgagtggtgtacccaggggttgtttccatggctaaagaaattggagattacaaacgtacattgtcatttaagaaggttcataatctgccaattacatttgatataa

SEQ ID NO: 79221 - DNA, 201 bp, Saccharomyces pastorianus
atgtttaaaggatctgtgtcactgtatatactttgttttgctttagggttacgaaacacatttttaatatataatgtatgtaataatattaaaaacaactgtatggataatacttctggaccaatcggtgataccatcttccttatttatggtattattatcattattggaccccgccggtgctttttttttttaccttaa

SEQ ID NO: 79222 - DNA, 162 bp, Saccharomyces pastorianus
ggcagtgcaagcttgcatgcctgcaggtcgaacaagcaagtcttgttgagattgaacccttacgccaaggtctttgctgctgaaaagctaggttccaagaaggctgaaaagactggtaccaagccagctgctgttttcaccgaaactttgaaacacgattaa

SEQ ID NO: 79223 - DNA, 1716 bp, Saccharomyces pastorianus
atgcttggaacctacagacagtttgatgcaacctcgttctacaaggttttaggcatctactataactttttccatattaattttcctgtaataccaattaacaaaagtaaatttactgacatgcttgatcctgaaaaaccaaacgtgattgatgagatcagacaaattaacaatgaaattatccagtgttttaaaaccgcgctagaggtattggtattttgcaaaataaaacaaagaaggtcatcgaaatcaacaaaatcatggtctcgtgacagtttatgcgattttcaaaaaggtctgtattacattcagaatttcaacaaatgtatagccgactgcttccaaagtttaataactataaaacccgtattaaaacaaaattccagtgttattccttcaagaataaagttcatttacttttcgacaataatagtgttaaattttatcttaatattggccggtgaggaaagctcgcttttgctaggcccctctgttggggtttttaacgaatttcaagctcataagttatttctaccttttgaaaatacgtccccaatgctattattaaattcaaacgaggaaagtggtgacgagatactggattatgctgtgttgttcaaaaggttgtacatccttttaaacattctggatacgctacaaagctttcggctaggtcaaccaaaattaattaatctaaattttggtagcgccattgaaacatattttagcgataaaacaggtcataaccaagtcgtcgaaaaagctcccgtagctttggataacattctacgaaaccttaaacttggtgaatttataacatattttgtccttaacagaaaatcattgcaagtaaatgtacctcaccacttgctgttcacaaatcaaacggattacggagagttcgctgttgaaaaaggggaacatgataatatagctggcaaatttgagacccttttgaagaaaaaggaaattttaatcagaaaattactaaatattgaacagaaaaatgaccatattctagaaaattgctgcaattcggatgctgaaatgaaaaatatcggagagctagtctgctcaatgatcactctggtatcaggcatattagattcaattactaatatgaacgcagaaaactctgttgatttggattcaaagccccttccgaacgcctattttgctcaggacagtgaagaagaattaatgtcgccaacacaaagtattacgtcaaatcttgccagtgaagaaaatacacgttgcacaaccaaagacttgatgggaactgtttctattttcatgctgccaatggtggaagaatgctataatatcattagtttgataggacccatacctaccacattaataagtttatacatccgtaatggaaatatggccaagggaataaatgacagaattatgacgttgtcaactgcgctgaacgaattggtgcaaataaccgcactatttaataccctagaaccttttaggaagaatgcacatgaccgtgctaagcgttactatgtaagtgctacaagtagtaccggatgctacgaatcggtaatgaagagcatgtattccggaaaatgtgcagctagtaacgcctcaaacgttgcgccatcggaggaagaaaacaaaaagatattgaaaaagtttgccgacataggttggaaattgatggatgattcagaattgggttgttgctgttgcttctttaactaa

SEQ ID NO: 79224 - DNA, 882 bp, Saccharomyces pastorianus
atgtcacaccatgttcctaatttatatggtacacctattcgcgaccctcacgaacacaaacgcaattcagcgtcaatgggcgaagtaaatcagtcagtttcttcgaggaattgtgaaagaggaagtgaaaagggcacgaagcaaaggaagaaagcctctcgcgcttgtgaccaatgtagaaggaaaagaatcaagtgcaggtttgataaacataccggcgtatgtcaagggtgcttagaagtcggtgagaagtgtcaatttattagagttccattgaaacgtggtcctgcaaaaaaaagggccagtgtagcatccaatgaaaaattcagctcggataatgaccctcttcaataccgaccaagaacacattcatacccaatgaactcgggaaataactacttaccatcactcgccaggaattcctcttttccttccataagcagtctatttgttccctcaataactgctcaatcgcaacaatttgtaaaggtgccgtacgatgacatcaagcgtaggagctctctggcaacattaggcagcgattcatcgatatctaccgaatttgggggaaactatcgcttagatgaaaacttaaatgtcaggcaagaggggaaggatattgtagcgaaaggaatgataacgcccgtggaggaaatgggcgcatgttcatctaacgttcgtcgtcagggttcacaatctcttccaattcaagaacagcgcgctagcccgtacattaacccttttatctctgggagatccaggctaagcagcctttcctatacaagtgaggctacaacttcagaaggtaatacgcaaggtaaaaaccaatgcatgcttactcccaatagtgtacgttccattgaaaaggaacgattaaattag

SEQ ID NO: 79225 - DNA, 1176 bp, Saccharomyces pastorianus
atggcgggaaaattttttcacaaagggaaattatatgttataaaaatagttgaagagatgagctgcctactgctcaccttgccgtttccaaaaaagagttataaccgacaaattcatccaaagaaaataatgagcaagacagccgtgaaagattctgctacagaaaaaaccaagctaagtgaaagcgaacagcgctacttcaattcgtacgatcactatggtattcacgaagagatgcttcaagatactgttcgtaccttatcttacagaaacgcaattatccaaaataaggatctttttaaggacaagattgttttagacgtcggttgcggtaccggtattttatccatgtttgccgctaaacacggtgcgaagcatgttatcggtgttgatatgtcaagcattattgagatggcgaaggaattggtagagttgaacggattcagcgacaagatcaccttgctaagaggcaagttggaggacgttcatttaccctttcctaaagttgacatcataatttctgaatggatgggttactttctactatacgagtccatgatggacaccgttctttacgctagagaccactatttggtagaaggcggtctgatctttcccgacaagtgctccattcatttggccggtttggaagactctcagtataaagacgagaagttgaactactggcaagacgtttacgggtttgattattcgccatttgttccgttggtcttacacgagcccatcgtcgacaccgtggaaagaaacaatgtcaacaccacctcagacaaattgatcgaatttgatttaaatacagtaaaaatatcagatctagcgtttaagagtaactttaaattgacggccaagagacaagatatgattaatggtatagtcacctggttcgacattgttttccctgcaccaaagggtaagagacctgttgagttctccactggtcctcatactccatacactcactggaagcaaacaatattttatttccctgatgatctagatgctgaaactggtgacaccattgaaggtgaattggtttgctctccaaacgagaagaataacagagatctaaatatcaaaatttcttacaagttcgaatcgaatggcatcgacggtaattcaagaagcagaaaaaacgaaggttcttatttaatgcattaa

SEQ ID NO: 79226 - DNA, 594 bp, Saccharomyces pastorianus
atgactacattctcctattcaatttgctatgcaagaaagaatttaagctcggttcccttatacagagacttggaaattcaactctcaaatattgcatcttccagctccaaaacccaatcaagcgttgtcttgaacattttgaagttagcccaattaacttcggttaatgttatacatccatatgtcttgatggcaactgtaatcctaacaatcctaatgtttctatttattctgtatgtaactgtccctaagttaccattcaaactagcggttaataaatttctactgttgctaagttcaactatagttttgacatggggtattggtgcgatgtggactcatgtagggataaatgcaagttacagattggttccatcatcaagtatgaatataattactgtcaagaagggcaagaaggcagcagtaatggcttggtttagctttgcattcctccttttagacagtgtggttttatggttaatatttttaagggataggaaaagcttgaaagatgaaattgataatgttccatgtgcccaaaataggtacaataactactcttcggattcatctacattgcattccaaagtttag

SEQ ID NO: 79227 - DNA, 462 bp, Saccharomyces pastorianus
atgcttttaaaaagatacaaagagaaatatggaattcttgctcctgaagctcgtatatcgtggaatgttgttacatctgtaatatctttccccattgcgctattgatatttggctggtgcctagataaaaaatgccactgggtaacgccactaataggaacagccctctttggatatgcagctatgatgacaattggtgctaccctttcctatttagtcgattcattgccgggaaagggtgccaccggtgttgctttgaataatttaataaggcaaatcttggctgcaaccgcagtttttgtcaccacacccatgttaaacggtatgggaactgggtgggctttcacaatgctggcctttatcgtcttgggtgctagtagtgtacttataatactgaaaaagcacggtgattactggagagagaactacgacttacaaaaattgtacgacaaaattgattaa

SEQ ID NO: 79228 - DNA, 444 bp, Saccharomyces pastorianus
atgctatttttcaaacagcaacctcacatcttcaacaatccaaaggtcaagacttccaagagaaccaagagatggtataagaatgccggtttgggattcaagaccccaaagaccgctattgaaggttcttacattgataagaaatgtccattcactggtttagtttccatccgtggtaagatcttgaccggtaccgtcgtctccaccaagatgcaccgtaccattgtcatcagaagagcttacttgcattacattccaaagtacaacagatacgaaaagagacacaagaacgtcccagtccacgtctccccagctttccgtgtccaagttggtgacattgttaccgttggtcaatgtagaccaatctccaagactgttagattcaacgtcgtcaaggtctctgctgctactggtaaggccaacaagcaatttgctaaattttaa

SEQ ID NO: 79229 - DNA, 2001 bp, Saccharomyces pastorianus
atgacgacgacgacaagaataagaaagatgcgggtgttggtgtggacgatgatcatcaatctatggcgatggctgccgtcgctgctgcttacactctatcgaaaaataacaataataataacagtatttgcgaacgatagcaattcgcgtaaaagacagcatgataacggaaataatcatgagaattcacagaaaaagcggaaaaacaataatgatgacgatgacagacaaattggaaacgtagatccggaattaaccaccttgggtgatgcagatgacaacgatactaataatgatgtgattgatcgtgatcaactggtccataaggccattatcgacgctgattcgattacccaacatcctgatttccagcaatacttgaatactgcggctgatactgacgataacgaaaaattaaagcatattaaagatcatttgatgcgtacacacggtttgaatcatcagaataagaatcacaatgatgatacagatgatttatcaaatagtacaaagcaatactctgaactgcagaaagactctatgctggatagttccctcaacaaatctagaaattatatggaagtcttgcccaaagttatctctcaagatactcaaccacaccaacaaaaatctccctctcatgataatgaagctggcagcgtggacaattcagaaatatctcaactacttcaatcagccgccacaaaggcatcatctttggtatctttatcctcatcctcagcaacgccatcgacttcaaggtctaacaatagcaaagcttttgataaagccgaagacgccgctttagaaagatttattaacgagtatgaggccattgaacgtttgactagacaacaagtttgtgagaggatatggagttccgacaggccaaaggacaacttttggaataatatttacaaagtcttaccctatagatctagctcctctatctacaaacacatgagaagaaaatatcacatttttgaacaacgtggtaaatggaccgcggaggaggaacaagagctagctaaattatgtgcagaaaaagaaggtcaatgggcagaaataggtaaaaccttaggcagaatgccagaagattgtagggatcgttggagaaactacgtaaaatgtggtaccaatagagcatcaaatagatggtccgttgaagaagaagagcttctgaaaaaggttatcagcgatatgctggaagaagcccagcaacaacagtctcaattacatccaaacttattggaagaagaacagcatttactgcaagatgaccagaatgatcatcgcaataacgatgaagacgatgatgatacagcttctgcagcagcagctgctgctgctgctattcaagaacaacaacaacttcttcaacaaaagcagcaagatgatgacgatgctattgccgctgctgccgctgctgcttcttcatccctgggagacaacaaagacgaagacaaaccccacgattcattaggtatacagctcgatgataattcccagaactcaatggtacctgctccatcagcaacaagcacacattctaaaagtttgtcaaatacaatcagacgtcacaataataaactgaggaaatctttgatgggtaacggtaagttagatttcaaagacatcattaactggaccattgtcagtgagcgtatgggcggtacgagatcacgtattcaatgtcgttataaatggaataaattggtcaaaagggaagcaattgccaaaattcagactgtaaaagatgatgatatgttatggatttttgaaaaattaagagatttaggtataacagaagattctcaagtagattgggatgaacttgcagctttgaagcctggcatgaaattaaatgggttagagttgaaattgtgctatgaaagaatgaagaaaaaggtcaaaggctataagcaaaaatcaatcaatgaaatcagtaaagagctagttgattattttagctccaatatttcaatgaaaacagaaaattaa

SEQ ID NO: 79230 - DNA, 573 bp, Saccharomyces pastorianus
atgccttcaggtcataacgataaaaacgcaaatcaagagtctgtggaagaggctgttttgaaatatgtcggcgtaggtctagatcaccagaaccatgaccctcaattgcatacgaaggatctggaaaacaaacactcgaaaaagcagaatattgtggaaagtagtagtgatgttgatgttaataacaatgatgacagtaatagaaacgaggataataatgatgattctgaaaatattagcgcattgaatgcgaacgaatcatcttcgaatgtggatcatgccaactccaatgaacaacataacgcagttatggattggtatttaaggcaaacagcgcataatcaacaaggcgacgaagatgacgaaaacaataataacactgacaacggcaatgacagtaataatcacttttctcaatctgacatagtcgtggatgacgacgacgacaagaataagaaagatgcgggtgttggtgtggacgatgatcatcaatctatggcgatggctgccgtcgctgctgcttacactctatcgaaaaataacaataataataacagtatttgcgaacgatag

SEQ ID NO: 79231 - DNA, 450 bp, Saccharomyces pastorianus
atgatcccttttgtcccgcctcctaatgtccccaagaaagataagagagaagtggatgaggtatcattgacttcaatgttatccatgggactaaatcccaacttatgtcgtaaagccttgatactcaacaacggagatgttaatcgtagtgttgaatgggtatttaacaacatggatgatgatggaacatttcccgaacctgaagtgccaaatgaagaacagcaacaaaaaaaggatcttggatattcgaccgctaaaccgtacgctttaactgcagttatttgtcataagggaaattctgtccattctggtcactatgttgtttttattcgtaaactagtggcagacaaatggaagtgggttctttataacgatgagaaactagttgctgccgacagcattgaagatatgaaaaaaaatggttatatttatttctatacaagatgctaa

SEQ ID NO: 79232 - DNA, 120 bp, Saccharomyces pastorianus
atggtaggcgtgcgcgccctatttaacaccggaaaccaagacgctgagagcgctatgaatggcgtattccagcatatggatgaccctgatttaaatgatcccttttgtcccgcctcctaa

SEQ ID NO: 79233 - DNA, 309 bp, Saccharomyces pastorianus
atggataaaggcaagagtgcaggctgtcctgatacttttgcagcctctttaccacgaatcaataaaaaaaagctcaaagcaactgacaactgctccatttgttacactaattatttagaagatgagtaccccttagtagttgaattacctcattgccatcataaattcgacttagagtgtttgtctgtctggctatctcgaagtacaacatgtccattatgcagagataatgttatgggccaccgaatcattaatgagattgatacaactgaagcagaactggaagaagattggggtatgtacggttaa

SEQ ID NO: 79234 - DNA, 171 bp, Saccharomyces pastorianus
ttcggtcatctttcaagacataacagaatccatacaggtgaaaaaaatcatatctgtccgcatgagggctgtggacagaggtttagtagacatgataactgtaatcagcattatcgaactcatgcaaacaagaagaaaagaaactggaagaggagggaggctagcagttga

SEQ ID NO: 79235 - DNA, 474 bp, Saccharomyces pastorianus
atgtccataggttacaaagacaacttgatgtcaactattctagctaaagataggaaatgtgaatttcccatcaatttcgaatgttcgccctcccagataactcttatgcctgaaatgttctcttttaacaatgaaaggaaataccaaaccctgatacccttgatgaaaacatcacatctaattgatgatgacttgaaagataaattgaataagtgcgctttcgattttttctccggaaaacaagcgaacagaacgagtgacgggactatttcaagattaacagcaagtggaaaaacgtcaccgatactgccattgcaaaatattaatattgtaaaagcagagaataccggtaacggtaaatcagatccatatggctcaattaaaataagcaaaccgacaaaaaccgtgataaaattgaaatctacgaaaaccaatacagcaggacagaggactcgtcatttctgtaagatctga

SEQ ID NO: 79236 - DNA, 813 bp, Saccharomyces pastorianus
atgatcctcattggattcaatgttccatataatgatgaccaactaatgggcgcaggcggatccgctacacatgcatctccctatgtcttagccgcttctattcacggtgtgaaaattgttccacatattatcaacgctgttattttgatttctgtggtttcagtggcaaattcctctttgtatgctggtccaagactgatttgctctttggcccaacaaggctacgcacccaagtttttagattacgttgacagagagggcaggcccttgagagctcttattgtgtgttgcgttttcggcgtcattgcttttgttgcagcttcatcaaaggaagagatcgtgtttacatggttagcagctatcgcaggcttgagtgaattattcacatggacttccataatgttgtcccatctgcgattcagacaagcaatgaaagtacagggaaggtctctagacgagttgggatacaaggccacaacagggatttggggttccatatacggtgtcttttttaatattttagtgtttgttgcccaattttgggtagcattggcccccttaggtaatgggggcaaatgcgatgcggaatccttctttcaaagttatttagcttttccaatatggttggccttttacttcggatatatggtttacaaccgtgattttacgctattaaatcccctcgacaagattgaccttgacttccacagacgcatttatgatccagagctaatgagacaagaggacgaagaaaataaagaaaaactaaggaatatgtctttgatgagaaaagcttatcatttctggtgttaa

SEQ ID NO: 79237 - DNA, 813 bp, Saccharomyces pastorianus
atgctatcttcagaagattttggatcttctgggaaaaaggaaacttctcctgattcgatatcgatacgttcctttagtgccgggaataatttccaatcatcatcaagtgagaaaacttattctaagcaaaaatccgggagtgacaaacttatacatagatttgcggattcattcaaaagagccgagggtagcactacaagaactaagcaaataaatgaaaatacgtctgatttagaggatggcgttgaatctatcacgtcggattccaagttgaaaaagtccatgaagtcgcgccatgttgtcatgatgtctttagggacaggtattgggactggtcttttggtagctaatgcaaaaggtctacattacggtggtcctgctgcgctagtaattggttacatcttggtttctttcgtgacgtacttcatgatccaagctgcaggtgagatggcggtaacctatccgactttaccagcaaatttcaacgcatactcctccatattcatttccaaatcatttggattcgccacagtatggctttactgtttccaatggctaacggttttgcctttagagttaataaccgcgtctatgactattcaattttggaatgataaaataaatccggacatttatattcttattttctatgttttcttagtattcattcatttcttcggtgtaaaagcctatggtgaaacggaattcatcttcaattgctgtaaaattttaatgattgcaggtttcattattctttctattgttatcaactgtggtggggccggaaatgacggttatatcggggccacttag

SEQ ID NO: 79238 - DNA, 2775 bp, Saccharomyces pastorianus
atgcagataccgaaatatgagaacaagccattcaaacctccaagaagggttggatcaaataaatacacacaactcaaaccaaccgccactgcagtcacaacagcccctatatctaaagccaaagttactgccaacttgaaaagaagcatttcggcgggacctaccttaaatcttgctaagaagccgaataatctgacctcaaatgaaaacactagatattttactatcatgtacaggaagcctactaccaaaaagcacaagacttggagtggtgatggctacgctaccttaaaagccaatagcgataagttatgcttttataacgaagcagggaaatttcttgggtcaagtatgctaccaagtgattcagattctctcttcgaaactcttttcaaagcaggctccaatgaagtacaattggattacgaattgaaggaaaatgcagaaatacgtagcgccaaagaagccttatcacaaaacatgggaaatcccagcccaccgaccacaagtacaacagaaacagtgccttctacgaagaatgacggtggcaaatatcaaatgcctctgtctcagctgttttcactaaacactgtgaaaagattcaaatcagtaacaaagcaaacaaatgaacacatgaccacagtacctaaaaccagtcaaaattccaaagccaaaaaatattatccagtatttgatgtcaacaaaatcgataatcctatagtaatgaacaaaaatgcagccgctgaagttgacgtaattgttgatccattactgggcaaattcttgcgccctcatcagagggaaggggtgaagttcatgtatgattgcttaatgggcttggcaagaccaactattgaaaatccggatattgattgtactactaaaagtttagtgttagaaaatgactcagatattagtggatgccttttggctgatgatatgggtttaggtaaaacactaatgagtataactttgatttggacattaattaggcaaactccttttgcatcaaaagtttcatgttcgcaatcaggcataccattaactggactttgtaagaagattttagtcgtttgtcccgttactttaataggaaattggaaaagagaatttggaaaatggttaaatttgtcaagaataggtgttttgacattaagctcaaggaattctcctgatatggataaaatggctgtcagaaattttttaaaagtgcaacgaacttatcaagtcttgattattggctacgaaaaactcttgagtgtttctgaagaattagagaaaaataaacatttgattgacatgctggtgtgtgacgaaggccatcgactaaaaaacggggcttctaaaattttaaatacgctgaagagtttagacataagaaggaagcttttgcttacgggaactcctatacaaaatgatcttaatgagtttttcagtattatagatttcataaacccaggaatccttggaagcttcgcttctttcaaaagaagattcattatccctataactagagccagagacactgcaaacagatacaacgaagaattgttggaaaagggggaagaaaggtcaaaagagatgatagaaattacgaaaagatttattttgagacgaacaaatgcgattttagaaaagtaccttcctccaaagacggatataattttattctgtaaaccatacagccaacagatattggcattcaaagatattttgcagggcgcacgtttagattttggacaattgacgttcagttcttcgctaggactgataacattactgaaaaaggtttgtaactctcctggattggttggctcagatccctattacaaatcacatataaaggatacccaatctcaggacagctatagtcgttctttgaactctggtaagttaaaggtattaatgacattactagaaggtattaggaagggtaccaaggagaaggtcgtcgtagtgtctaactacactcaaacattggatataattgaaaatttgatgaatatggctgggatgtcacattgcagactcgacggttccatacctgctaaacaaagggactctatcgtcacatctttcaatcggaatccagccatatttggattcttgttgagtgcaaaatcgggaggtgtaggattgaatctagtcggtgcttcgcgacttattttatttgataatgattggaatccttcagtagatttgcaagcgatgtcacgaattcatagagatggccaaaaaaagccgtgcttcatatatagacttgtcacaactgggtgtatcgatgagaaaatattgcaaaggcaattaatgaagaacagtttgagccaaaaatttctaggtgactcagagatgagaaataaagaatcttctaatgatgatcttttcaataaagaggacttgaaggacctgttttctgtccatacagataccaagagtaacacacatgacttaatttgttcttgcgatggtttaggtgaggaaattgaatatcctgaaacaaaccaacagcagaacactgtagagctgagaaagcgtagcactacgacatggactagtgcgctggatttacaaaagaaaatgaatgaagcagccaccaacgatgatgccaaaaagtcacaatacattaggcaatgtctcgttcattataagcatatcgatccagcaagacaagatgaattatttgatgaggttatcacagattcgttcaccgacttgaaagatagtattacctttgcagttgtaaagcccggcgagatatgtctcagagaacaatga

SEQ ID NO: 79239 - DNA, 594 bp, Saccharomyces pastorianus
atgtatgatggaatgcaacctaatttattgagcacgaatggaaatacgaacatcagcagtatggtcaaggttcatgttttacataataaccgaaactcaacagagagatctccttacgaaccaatagttgcagagttacttttggaggtgaaggagaacagggcttgcactttaacttttgaaagtagacatcaggcgaagtcacctgtcagagaaatcacggtatatcaaaagaaaaattcggccccacagaaagctaatatcacgaagacgatcaagtctgcttctggcataaacgaactgcaattgcataaacttgatttcgatcaggaaacttaccatatcggagtccagtggtttccaaaacttttgacggatggaaatgtagaggatgacaagttggggacaaaagacgaactgtctgtttctattagctgttattggggagaatatgattcggaatcggttgtaaatggtaccgctgttaggaaaattccagcatttgatgaattgataaattacgcacctctaagtttttcctttaccaacgaacagaaaggattagttattgtcaaggatgctataattttataa

SEQ ID NO: 79240 - DNA, 1857 bp, Saccharomyces pastorianus
atgggtgtagtgtctttactagcgaacctcaagtaccatataaagcacagaccgaacaggactttaattttcaactttaataataatgaagagtttggcctactaggtgcatcaacttattttgatcactcatggtctaatttaaccaagtatgtgataaatttagagggaactggtgctggtggtaaagctgtactgttccgaacttcagatacttcaacagcaagaatataccaacagtctgttaaggaaaatccatttggtaactctatctaccagcaaggtttttatagcagatatgtcaggagtgagacagactacaagatttacgaagaaaatggcatgagaggctgggatgtcgcattctacaaaccgagaaacctttatcataccataaaggattcaatacaatatacctccaaggcatctttatggcatatgctacatacttccttacaattaagtgcatatgtggcttctaattcattggatacagctgaccaaacgccggcttgttattttgattttatcggtttgaagtttttcgttataagcgctaaaacgcttttctattggaactgcatatttctattagtttcacccgttgtggccattggcttgtatttaatttctcgtgatagaatgacttggaaatcttattcatggctatcgtggacacgctttcctctttcattagccgctggtattattgtccaaaagcttttctctaacgacataattcgttccaatcctttgacgttctcaaggaactacttttggcctatctcggcttttttcactcaagtaatttttaccagttatgttctgattaattgctccaatttttttttcccctgtgccgatatgaaaagcctatcaattatcgaattgttcattattttatggaccattttactttttacgtcgaagttattgtatagttccgactataggtataccgggctttatcctctctcgattttctttcttctgagcacaatagctgctatattgagactacttgcactagcgttgggaatgagaacaaggaagaggcttggtagagaatgtagggaccatcactccaattacagctcccattctcaaatagatatggaacgagacggtcaggaaaacttggaacaaccccaagatcaacttacatcgtcacaagacgatcaagcaagtatccaagatgataatgtgtcaactacttcagctggcccatcacataatgttgacgaggatcatggtatggattcatcgtcacaacaacatgatgaaagggtaccattactgaaggggtctaatagcatggaggaaggattgagtactagagaaaattctctaaaacttgagtataccgattatgcctggatcattcaatttttgctaattgtaccaataccatcatttattttgtttaacagtgtggatgttatcatggacgcactaaaccatactgtccaggaaggaagtaaggctacatttgatgtactcaggttcggaatggtgggcagtattttgatcgcgctaccaattttaccttttttctataaggtcaactatatcacaatttctttaactgcactgcttttcttgatttccgcatccaaaacgctcctagtgcacccctttaccaatagtaacccattaaaagtaaggttttctcaaaatattgatttgtctcaagggaacgctgccagtgtacatgtccttggaagagaaggaaattttttaaaacctatgctgcaagatttaccaagtataaaatatagctctacacatattaactgtacttccgtaaccaatggaatggaacttgtatgtatgatggaatgcaacctaatttattga

SEQ ID NO: 79241 - DNA, 264 bp, Saccharomyces pastorianus
atgcctccaatgctcaagctaacgtttcagcttccgctagctcttcttcctcttcttctaagaagtctaagggtgctgctccagaactggttccagccacttcattcatgggtgtcgttgctactgttgccgttgccttactataagattaaagcaacaatttgtgtttctattattactttaatttcttctctaatgatttctttaccattccttttttattatgaggcggttggttcatcactgaattttatatgtagataa

SEQ ID NO: 79242 - DNA, 984 bp, Saccharomyces pastorianus
atgcaagaattgatcattttgaccagtgcttctttcggttctttgcaagaagtagactccattaacatggtgactttgcctgccatttctaccttctccaccgatttacaaaatgctaacaacattattgtttctgacaccactttggaaagtgtcgaaggtttctccactttgaagaaggttaatgtctttaacatcaacaacaacagatatctaaactctttccaatcttccttggaaagtgtctctgactctttacaattctcttccaacggtgacaacactactttggccttcgataatttggtctgggctaacaacatcactttgagagatgttaactctatttctttcggtagtttgcaaactgttaacgcttccttaggtttcattaacaacactttgccaagtttgaacttgacccaattgagcaaggttggtcaatctttgtctatcgtctccaacgatgaattatccaaggccgctttcagtaacttgactactgttggtggtggtttcatcattgctaacaacacacaattgaaggtcattgacggttttaacaaggttcaaactgttggtggtgccattgaagttactggtaacttctcaaccttagacttatcttctttgaagtctgttagaggtggtgctaacttcgactcttcttctagtaacttctcctgtaacgctttgaagaagttgcaaagtaacggtgctattcaaggtgactcttttgtttgcaagaacggtgccacatctacctccgttaagctatcctctacttctactgaatcatccaagagctctgctacatcttccgcttcttctagtggtgatgcctccaatgctcaagctaacgtttcagcttccgctagctcttcttcctcttcttctaagaagtctaagggtgctgctccagaactggttccagccacttcattcatgggtgtcgttgctactgttgccgttgccttactataa

SEQ ID NO: 79243 - DNA, 471 bp, Saccharomyces pastorianus
atgctggatgctggttcattctggaatactctacttcccctattacaaaaagattatgaacgttccaaggcctatatagcaaagcaaagcaagtcatctgcaaatgataaagcctcaatcacttccacagaagaccattctttcgctttactagaagaggatcagtttgtctcaaagaaaaccgcaacgaaggcaagattacctcctactggtaagataagtaccacatacaaaaagaaaccgatcgcaagcgcgtttatacttccagaagaagacttggaaaacgacgtaaaagcggatccaacaacaattgtaaacgccaaagtgggtgcagaaaatgatggagattcttccttatttttgcgaacgcctcaacctttagatcctttggatatggatgatgcttttgatgataccaatatgggcagcaatagttcatttagcttgagccttcctcgccttaatcaataa

SEQ ID NO: 79244 - DNA, 1641 bp, Saccharomyces pastorianus
atgactgaaagaataccaataaagaattatcaaagaacaaatgccaaagctttacttaaattgactgaaaaactttttaacaagaacttttttgatctctatttaacctctcagcaattggtcgttcttgaatacctgctgtcgatttcaagtgaagaagacaaactgaaagcatgggactatttcttaaagggaaacatagcattaaatgtcgaaaaatcatttccattaacccaagaagaagaacatcacggagcggtctctcctgccgttggcacacgatcagatgatgtatcatcacaaacaattaaggacaataacaatactaataccaacaccagtatcagcaatgaaaatcatgttgaaaatgaaattgaagataaaggcgataacgcaatagcaaatgaagataattttgtgaataatgacgaaagtgataatgttgaagaagacttattcaaattagatctagaggacttgaagcagcaaataagcggaacaaggtttattggaaacttatccttgaaaatcagatacgtcttgtggcagtgcgccatagattatatatactgtgatcgtaatgagtttggtgatgaaaatgatacagaatacaccctattagatgttgaagagaaggaggaagaggaaattggtaaaaatgagaagccacaaaacaaagaaggtatttcgaagttcgccgaggatgaagattacgacgaagaagacgagaactatgatgaagacagtacagacataaaaaatgtcgatgatcctccaaaaaatctcgattctatttcctcttctaatatcgaaattgacgatgaacgacgcttggtgctaaatatctcaatatcaaaagaaacactgtcaaagttaaaaacaaataatgtagaagaaattatgggaaattggaacaaaatttaccacagttttgaatacgataaagaaactatgataaagcgattaaaacttgaagaaagcgataaaatgatagagaaaggaaagaagaaacgaagtcgaagtgatttagaagcagctaccgatgaacaagatcgcgaaaatacaaatgatgagccagatactaatcaaaaattgcccactcctgaaggttcaacattcagcgatactgggaacaagcgccccaaacaaaataatatagatttaacagtcaatctaggcatcgaaaatttatcattaaagcaccttctatcatctatccagcaaaaaaaatcccaattaggaatatcagattacgaattaaaacatctgattatggatgtcagaaaaaatcggtcaaaatggacatcggatgaaagaattgggcaagaggaattatacgaagcctgtgaaaaggttgttttggaacttagaaactacactgagcattctacaccatttctgaataaagtgagcaaaagagaagcccccaattatcatcaaatcatcaaaaagtctatggacctgaatactgttttaaaaaaactgaaaagctttcaatatgactccaaacaagaatttgtagacgatattatgctaatatggaaaaattgtttgacctataattcagatccttcacattttttgagagggcatgctatgctatgcagaagaatctcttcagtgattcgggatcctctagag

SEQ ID NO: 79245 - DNA, 456 bp, Saccharomyces pastorianus
atggttgaggaaagtagtaagactgaggatgcatcaaaagatgctgatgctgccaaaaaggatacggaagacggactacaagataaaactgcagaaaataaggaggctggggaaaataatgaagaggaagaggatgatgatgacgaagatgaagacgaagacatggtcgactcccaatcttatttacttgaaaaggatgacgatagagacgatttggaaatatccgtgtggaaaactgtaactgccaaagttcgtgcggaaatttgcttaaaaagaactgaatattttaaaaatggaaaattaaatagtgattcagaggcgtttttgaaaaacccacaaagaatgaaaaggttcgaccagctttttcttgaatataaagagcagaaagctttagaatcatatcgtcaaaaaatagagcaaaattccattatgaaaaatggcttggaacagtactaa

SEQ ID NO: 79246 - DNA, 468 bp, Saccharomyces pastorianus
atgcagtttcataatgatcactctttaaatggaaatgaagcttttgaaaagcaacccaatgatattgagttagatgataccagattcctacaggaatatgatattagtaacgccattcctgacatagtatacgagggagtaaatactaaaacattagacaagatggaagacgcttccgtggaccgcatgcttcaaaatggtatcaacaaacaaagcagatttctggctaacaaggatttaggactaacacctaaaatgaaccaaaatatcacactgattcagcaaattaggcacatatgccataaaatatccctgatcagaatgttacagagccctttatcggctcaaaactccagaagcaatcccaacgctttccttaacaaccacatttataattacactattattgatgactcactcgatattgatccggtgtcacagcttccaacgcatgatcactccggctag

SEQ ID NO: 79247 - DNA, 255 bp, Saccharomyces pastorianus
atggccaaagggttagaaactgcccatccatcagcaataaacatgcttactgaaatcgccggggataaccaatctaatctgataaagactttgaagcttcatcatgaaactaactccttaaatagaggaacaaatgtggaaatgatgcagacaacactgttggataacggtatgaacaggccagacgatctattgtcctatgtagaatctgaatttggtaaaaaaactaagaacttcaggactatcaaacagtaa

SEQ ID NO: 79248 - DNA, 333 bp, Saccharomyces pastorianus
atgggacctgccgattccccatatgccggcggtgttttcttcttgtctatccatttcccaaccgactacccattcaagccaccaaagatctccttcacaaccaagatatatcatccaaatatcaatgccaatggtaacatctgtctggacatcctaaaggatcaatggtctcccgctctaactctatcgaaggtcctattatccatctgttctttgttaacagacgctaatcctgacgatcctttagtaccagaaatcgctcatatctacaagactgacagacccaagtacgaagctacagccagagaatggacaaagaaatatgctgtataa

SEQ ID NO: 79249 - DNA, 3414 bp, Saccharomyces pastorianus
atgacaacaagcacaccgatatcagataacacttgcaccaatagtaccttggaagacaatgtaaaacttttagatgaaactacggaaaaaatatacagagatttttcccaaatatgtcattgtttggactttcctttaataaaagacgggggtgagattggttcagaccccccaattttggaatcttacaaaatagagatagaaattagtcggtttttaaacacaaacttatatttcccccaaaattaccatttagtcttacagcagtttaccaaagtatccgaaaaggtaaaatcagttaaagaggaatgtgccttactctttatctcttatttgtctcatagtataagaagtattgtttcgactgctacgaaacttaaaaatttagaactattagcagtatttgcacaattcgtttctgatgaaaataaaattgatcgagtcgtaccttatttcgtatgttgttttgaagatagtgaccaggacgtccaggccctatctttgttaacattaatccaggtactcacctctgtaagaaaattgaatcaattgaacgagaatatatttgtggactacttacttccgagactgaaaagattacttatttccaataggcagaataccaattatttaaggattgtgtttgctaattgtttgagcgacttggccattatcattaatagatttcaagaatttacatttgctcagcactgcaatgataactcaatggataacaacacggaaatcatggaaagcagtaccaagtattcagcaaaattgatccaaagtgtcgaagatttaactgtctcttttttaacagataatgatacttatgtaaagatggcacttttgcaaaacattcttccactttgtaaattttttggtagggaaagaacaaacgatattatactgagtcatttaataacctaccttaatgataaggacccagcattgcgagtttccttaattcaaacaatatccggaatatcaattcttttgggtaccgttacattagaacagtatattttaccattgttaatccagaccatcactgattcggaagaattagtagtgatcagtgttttacaaagcttaaaatctttgttcaagactgggttgattaggaaaaaatattatattgatatatcaaaaacaacatctcccttgttgttgcatcctaataattggataagacagtttactttgatgataattatagaaattattaataagttatcaaaagccgaagtgtactgcattctctatccaataataaggcctttcttcgaatttgacgttgagttcaacttcaaatcaatgataagctgttgcaagcaaccagtgtcaagatcggtttacaatctattgtgtagttggtctgttagagcgtcaaaatctttattttggaaaaaaatcatcacaaatcatgtagattcattcggaaataatagaatcgaatttataacaaaaaattactcaagtaaaaattatggatttaataaaagagatacgaaatcaagttcctcgctgaagggtattaaaacatcatccaccgtctattcacatgacaacaaggaaattcccttaactgctgaagacagaaattggattgataagttccacattattgggctaacagaaaaagatatttggaaaattgtggctttgaggggttatgtaataaggacagcgagagttatggcagcgaaccctgattttccatataataatagtaattaccgtccattagtacagaactcaccacctaacctaaaccttacgaatattatgccaagaaacattttctttgatgtagagtttgctgaagagtcgacaagtgagggacaagattctaacttagagaaccaacagatatataaatatgatgaaagtgagaaagatagcaataagctaaatattaacggtagcaaacagctatctaccgtcatggacataaatggatcactaatattcaaaaataagtccattgccactactacttctaatttgaagaacgtttttgttcagttagaaccaacgtcctatcacatgcattctccaaatcatggcttgaaagataatgcaaatgttaaaccagaaaggaaggtagtcgtcagcaacagctatgaaggcgacgttgaaagcatagaaaaattcctatcgactttcaaaattttacctcctctgagagattataaggagtttgggcctattcaagagattgtacggagtccaaacatgggtaatttgaggggcaagttgatagctactttgatggaaaacgaacccaattctattacgtcttctgctgtttctccaggagaaataccctatttaataacaggttcagatcaaggtgtaatcaagatttggaacctgaaagagattatcgtgggcgaggtttactcttcttctttaacttatgactgctcctctaccgtaactcagataaccatgattcctaactttgacgcgtttgccgtttccagtaaagatggacaaataattgtattaaaggttaatcattaccaacaagaaagtgaagtcaaatttttgaattgcgaatgcatcaggaaaattaacttgaagaattttggtaaaaatgaatacgcagtgagaatgagagcatttgtgaatgaggaaaaatctctactagtagcattgacgaatttgtcaagggttattatatttgatattagaaccctggagaggttacaaattatagagaattctccaaggcatggtgccgtttcaagcatctgtatcgatgaagagtgttgtgtcctaattttggggacgactagaggtattattgatatatgggatatccgtttcaacgtgctgataaggagttggtcctttggggaccacgcaccaatcacgcatgtggaggtttgtcagttttatggaaagaattctgtaattgttgtaggaggtagttcaaaaacatttctaacaatatggaattttgttaaggggcattgtcagtatgctttcataaattctgatgaacagccatctatggagcactttttaccaattgagaaaggcttagaagaattaaatttttgtggaatcaggtctttaaacgcactaagcactatctcagtatctaatgataaaattcttcttaccgatgaagcaacaagttccattgttatgtttagcctaaatgagctttcttcttctaaagcagtaataagtccttcaagattcagtgacgtttttattcctacacaagttacggcaaatctcacaatgttattgagaaaaatgaaacgtactagcactcattcagtagatgattctctatatcatcatgatattataaattctatatctacatgtgaagttgatgagacacctttgctggttgcttgtgataactcagggcttattggaatcttccaataa

SEQ ID NO: 79250 - DNA, 870 bp, Saccharomyces pastorianus
atgggggcacaattatcactagtggtccaagcatcaccttccatagccattttttcatatatcgatgtcttagaggaagtacactacgtttcacagttaaactcatcaagattcttaaaaacatgcaaggcactggaccctaacggcgaaattgttatcaaagtgtttattaaaccaaaagaccaatatagcttacgaccttttctccaacgtataagggctcaatcgtttaagttgggacaactaccgcacgttttaaactacagtaaattgatcgagacaaatagagccggctacatgatacggcagcacttaaaaaataatttatatgacagattgagtttgagaccttacttacaagacattgaactgaaattcattgctttccagttgttaaatgcattaaaggacattcataatctgaatattgtccatggtgatataaagacagaaaatatcctagtaacaagttggaattggtgtatattgacagattttgctgcatttatcaaacccgtatatttgcctgaagataatccaggtgaatttttattctacttcgacacctcgaagagaagaacctgttatctagccccggagaggtttaactctaaactttaccaagatggaaaatctaacaatggtaggctaactaaagaaatggacatatttagtcttggatgtgttattgcagaaatatttgctgaaggaagacccatcttcaacttatcacagctattcaaatataaaagtaattcatatgacgtaaacagggaatttctcatggaggaaatgaattctactgatttaaggaacttggttctagacatgattcagacctgcaggcatgcaagcttgcactgccgtcgt

SEQ ID NO: 79251 - DNA, 1353 bp, Saccharomyces pastorianus
atggcaaaaagagtatacaataaaggtgaagacgagcaagtacaccttccgaaaggaaagaagagaaccatagcgttatcaagaacactaatcaacagcaccaaactacctgatacagtagaactaaatctttctaaatttctcgattcctcagatagtattactactgatgtactttcaacccctgcaaaggggtctaacatagtaaggacaggtagtcaaccaatctttagcaacgctaattgttttcaggaagcaaaacgctcgaaaacattaacggctgaggatcccaaatgtactaaaaatactgccagagaggtatcacaactagagaattatattgcctatgggcaatactatactagagaagactcaaaaaacaaaatacgacacttgttaaaagaaaacaaaaatgcttttaagcgagttaaccagatatatcgagataatataaaagcacgctctcaaatgattatagagttttcgcctagccttctccagttatttaaaaaaggagacagtgatctgcaacaacaattggcaccagcagttgtgcaatcaagctataacgattctatgccgcttttaagatttcttcgaaaatgtgacagtatttacgactttagtaacgatttctattacccctgtgatcccaaaatagttgaagaaaacgttttgattctatattatgatgcgcaagaattttttgaacaatacacttcacaaaagaaagaattatataggaagatacgatttttctcaaagaatggaaaacatgtgattcttatactaagcgatataaataaactcaaaagagctattttccaattagaaaatgaaaagtacaaagctagggtagaacaacgattgtcaggaacagaagaagctttaagaccgagaagtaaaaaatcaagccaagttggaaaattagggataaaaaaatttgatttagagcaacgattgcgcttcattgatagagaatggcatgtcaaaatacatactgtaaattcacatatggagtttattaattctctgccgaacctagtgtcattaattggaaaacagcgcatggatcccgcaattcggtatatgaaatatgctcatttgaatgtaaaatccgctcaggatagtacagaaacgctaaagaaaacctttcatcagatagggagaatgcctgaaatgaaggcgaataatgtcgtgagcctataccccagttttcaatcattacttgaagatattgaaaagggaagactgcaatcagacaacgaaggtaaatacttgatgactgaggcagtagaaaaaagactgtacaaactgtttacttgtactgatccaaatgatactattgaatga

SEQ ID NO: 79252 - DNA, 651 bp, Saccharomyces pastorianus
  modified_base (642)..(642): a, c, g, t, unknown, or other
atgagccagatcgttgattttgttgaggacaaagattcaagaaacgatgccagtattcagatcatcgatggaccctcaaatgttgaaattatcgctctctcggaatcaatggatcaagatgagtgcaaaagggcacatgtaagctctgcagagatgattccatcatcaccgcaaagaaaatctgtttcgaatgatgttgagaatgttgacctaaacaaatctatcgaactttctgcgccgttcttccaagatatcagtataagcaagctagatgacttttctacaacagtaaattccatcatagattcgtctctcagaaatgagaataatgcaaaaggaaacgcgaaaaaacttttggatgatctaataagtgatgaatggtcagctgatcttgagtcgagtggaaagaagcacaacaaatcacaatacaatttgagggacatcgcagagaaatggggagtacagtctttaaaaaatccagagcctattgctgttgactgcgaatataagacacaacgaatcggaaataccaatagtgacattagtgatagtccgaaatcacagataggagcagctgatatactgttcgattttccactgtctccagtaaaacatgagaacccaactgaagaaaagcacaanttcgatgct

SEQ ID NO: 79253 - DNA, 174 bp, Saccharomyces pastorianus
atggggaaaagaggtaacgggaatacgcctctggttcaaagactagtgacgttgtcgtatttggctttgttgattctagtcctctcaattgaactcctgacgtggtttgtaaaaaaacagagaacaggaaacaaaaaacaaaaagacaaagaaaaaaatgcgcttttgctttga

SEQ ID NO: 79254 - DNA, 1293 bp, Saccharomyces pastorianus
atgtattctttgatcaggttcttaaatatcaatcctttcacaaagtacttttgtaccaagtgtgattgcgcttcgaaggactggaaatttacggatcgcatgcattgtgaccattgtagtcacgtcattatgcaacacacgaatttcttcaaccatttcatgttgaagaacattcagaaatttggtgtggaaggtcctggtttagagtcttttaataacattcagacattattgaaaaacatcatgctgcgaagaactaaagtggaaagagcggatgacttgggtctaccgcccagaattgttaccgtgaggagagacttcttcaatgaagaggaaaaagatctttacagaagtttatacacagattctaaaaggaagtataattcctttgttgaggagggtgttgttctaaacaattatgcaaacattttcaccctaatcacaagaatgaggcaactggcagatcatcctgatttagttttgaaaagattaaacaattttcctggcgatgatatcggcgtcgtgatctgccaattatgtaatgatgaagctgaggagcccattgaatctaaatgtcaccataagttctgtcgtttatgcatcaaagaatatgtggaatctttcatggaaaacaacaataaacttacttgtcctgtttgtcatatcgggctaagtatcgatttgtctcaacctgctttggaagtggaccttgattccttcaaaaagcaaagtattgttagccgtctaaacatgagtggcaagtggcaatcatcaacgaaaatcgaagcacttgtggaagaactatacaaactgagaagcaacaagagaacgattaaatccattgtgttttcccagtttaccagtatgctggatctggtagagtggagattgaaaagagctggatttcaaacagtgaagcttcagggtagtatgtcaccgacgcaaagagatgaaaccatcaagtatttcatgaacaacattcaatgcgaggttttcttggtcagtttaaaggcgggtggtgttgctttgaatctttgtgaagcttcacaagtattcattttagacccatggtggaaccctagtgttgaatggcaaagtggtgatagagttcatagaattggtcagtatcgacctgtgaagatcacaaggttttgcattgaggatagtatagaagcaagaatcatcgaattacaggaaaaaaaggcaaatatgattcatgctacaataaaccaagatgaagctgccatcagcagactaacgccagctgatttacagttcttattcaataactaa

SEQ ID NO: 79255 - DNA, 891 bp, Saccharomyces pastorianus
atgcaagaagggggctttatccgtagaaggcgtacgagaagtacgaaaaaaagtgttaattataatgaactaagcgatgacgatacagctgtgaaaaactcaaaaactctgcagctgaaagggaacagcgaaaacgtaaatgacagccaagatgaagaataccgtgatgatgctacgctcgtgaaatcacccgacgacgatgacaaagattttatcatagacctaacaggttcagataaagagcggaccgccaccgatgagaatactcatgcgatcaagaatgataatgacgagataatagaaatcaaggaggaacgtgatgtttcggatgatgacgaaccgttaacaaagaaaaggaagacaactgctaggaagaagaagaaaaaaacgagcaccaagaaaaagtcaccgaaggtaaccccatatgaaagaaacactttgcgattatatgagcatcatcctgaactaaggaatgttttcacggatttgaaaaatgcacctccctatgtcccccaaagatccaagcagccggatggtatgaccatcaaactgctacctttccagttagaaggtcttcattggctaatatctcaagaggagagcatttatgcgggcggtgttttggcagacgaaatgggtatgggtaagaccatccaaactattgccctattaatgaacgatttgactaagtctccgtctttagttgttgcccctaccgtggcgctgatgcagtggaaaaacgaaatagaacaacatacaaagggacaactgaaaatatacatttatcacggtgcttccagaaccacggatatcaaagatttgcaaggctacgatgttgtactaaccacttacgcagtgctggaatcggtatcagaaagcaaactacgggtt

SEQ ID NO: 79256 - DNA, 786 bp, Saccharomyces pastorianus
atgggtgccattatgaacggtatctctgcctttggtgcaaactacaagccttacggtggtacctttttgaacttcgtctcttatgctgcaggagccgttaggttagccgccttgtctggtaatccagtcatttgggttgcaacacatgactctatcgggcttggtgaggatggtccaacgcaccaacctattgaaactctggctcacttgagggctattccaaacatgcatgtatggagacctgctgatggtaacgaaacttctgctgcgtattattctgctatcaaatctggtcgaacaccatctgttgtggctttatcacgacagaatcttcctcaattggagcattcctcttttgaaaaagccttgaagggtggctatgtgatccatgacgtggagaatcctgatattatcctggtgtcaacaggatcagaagtctccatttctatagatgcagccaaaaaattgtacgatactaaaaaaatcaaagcaagagttgtttccctgccagacttttatacttttgacaggcaaagtgaagaatacagattctctgttctaccagacggtgttccgatcatgtcctttgaagtattggctacttcaagctggggtaagtatgctcatcaatcgttcggactcgacgaatttggtcgttcaggcaaggggcctgaaatttacaaattgttcgatttcacagcggacggtgttgcgtcaagggctgaaaagacaatcaattactacaaaggaaagcagttgctttctcctatgggaagagctttctaa

SEQ ID NO: 79257 - DNA, 960 bp, Saccharomyces pastorianus
atggcacagttctccgacattgataaacttgcggtttccactttaagattactttccgttgaccaggtggaaagcgcacaatctggccacccaggtgcaccattaggattggcaccagttgcccatgtaattttcaagcaactgcgctgtaaccctaacaatgaacattgggtcaatagagacaggtttgttctgtcgaacggtcactcatgcgctcttctgtactcaatgctccatctattaggatacgattactctatcgaggacttgagacaatttagacaagtaaactcaaggacaccgggtcatccagaattccactcagcgggagtggaaatcacttccggtccgctaggccagggtatctcaaatgctgttggtatggcaatagcgcaggccaactttgccgccacttataacgaggatggctttcccatttccgattcatatacatttgctattgtaggggatggttgcttacaagagggtgtttcttcggagacctcttccttagcgggacatctgcaattgggtaacttgattacgttttatgacagtaatagcatttccattgacggaaagacctcgtactcgttcgacgaagatgttttgaagcgatacgaggcatatggttgggaagtcatggaagtcgataaaggagacgacgatatggaatccatttctagcgctttggaaaaggcaaaactatcgaaggataagccaaccataatcaaggtaactactacaattggatttgggtccctacaacagggtactgctggtgttcatgggtccgctttgaaggcagatgatgttaaacagttgaagaagaggtgggggtttgacccaaataaatcatttgtagtacctcaagaggtgtacgattactataagaagactgttgtggaacccggtcaaaaacttaatgaggaatgggataggatgtttgaagaatactaa

SEQ ID NO: 79258 - DNA, 906 bp, Saccharomyces pastorianus
atgaccaataaaaacagactgtactttcaaaatttacccagtaggccagcaaataaagaaaattataccagattacttctgaaacacattaatcccaacaacaagtatgccattaatctgtcgctaccccttccccacaataaattacaaatatcatcacaaccgctgatgttactagatgatcaaatgggccttcttgaagtttctgtttcaagatcatcaaagatgactaaccaagcatttttaacgtttgtcactcaagaagaggcagaccggtttctagaaaaatacacgacaacagcattaaaagttcaaggtcgtaaagttagaatggaaaaggctcgaacaaattcgttattgggtctttcaatagaaatgcaaaaaaaaaaaggtaatgacgaaacgtacaaccttgatataaagaaggtgcttaaagcaaggaaacttaaacgcaagttacgtagtgatgatatatgcgccaaaaagttcaggcttaaaaggcaaataagacgcctgaagcataagctgagatcaagaaaggtagaggaggctgagattgataggattgtaaaagaatttgaaacccgtagattggaaaacatgaagtctcagcaagaaaatctaaaacaatcgcagaaacctcttaagcggactaaggtgtccaatacaatggaaaatccaccgaacaaagtccttcttatacaaaatttgccaagcggcactactgagcaactattgtcgcaaatacttggcaatgaggctttagttgaaatcagattagttagcgttcgtaacctagctttcgtggaatacgagaccattgctgatgctacgaaaatcaagaatcagttaggctccacttacaagctacaaaacaatgacgttaccataggatttgctaagtag

SEQ ID NO: 79259 - DNA, 156 bp, Saccharomyces pastorianus
atgaataataaattcagaaactattacgatattggcgataagctctataaacctgcaggaaatccccaatattatcaacggttaataaatgccgttgacggtaagaaaaaggaaagcttatttactgcaatgagaactgtattatttggtaaataa

SEQ ID NO: 79260 - DNA, 186 bp, Saccharomyces pastorianus
atgtcttcttcccaggtcgtcagggattctgccaaaaaattagttaatttactggaaaaatatccaaaggatcgtatacaccacttggtctcattcagggatgtacaaatagcaagatttagacgtgtagcgggtctgccaaatgtagatgacaaaggacaatctataaaagagaaaaacctcatt

SEQ ID NO: 79261 - DNA, 534 bp, Saccharomyces pastorianus
atgttgaagtctatatttgcgaagcgatttgcttccacagggtcatatcctggttctacaagaattactttgccaagaaggcctgcaaaaaaaattcaactggggaagtcacgaccggctatttatcaccaattcaatgtcaaaatggagttgagtgatggaagtgtagttatccggagatcccaatatccaaagggtgaaattagattaattcaagaccagagaaataatccgctgtggaatcctagcagggatgacctagtcgttgtggacgctaattctggtggtagcttggacagatttaacaagaggtatagctctttgttttctgtcgattcaacgaccccaaattcaagctctgaaacagttgaactatctgaagaaaataaaaagaaaacacagattaaaaaggaggagaaggaagacgtttctgaaaaagcgttcggtatggatgactatctatctctgttagacgatagtgaacaacagatcaaatcaggtaagttggccagtaagaagagagacaagaagtga

SEQ ID NO: 79262 - DNA, 906 bp, Saccharomyces pastorianus
atgaagatagcgctagcactcatatcttatcgtttcacaatggggccttggagaaatacatacatcaaatttggtatagaccccagaagttcagtggaatacgcccaatatcaaacagaatattttaagattgaaaggaaattactatcttctcccatagtgaaaaagaatgtaccaaagccaccacccctggtattcgaatcagacactccaggcggtattgacagcaggttcaaatttgatggaaaaaggataccgtggtacctgatgttgcagattgatttattaattggtgagccaaacattgcagaagtttttcacaacgtcgaatatttagataaggcgaatgaactaactggatggttcaaagaattagacttggtcaagatacgaaggatagtaaaatacgaacttggttgcatggttcaaggaaattatgagtataataaatacaagttgaagtatttcaagacaatgttatttgttaaagaatccatggtacccgaaaacaagaactcagaagagggaatgggtgttaaagccaataaagatgctgatggggacataaatatggatgcaggtagtcaaatgtcctcaaatgccatagaggaggataagggtatcgctgctggtgatgattttgatgataatggcgccataactgaagagccagacgacgctgctttggaaaatgaagagatggacactgatcagaacttgaaggtgcctgcaagtatagacgatgacgtggatgacgttgatgcagatgaagaagaacaagaaagttttgatgttaaaacagcgagcttccaagatatcataaataaaatagctaaactagatcctaaaaccgcggaaacaatgaaaagcgagctcaagggatttgttgatgaagtcgatctgtaa

SEQ ID NO: 79263 - DNA, 822 bp, Saccharomyces pastorianus
atgccagtggaggagcctcttgctacactttcatcaattccagattctagcgcggaccaggccccaccgttaatagcagatgaatttacgttagacctgcccagaattccaagtttagaattgccacttaatgtctccacaaaacactctagtatacagaaggctataaaaatgtgtgggggcatcgaaaaagtgaaagaagcctttaaagaacatggacctatcgaatctcagcacggattacaactgtacttaaacgatgatactgatagcgacggatccaagagctattttaatgagcatcctgtaattggtaaaagagttcccttcagagatgagtcggtcatattaaaggttacaatgcctaagggaactttaagtaaaaataataatagcgtcaaagattctatcaaatccttaaaagattcgaataaattgagagtcactcctgtttccatagtagataacactataaaatttagagaaatgtcagattttcaaatcaaactggataatgtcccctctgcaagagagttcaaaagtagctttggctctctggaatggaataatttcaaaagttttgtcaattctgtaccagataatgactctcaacctcaggaaaacatcgggaatttgatcttagaccgtagcgttaaaattccgagtacagatttccaactgccgccacctcctaagttatcaatggttggtttccccctgctttataaatataaagctaatccatttgcgaaaaaaaaaaaaaaagggtttcccaaaattaaggggaacttttttcaaaaactatcagttgtttgttcatga

SEQ ID NO: 79264 - DNA, 102 bp, Saccharomyces pastorianus
atgactgccatcattgtagtgctaaaccggaaaggcgaaacattgcaagactggtttaataaaatgaagacccgtttggaaagagaaaggggcctagtgtaa

SEQ ID NO: 79265 - DNA, 828 bp, Saccharomyces pastorianus
atgggtcaattgctttcccatccgttgacggagaagaccatagaatataatgaatataaaaacaaccaggcgtcaactggtattgttccacgattttacaattgtgtggggtccatgcaaggctatcgtttgactcaggaagatgcacatctaattagaaatgaaaactctgttgtgtacgtacgatttttcaacccattcatagacaaatacgaaaccctgtcattgaacgtcttcgcagtattcgatggtcatggtggagatgattgttcgaaatttctaagcggcggccgccaccatcgcgatggtaacggcagtagcaacggtaatggtgaacccaacgctggcctgatcaaatggattgtgtatagtttcgaaaaccaccattacacatctacaactaataacgactcatcaaaatttaaaagatccttcaatacgttggaaggacttgtttctcaaatttttaaagacgctttcatattgcaagatgaagagttatatcgacattttgccaacagttcgtgtggatctacagcagtagtagcatgcatcataaacgaggaatcactgtatgtggctaactgtggtgattcgcgatgtattctttcctccaaatcgaatggcataaagacgatgtctttcgatcataagccacaacacataggagaattgatacgtataaacgataatggtggtactgtctctcttggaagagtcggtggagtactggctctcagtagggcatttagtgatttccaattcaagagaggtgtcacttatccacatagaaggacaaaactaacaaatattacgggatcctctaga

SEQ ID NO: 79266 - DNA, 1350 bp, Saccharomyces pastorianus
atgcacatactgctaagtttggctgttgaatacccctctcatattttatggtatatcacagcccttgtaaattccaattcttcaaaaagagttcttcgtggtaagcatattttagaaaagtatagacaacattcgcaaaatcctcatgatctagtttctagtgcattggatttaacgaaagcattaactcgtgtctgtttgcaagatgtcaaaagcattacaagtagatcaggcaaatctttagaaaaagacttcaaatttgacatgaacgtggccccatctgcaatggttgttccagtaagaaaaaatttagacatcatttcaccactagagtctaactcaatgaggggctatcaaccatttaggccggttgtttctataattagattcggatcatcttataaagtgttttcttcattaaagaagccaaaacaattgaacataataggttcagatggcaacatttatgggatcatgtgtaagaaggaagatgtccgacaagataaccaatatatgcagtttgccacaacaatggattttcttctgagtaaggacatagcttcaagaaaaagaagcctgggcataaatatttactccgtactatctcttcgagaagactgtgggatattggaaatggtaccgaatgttgtaactttaagatatattctttctacaaagtacgaaagtctgaaaattaagtatagcctgaaaagtctacatgataggtggcagcacaccgcagcagatggaaaactcgagttttacatggaacaggtagataaatttcctccaatcttgtaccaatggtttttagaaaactttcctgatccaatcaattggttcaacgccaggaatacgtacgccagatcttacgccgtcatggcaatggttggccatatattaggtctaggtgataggcattgtgaaaacatattactagatatacagacgggtaaagttcttcatgtagacttcgactgtttatttgagaaaggcaaaaggttacctgtcccagaaattgttcccttcagactaacaccaaatttattggatgcgttgggcataattgggacagaaggaacatttaagaagtctagtgaagtcacgttggctttaatgagaaaaaatgaagtagcgttgatgaatgtgatcgaaacaattatgtacgatagaaacatggaccactcaattcaaaaagcgctaaaggtcttaagaaacaaaatccgcggtatagatccgcaggatggcctggtattgagtgttgctggccaaacagaaacattgatccaagaagcaacatcagaagacaatctaagcaagatgtatattggttggcttccattttggtaa

SEQ ID NO: 79267 - DNA, 636 bp, Saccharomyces pastorianus
atggaatcacacgtcaaatatcttgacgaattgatattggcaataaaagacctgaactcgggggtggattcaaaggtgcagattaaaaaagtgcccacggatccatcttcttctcaggagtacgccaagagtttaaagatcctgaacaccctcataagaaacctaaaagatcaaagaaggaacaatattatgaaaaatgatactatattttcgaaaacagtttccgcccttgccttattgttggagtacaaccccttcttgcttgttatgaaggattccaacgggaactttgagatacaaaggctgatagatgatttcctcaacatatccgttctgaactatgataattaccacagaatatggtttatgaggcgaaaattaggcagctggtgcaaagcatgtgtcgaattttacggaaaacctgctaagtttcagcttactgcacattttgagaacaccatgaatctttacgaacaggccttgactgaagtcttgttgggcaagactgagcttctcaaattttatgacaccttgaagggtctatacattcttttatactggttcacttcggagtatagtacttttgggaactctctcagcattcttagattcttctttggggttcgcgaaatttga

SEQ ID NO: 79268 - DNA, 1005 bp, Saccharomyces pastorianus
atgcatcattttttggataacaagtatgggctcttggataatgaccccactatggccaaaggaattcttcgactatattctctttgcatttctaacgatttctcaaaatgctttgtagaccacttcccaattgaccagtgggcagatttttcacaaagtgaacattttccgttcacgcagttgactaataaagctctctcgattgtatattttgatttgaaaagaaggtccctacctgttgaagctttaaagtacgataataagttcaacatctgggtataccaatcggagccggactcgagcttgaaaaatgtcacttctccctttgatgatcgatataagcagctggaaaagctaaggttgctagtactaaagaagtttaacaagacagaaagaggaactttgctcaaataccgtgtgaaccagctaagtcctggattttttcaaagagctggaaacgatttcaagctaattttaaatgaagcatctgtatccattcaaacttgtttcaagacaaacaatataacaaggctaacatcatggactgtaattctcggacgtctagcctgtctagaatcagagaagttttccggcactctgccaaattccacaaaggatatggataattggtatgtttgtcatttatgcgatattgagaaaactggcaaccctttcgtgcgaataaatccaaatagaccagaggctgcgggtaaatcagaagtcttcaggatacttcattcaaactttctatctcacccaaatatagatgaatttagcgaatctttgttaagtggcatcttattttctctacataggatattttctcactttcaacctccaaaacttacagatggaaacggtcaaatcaataagagctttaaactggtacaaaagtgctttatgaattctaacagatacctacgtttattaagtactagaattatacctttattcaatatatcagactctcatagcatccggaagatgaactctctgccacgctga

SEQ ID NO: 79269 - DNA, 3462 bp, Saccharomyces pastorianus
atgtgtgatggcgatacaagtttaattaaccaaatgaaggttaatttactgaaaaaaaacagtaggcaaatatttgccgtagctttggtaaaacacggattattttctttggatatcttggaaaccctttttttaaatagggctccaacttttgacaaaggatatataactgcataccttcccgattataaaactttagctgaaataacgaagctctacaagaacagcgttactaaagatgcaagtgacagcgagaatgctaatatgattttatgctctttgcgatttttaatcaccaattttgaaaaagacaaaaggcatggttcgaagtacaaaaatatcaataactggacggatgatcaggaacaagcgttccaaaagaaactacaggataatatcttaggtattttccaagttttttcgagtgacatacatgatgttgaaggccgcaccacttactacgaaaagttaagggttatcaatggcatttcttttcttatcatatatgcccccaaaaaatcaataatttccgcattagcccagattagtatttgtttgcaaacaggacttgggattaaggaagttcgatacgaggcctttagatgttggcatctgttagttcgccatctaaatgatgaagaactctctactgttatagatagcttaattgcattcatacttcaaaagtggtctgagttcaacggaaaacttcgaaatatagtgtacagtatactggataccttaatcaaagagaaatcggacctgattttgaaattaaaaccttacactactttggctttagtaggcaagcctgaattaggtattttagctcgtgatggccaatttgcaagaatggtgaataaaataagaagtaccacggaccttatacccatatttgctaataacttgaaaagtagtaacaagtatgtcataaaccaaaatttagacgatatagaggtatatcttaggagaaagcagacagaaagatcgattgattttacaccaaagaaggttgggcaaacttctgatataacattggttttgggtgctttattagacacttctcataagtttagaaatttagacaaggacctatgcgagaagtgcgccaaatgtatcagtatgattggtgttttagacgttacaaagcatgagtttaaaagaacaacatattcagaaaacgaagtttatgatctgaacgatagtgttcaaactattaagttcttgatatgggtcataaatgatatcctcgttcctgcgttttggcaaagtgagaatcccagcaagcaattgtttgttgcccttgtcatacaagaatcattaaaatattgcgggctaagttcagagtcatgggatatgaaccataaagaattatatccaaatgaagccaaactatgggaaaagtttaactcagtctccaagacaaccatctatccgcttttatcttccttatatcttgcgcaatcatggaaagaatatgtcccgcttaaatatccttctaataacttcaaggaaggatacaaaatttgggtgaaaaggtttacattggatttattgaaaacaggtacaacagaaaatcatccattgcacgtgttttcttctttgattagggaagatgatggctcactatcaaattttttgctaccttatatttctctggacattattatcaaggcagaaaaaggaactccatacgctgatattttaaacgggattatcattgaatttgacagcattttcacgtgcaatctggaaggaatgaataacttgcaagtggattcgttaagaatgtgctatgaatccatcttcagagttttcgaatattgcaaaaaatgggcaactgagtttaaacaaaattacagtaaactacacggcacttttatcattaaagatacgaaaacaactaacatgcttttgagaatagatgagtttttgcgaacaaccccttcagatttgctagctcaacgctccttagagacggattcttttgaaaggtctgctctataccttgaacagtgctatcgacagaatcctcacgataagaaccaaaatggacaactactgaaaaatttacaaatcacatacgaagaaataggagacattgactcactcgatggtgtactgagaacctttgctacaggaaacttggtttctaaaattgaagaattgcaatattctgaaaactggaaactcgcacaagactgctttaatgtcctcggcaaattttcagatgaccccaaaactacaaccaggatgctaaagtctatgtatgaccaccaattgtattctcaaataatatcgaactcttcgttccattcttcagacggaaaaatttctttgtctccagatgtgaaggaatggtacagcataggtcttgaagctgcaaatctagaaggcaatgttcaaactttgaaaaattgggtagaacaaatagagagtttaagaaatattgacgatagagaagtacttttgcagtacaatattgcgaaagctttaattgccatctcaaacgaggatccattaaggactcaaaaatacatccacaattcctttaggcttatcggaacaaattttataacgtcatctaaagagacgacgctgctaaagaaacagaatttattgatgaaattacacagtttatatgacctcagttttttatcttctgcgaaagataagtttgaatacaaaagtaacactaccatactcgattatcgaatggaacgtattggggctgacttcgtgccaaatcattacatattgtcaatgagaaagtcatttgaccaattgaaaatgaatgaacaagcagacgctgacttaggaaaaacattcttcactttagcccaattggcgagaaacaacgctaggctagatatagcctccgaatcattaatgcattgtttggaaaggcggttgcctcaggcagagttggagtttgctgaaatactatggaagcaaggtgagaatgatagagccttaaagatagtgcaagaaatacatgaaaagtatcaagaaaattcctcggttaatgctcgcgatcgtgccgccgtgctattaaagtttactgaatggttagacctttcgaacaattcagcgtccgaacaaattattaaacaatatcaggatatttttcagattgattctaaatgggataaaccatattactctattggcttatactatagtagactacttgagcgcaaaaaagcagagggttatattactaatggtcgttttgagtacagggcaatatcttactttttattggcatttgaaaagaacactgctaaagtaagagaaaatttgcccaaagttatcacgttttggctagatattgcggccgcatcaatttctgaagctcctggaaacagaaaggaaatgctgagtaaggctacggaagatatatgtagtcatgttgaagaagcgctgcagcattgtcccacttatattggtactttgttttga

SEQ ID NO: 79270 - DNA, 1488 bp, Saccharomyces pastorianus
atgagtctcattgtacaagttgttgatgaatgttttcattctttaaccaacaatgagtccttacctgagaggaataggaaaaatttggatatcgtctgtgcaacattcgcacgtcaaaagttgaactttatctctggttttagccaagaaaaaggtagagttttaccaaattttgccgcttcctccttctccagtaaattcggaacattagatctcttcactaaaaacattatgctattgatggaatatggttctatttcagagggtgcacaatgggaggcaaaatataagaaatatttgatggatgcgatttttggccatcggtcgttcttctctgcgagagctatgatgattctaggtataatgagtaagtcgcacacgtcccttttcctttgtaaagaacttttagttgaaaccatgaaggtcttcgcagagccagttgtggatgatgaacaaatgttcatcattatagctcatgtctttacttacagcaaaattgtcgaagggttagatccttcttcagaattaatgaaagagctattttggcttgctacaatatgtgttgaatcccctcatcctttactctttgaaggtggtctcctgttcatggtaaattgtttgaagcgactgtacacggtccatcttcaacttggattcgatggcaaatcgctagccaaaaaattaatggaatctagaaattttgctgctacgcttttggctaagttagaatcatacaatggatgcatatggaacgaagataattttcctcatattattttaggtttcattgcaaacggtttatccattcctgtcgtaaaaggagccgcattagattgtctacaggcccttttcaagaatacatattacgaaagaaagtccaacccaaaatcctccgattatctttgttaccttttcttactccatttggtcttaagtcctgaacaactttctaccttgttacttgaagtcggcttcgaagatgaactggtacctttaaataatacactaaaagtgccacttactttgatcaactggctaagttcagactcagataaatctaatatagtcttataccaaggagcacttttgtttagctgtgttatgtcagacgaaccatgtaaattccgttttgctctattgatgaggtatttgctcaaagtcaaccctatttgtgtattcaggttctatacgctgactagaaaggaactcaggaggttatcaaccctagaacaatcatctgaagcggttgctgtctcttttgaattgattgggatgcttgttacacacagtgagtttaattacctagaggaatttaatgatgaaatggtcgaacttttaaagaagagaggcttgtcagttgtgaagcccctggatatttttgatcaggaacatatagaaaagttaaaaggagagggtgaacatcaagtggcaatttatgagagaaaaagattagcaacaatgatactggcaagaatgtcgtgctcctaa

SEQ ID NO: 79271 - DNA, 504 bp, Saccharomyces pastorianus
atgctggatggccttgaaaacgacgtgattcctcaagaacatattcctacggttgtctgttcattgtcatactgggtaccaaacttatatgaacatgtatatttggcaaatgacgaagagggaccagaggcgatttcacgtataatctatagcttaatcaggttgacggtcaaagagccaaatttcacgacagcttaccttcaacagatttggtttttactggcattggatggtcgtctcacgaacgtgatagttgaagaaatagtaagtcatgcgctggatagagattcagaaaacagagactggatgaaagctgtgtcaatactaaccagttttccaacgacagagattgcttgtcaggtaatagagaagctaataaatatgatcaaatcttttctaccttctctagcagttgaggcttccgcacacagttggtctgagcttactattttatcaaaaattagtgtgtcaattttctttgaatcaccctactttccgggatcc

SEQ ID NO: 79272 - DNA, 1047 bp, Saccharomyces pastorianus
atgctcaacgacaaaattcttggtgtattgggacaacctagcatggaaataaaaaatgaaattcctccttttgtagtcgagaatcgggaaaaatatccttcattgtatgaattcatgagtcgctatgccttcaaaaaagtggacatgaaagaagaagaagaggataatgcgccatttgtacatgaagcaatgacattggatggcatacaaatcattgtcgtaacttttaccaattgcgagtacaataattttgtaatggactcactggtctataaagttctgcagatatatgcaagaatgtggtgctctaaacattatgtagttatcgattgtaccaccttttatgggggtaaggctaatttccaaaaattgactactctatttttcagtttgataccagagcaagcatcaagtaattgtatgggatgttattacttcaacgtcaacaaatcatttatggaccaatggacctcatcatatactgtagaaaatccgtacttggtcactacaattccccattgtttcatcaacagcaatactgaccaaagtttgataaagtccttaggattgagtggtaggagtttggaagttttgaaagatgtaagagttactttgcatgatattaccctttatgacaaggaaaaaaagaagttttgtcccgtgtccttgaagataggaaacaaatacttccaagttttacatgagattccgcagttgtacaaggttaccgtatcaaacaggacattcagcatcaaattcaacaatgtttacaagatatcaaatttaatttcagtcgatgtctctaacaccacaggcgtttcctcggaatttacgttaagtcttgataatgaagaaaagttggtattttgcagtccgaagtacctagaaattgtgaaaatgttttattatgcccagttaaagatggaagaagactttggtacggatttaacgaacgatatttcattttcaacatcctcttcagcagttaatgcttctgactgcaatgttaagaagttggtgaaattatatcacatttgtcattggtga

SEQ ID NO: 79273 - DNA, 2463 bp, Saccharomyces pastorianus
atgatgaacattttcagcattttcaaaagaatgaccaactggtttatacgcccagatgctaatacagaattcccgaagacttttacggatattataaaaccactttttgtctctatattggattctaatcaaagactacaagttacagcgcgggcttttattgaaatcccattaagttatatagctacttttgaagacattgataatgatcttgacccaagagtactgaatgaccattatttgttatgtacatatgccgttactttgtttgcttcatcactgtttgatttgaagttagaaaatgcgaagagagagatgctactagacattattgttaaatttcaacgagtccgttcttatttatcaaatctagcagaaaaacacaacctagtccaggcaataattacgacggagaggttgacgctgccattattagttggtgctgtaggaagtggaattttcatttcattatactgcagtcgtggaaatacgccacgcttaataaaaatttcatgttgtgaatttctacgatccttgagattttatcaaaaatacgtaggcgctttggatcaatactccatttacaatattgatttcatagatgctatggcccaggacaatttcactgcctcaggatcagtggcttttcaacggcgtctaagaaataatattttaacttatatcaaaggatccgactcaatccttttggattcaatggacgtgatttacaagaagtggttttacttcagctgttcgaaatcagttacgcaagaggaactagtagattttagaagcttggcaggcattctagcttctatgtcaggtattctgtctgatatgcaagagttggaaaaaagcaagagcgctccagataatgaaggagacagcttatcatttgagtcacgaaatcccgcttatgaggtgcacaaaagtcttaaactcgagttaacgaaaaaaatgaatttctttatttcaaaacaatgtcaatggttgaataatccaaatctattaacaagagaaaattcgagagatatattaagtattgagttgcatcctctatcttttaacttattgtttaacaacctaggactgaaaatagatgaactgatgtcaattgatctttcaaagtcacatgaggattcatcgtttgttttactagagcagataataattataataagaactatactaaagagggatgatgatgaaaagataatgctactcttttcgacggacttgcttgatgcggtcgataagttgatcgaaatagtggagaaaatttccatcaagtcctccaaatattataagggaattatccaaatgtcgaaaatgtttagagcatttgagcactctgaaaagaacctgggcatttcaaatcatttccatttaaagaataaatggttgaagttagttattggttggttcaaactatctattaataaggattatgattttgaaaacctgtcaagaccattaagggaaatggatttgcagaaaagggacgaagattttttgtatatcgacacttctattgaatctgcaaaagcattggcttacctaacacataatgttcctttagaaataccgccttcaagctcaaaagaagattggaacagatcttctacagtatcatttggcaatcactttactattttgttaaaaggtctggagaaaagtgcggacctgaatcagtttccagtttcattaaggcataagatcagtatacttaatgaaaatgtaataatagcgctaacgaacttatctaatgccaatgtcaacgtttctttaaaattcactttaccaatgggttattctccaaataaagatatcagaatcgcctttttaagagttttcatcgacatagtaaccaactatccagttaaccctgagaaacatgaaatggataaaatgctagctatagacgacttcctgaaatatataatcaagaacccaatattagcatttttcggaagtttagcgtgttctcctgctgatgttgatttatatgctggtggattcttaaacgcctttgacactagaaatgcgtctcatatccttgttactgagctccttaaacaagaaatcaaacgggccgcaagatcagacgatattctcagaagaaatagttgtgcaacaagggctttgtcactttacactagatctagaggcaacaaatatttgataaaaactttgagacccgttttgcaagggatagtggataacaaggagtcttttgaaattgataagatgaaaccaggatccgaaaactccgaaaagatgttagacttatttgagaagtacatgacaagattaattgacgcaattacaagttctattgatgatttcccaatagaattagttgatatctgtaaaacaatttacaatgctgctagtgtaaattttccagaatacgcatatattgccgttgggtcttcgtttcttgaggttatcgggcctgcctaa

SEQ ID NO: 79274 - DNA, 2457 bp, Saccharomyces pastorianus
atgttactatgtaaaatttctaagctgaagttcaatacaagaactttaaaggttttacagaacatgtctcaccatctttctggcagcgctactatctcaaaatcgagtattttacccgattcacaggaatttttacaaaagagaaactatccagcatataccgagaaaatagatttaacaatagattatatccagagattcatatctgcttccaatcatgttgaattcacaaagtgtgtcaaaacaaaagttgttgcacctttattgatatcacacacctcaaccgaattgggcgtagtaaaccacttggatttatttggttgtgagtatttgactgataagaatctgctagcatatctggacatactacaacacctgtcaagttacatgaagaggaccatttttcattcgcttttgttatattatgcttccaaagcttttttattttggataatggcaaggccaaaagaatacgtcaaaatttataacaatttaatatcatcagattataatagtccgtcttcttcatctgataatggtggttcgaataattctgataaaacgtctatatcccaactagtctcactgttattcgatgacgtttattccacttttagtgtatcatcattattaacaaatgtcaataatgaccaccactaccatcttcatcattcatcttcttcatcaaagacgaccaacactaatagtccaaactctatatcaaaaacgtcgataaagcagtcgagtgtgaatgcttctggcaatgtttctccgtctcagttttctactgggaatgatgcatcgcctacttcccctatggcatcattgagttcacccttaaacacgaacatcctagggtatccgttatctccaatcacttcaacactaggacaggcgaatacttccacatcgactacggctgcaactaccaaaacagatgcagatacgccctctactatgaatactaacaacaataataacaataacaacagcgctaatcttaataatattccacaacgcatattttccttagatgacatttcatcctttaactcgagtagaaaatcactcaatctagatgatagtaactccttgtttctttgggatacttctcagcattctaatgcatcgatgacaaatacaaatatgcatgcaggagttaataattctcagtctcagaacgatcagtcttctttaaactatatggaaaatattatggagctgtattccaactataccggatcagaactatcctcccatactgccatattaaggtttttggtggttctgaccttattagacagtgaagtatatgatgagatgaactcaaattcgtatagaaaaatttcggaaccgataatgaatattaatccgaaggactctaatacttcaagttggggctcagcatccaaaaacccaagtatcaggcacctcacccatggcttaaaaaaacttactttacagcaaggcaggaaacgtaacgttaaatttttgacatatttgattaaaaatttgaatgggggacagttcgtttcagatgtttccttgattgactctatcaggtccattctattcttaatgacaatgacgtcttctatatcccaaatcgattcaaatattgcttctgttattttttcgaagagattctacaacttgttgggtcaaaatttagaggtcggcaccaattggaattctgccactgcaaatacttttatttctcattgtgttgaaaggaatccccttacacataggcgtttacaattagagttttttgcaagcggtttacagctggattctgatttatttttaagacatttacaactggaaaaagaactcaatcacatagaccttcccaaaatatcgttatacactgaaggatttagggtattttttcacctagtaagcaccaaaaaacctcatgaggatattgcagaaaaaacctcctctgtgttaaagagacttttctgcataattgctgatattttgttgaaagcaacgccttattttgacgataatgtaaccaagattattgcttctatattggatgggcatattttagatcaatttgacgctgcgcgaacactttctaatgatgatcatgtcagttttgatgctgccacaagcgtttacactgagccaaccgaaattattcataactcatcggatgcctcgttagtctcttcactttcccaatcacccttatcaattaactcaggaagcaatatcgccaatacgcgcacctgggatattcaatcaatcttaccaaccttatcgaacagatcaagtgcttctgatttgagcttgtctaacattttgactaatccgttggaggcacaacaaaataataatgcaaacttgttagcccatagattatctggggttcctactactaagagatacgcttcaccgaacgactctgaaagatcacgacaaagtccatattcttctccgccgtaa

SEQ ID NO: 79275 - DNA, 291 bp, Saccharomyces pastorianus
atgaaaaattgtttcgaagactcctcatttcgtttacaagaaaacagcttcaagaggcaattgggccctctgttcgcaaacatcaacttctccttaatcgaccaactgacaatgaacttcaggttctacgagagatctgccaatttccagaaggaaacaataggtgggttaagaatgatgctacaagataaggataactatatcaaaacactgatgcaacatctgaagaaaaaagagagtacaaagttgataaaagacagcaagaatggcgcctccaccttaacatcttaa

SEQ ID NO: 79276 - DNA, 1272 bp, Saccharomyces pastorianus
atgtccagcttaaccgatacagtagagggtagcgaggccaaacgcggcagattttccaacaatgcattaacctccgatactggtatattacagaaaaatagtacactaagaaactggtttttaaaaccgacagcagacttaaaaaatggttgcgaagatagagttgaagatagcgtcaatgatgtctacttaaatgacaaaaactcacaaaaatctgttgaagaaagaaaactaggaagaaaagttagatcttttttcaaacaaacaaactcaaataaggacgagtctgtgttggaagatgaagatgatgcgttagtttggaagaaaactagcaataagtgtgcaaaaaaggaaaattcccatgacatccaaaaaggaagtttcacaaaaaaaatcagaaacagtattttcaagagtgcaaatgacgtgaaagaattcaggaatgaaaataagttactattgcccgttgaactttcttctgatgatgagaatgagtctcatttcactgatgctaactcacatgttatgcaatcaaaaagtcccgagaaaatctcttccaaggatcaatgcttgactaaaggcgctaagaataaaggtctgaaaaagggatatgaaaaaagttttgaagagtgtagcgacgacagtgacgatgaattttctcctgctactccaccggagaatgttcttgaaggtccttacaaatttgtgtttcagacaccaaacacatttacatctcagcctaatataacagtagaaaatgattttcacaaaggtgggagacatgtgattgactatctgaacaaaaaattggctactatgaacattgatattgatttgacttcaggggggaaacaaaacgtatcttgggaggaagagctcgaccaattgagcgaccacgttatagaaagtattactaaccacatttcaaagggtagaatgcacgcacaagagaagcaagataggttggaaaagttaaaattggagaatttgaacttgtcaacattaaagcaagaaaatctcctacataagcaggaaattaactccttgaaaaacaaccttgaatccattagtaaaaaaaacaatgatcttataatggaaatgaacaaattgaaaaaaaaaagtacgactaataaaacaaatgagtacttatctacggatgaaaacgaaaatgaggagattaccaaatccaatatgggtcctggcattttagaactgaacgtcaacgaaacctcgaaaaaattacagcatccacattcaaaccctcgaaatatc

SEQ ID NO: 79277 - DNA, 423 bp, Saccharomyces pastorianus
atgggctcatttggtggtctgattcccaccccacttttggctacatacagtggctcgaaatcattcttacaaagttggtctaactctttggctggggaattatctaaagatgctatcgatgttgaattaatcatttcatatttggtcactagctcgatgtctaaaatcagaagatcatctttaacgatcccaaatccacaacagtttgtgaaatccactttaagaagcgttggcagacgctgcggctctcaagaaagatacgctactatgaccccttactgggcgcacgcagtgtatcaatttgtaattacagagacctttggcgtttactctaagattgttaattccattaattattccttccataaatctatcagaattagagccttgaaaaaagccgcaagacaggttaaaaaggaatag

SEQ ID NO: 79278 - DNA, 522 bp, Saccharomyces pastorianus
atgacttttatgcaacagcttcaagaggctggggaaagatttaggtgtatcaatggtcttttatgggttgtttttgggcttggtgtcttaaaatgtacaacgttatcacttagatttttagctcttatttttgatctttttttactaccagcagtcaatttcgacaagtatggtgctaaaagcggtaaatactgtgttatcactggtgcaagtgacggtattggtaaagaatttgctagacaaatggcgaaacgtggcttcaacttggtattgatctcgagaacgcaatctaaattggaggctttacaaaaagaattagaagatcaacatcatgtcgttgtaaagattctagccattgacattgcggaggataaagaatccaactatgagtccattaaggaattgtgtgcgcagttaccaatcaccgttttggtcaataatgttggccaatcacactccattcctgttccatttttggaaacagaagagaaggagcttagagatattatcactatcagataa

SEQ ID NO: 79279 - DNA, 576 bp, Saccharomyces pastorianus
atgtcatttcgaccaaaatgttttttcttcatttttttcctgcgattgtttgaccatttgtttaatttcactctctgtaaagagctacttaactattcagaaataagcaataagattgacggtcaaagaagaaaagagaactctgcacccaggatggcactcaaaaagaatacccacaacaaatctaccaaacgagtaacgaaacacccatctttgaaaactctaacgcataagcaaatacacacaacaattttcgttaagtctacaacaccatacgttagtgcactgaaaagaataaataagtttctcgatagcgttcataagcacggatcatcctatgttgcggttttgggtatgggtaaagctgtagaaaagacactggcattaggttgtcattttcaagatcagaagaacaagaaaatagaggtttacactaaaactatagaagttcttgatgaagtaataactgaaggccaagctgatatcgacatggaaagtgatgttgaagatgacgataaagaaacccaactaaagaaaagggctgtaagcggtgtagaattgcgtatttatgtttaa

SEQ ID NO: 79280 - DNA, 93 bp, Saccharomyces pastorianus
atgaacataattcttgtttcacttgattgtgagctccaaaagcttgctcttaagctgtcaaagaaaactagtggcactcacactacgcactag

SEQ ID NO: 79281 - DNA, 177 bp, Saccharomyces pastorianus
atgaattatgtacaaggtagtatcagctataacaggactattcttaccggcttatggaaattatttcacagattgtgctgcaaagatcgttataggaaaaccaatctgtcagaaacattgttctatgacgattcaacggaaagatgggttagaatgggagagttaatgcattattga

SEQ ID NO: 79282 - DNA, 1044 bp, Saccharomyces pastorianus
atgtaccaaaataatgtattgaatgctattttggcttctgaaaaatcaaactttcaatacgatagtggaacaatattaagaaaccacaaaagaccaataataacatttaataacaacatagagcacacagtatccgaacctaataattttacaggctatgaggaaaaggaagatttggatataatggatatttgcccttattacccaaaagcaagaatgctggcggatgccattcaacatgccaaaacgagcgcaagtgaaaacaaaatggaactatcaatgaaaactatcccatgtctcaagaaggaaaacgtccatgttgagaaagggcacgattggtctcaactcagtacgagcagaatttgtaaaattttagaagacatagcagataaaaaaaataaaactagaaggcaatctgccccattacaaaagacgaagtattttccaacaaatgagaatcaaaataccgatatagaaaatcagaattggtcccaaatccccaatgaagacatatgtgcacttatagagaagattgctagcagacgcaataaaaatcgcaaacggaaaaatctttcatgttctaaagtccaagaaattcagggaaatattgatttacccaaaaaagacgtacaagagggagatatttcagattcgtctctattggcagcagtaagaggaaccaaaaaagtttccggatatgattacaattcaggagataagatacctaatgcgatacgtcttccttactgtaagcaaatattacgattattttcatttttacaaatgaagagaaatgacttaatagtcacctctgaaaattgtaatagcggagttttcttcagcaattttaattatcaacttcaagttaaatcgaattgtattgcaaatattgcttctacactcagttttctaccccatcatgaaataaccgtatacacatcctttattctctatccaaacgttgtcgataatatttgggaatgcacacgatacgctattcaacttttgaaagtccgaagcagcacagtttacgctactgcgtga

SEQ ID NO: 79283 - DNA, 102 bp, Saccharomyces pastorianus
atgtgtctgtctgaatacttccggacatttcctgtagacgacgatgagtttgttctggcattagctatgtcagcgcggaagctgagcgcagcgcggaagtga

SEQ ID NO: 79284 - DNA, 1611 bp, Saccharomyces pastorianus
atgagctacatagttgatctacaagtgcgaggatcatctctgagggttatcaaatgtatgtttagagaggatgagcaaatttcttctctacattctggttctgactcgaaacaaaacagcaacaaaaagctgggagaatttttgaatctgttaaaagcagtggtcaagaggaagttggaaagtttcccaaaagaccgtttaaagacttcgattataactggccaagaattaatgagagaggggcaaggaagtattgaaattaaggatccaccaacggaggcgcaacaacatttgattagaagcctagcaaaagttttattacaccagctttcaagcataaatgacaaagttaacacagtaaatgaaggacaagataatttgtttctatccttattcgttaaaaaaatttctatagagcaacagtccacatcacacgtccctattaaattgaactttcatgagaaaataaatttgggtcagcacatagattctattttagattcagaggagaccaacgagtcagacacttatcacgtgggatctgctgacgaattcattatatatcccttttgctgtctggaagagcaaggtgagctgaaaaatggcagcatactgtccacagagttcgacaagattgacttagaactagacgaggatgatggttttgagggagaaactttaaacaattgtatcaattcagtgggaaattttgacattccactaagtaagcaaacactaaacttagtaaatatatcatatcttccaggcacaactttcgagggccaatgggaatcgttgtattttggtaacaatattaaagaaaggttatatagctacgcaactatatctctcaagatagcaagattcaaacaaactggagactccaatcaagaagacattacaacgctaatcacaaataataaattactccttgtccatggtcctccgggaacaggtaaaacaacgttatgcaaagcactttgccaaaaattatctgtgaggcgggaattttcagacggttccgataccattgatactaattataaggggataataatagaattgtcttgtgcacgcatcttttctaaatggtttggagaatcgtcaaaaaatatatcaatagtattcaaagacattgaggagcttttaaaggtcaatgagggacgagggatctttatatgccttttgatagatgaggttgaagcaatagcaagttcaagaacaaatttgtcaagtagaaatgagtcaacagatggaatccgagttgtgaacactttacttacgcaacttgacaggctgaaaaaataccataactttttagcattagccacgtctaatttattagattcattagatgatgcttttgttgatcgagcagatggagttttctatattggaaatccaacagctgagggcatcctccacattctaaaggtttgcatagaggagatgataacttcaggtataattctttttcacgcaacatcaactggaatcaagttcttcaataaatatcaggacattttgcggaaaattgctatcaaatgctcggtatgtttttttcttttattctacttttacgattctttttctttctttccttcttcataa

SEQ ID NO: 79285 - DNA, 150 bp, Saccharomyces pastorianus
atggtcagattggactctgaaaagcacattgacttcgctccaacttctccattcggtggtgctagaccaggtagagttgctagaagaaacgctgctagaaaggctgaagcttccggtgaagctgctgaagaagccgaagacgaagaataa

SEQ ID NO: 79286 - DNA, 456 bp, Saccharomyces pastorianus
atgccatcttgcattcactttggtatatatctcttgacctcaatatatctcgataatataaatcgcaatattatacttgttagtctgacagttttacacctgtacatctccaccatcaccacaccttttttactggaggcaaggatgcgtttgaatatcgcctttttcccagccgttagaacatgctcagaaccgaggaaaagcaccgctgccaaacctcctttgatgtgttggcccaccgctactagtggccgtgctggaagcccaggcagcggtgggggccacaatacgagagctggaaaggtaaacggtctctgcgcctctgtgaaattttatcaccaatggagtgtcatgtctggtaaagataatatagaaagtagtgtgcaatttcaggcattaccgattgaactttgggataagagaaccaagacaaaaataactagcaacaatgggtaa

SEQ ID NO: 79287 - DNA, 444 bp, Saccharomyces pastorianus
atgttccaacgtgacttcagaaagcatggtgccgtccatctttctacttacttgaaggtctacaaggttggtgacattgtcgacatcaaagccaatggttctatccaaaagggtatgccacacaagttttaccaaggtaagaccggtgttgtctacaacgttactaagtcttctgttggtgttatcatcaacaagatggtcggtaacagatatctagaaaaaagattaaacttaagagttgaacacatcaagcactccaagtgtagacaagaatttttggaaagagttaaggccaatgctgctaagcgtgctgaagctaaggctcaaggtgttgctgtccaattgaagagacaaccagctcaaccaagagaatcccgtatcgtttctactgaaggtaacgttcctcaaactttggccccagttccatacgaaactttcatctaa

SEQ ID NO: 79288 - DNA, 294 bp, Saccharomyces pastorianus
atgcaatatcttgaagaaaagggaggattctactatgaaaggtggggtgatgcccctgtaagaagtttggcacttgctttatttgcggataagtcaagcatccattggttcagggatataggttatcaccatactccgtacacgaactgtccaacttgtccagcagattcagataggtgtaatggaaattgtgtaccaggcaaattcactccttggagtgatctagacaaccaaaattgccaggcaacctggataagacactctatgtctgaggaagagttagaaatgtattga

SEQ ID NO: 79289 - DNA, 972 bp, Saccharomyces pastorianus
atgaggtttctttcaaaaaggatactgaaaccggtactttcagtgatcattctaatatcgattgccgtaaccgttgttctttactttttaacggcgaatgagaactatttgcaagcagtaaaggatagtgccaagtcccagtatgcttctctccgggagagctacaaaagtattacaggtaaaactgaaagcgctgatgaacttcctgatcatgatgctgaggtgttagatagcataatggacaggctacacgagcccctttatgaaaaggacacttttgacccgaatgaagtccttgctgaaaataaacagttgtacgaggagtttttacttcaagaaatttctgaaccaaaggtggacaatttggtacgtagcggggatccgttagccggcaaggcaaaaggaactattttgagtttggtgagaaattctgatttagaggatataatttcttctattcaacagctagaagaggagtacaataagaattttggatatccctataccttccttaacgatgaggaatttactgacgaattcaaagatggaataaaaagtattcttcctaaggaccgtgtagtagaatttggcaccattgatccagataactggaatatgcctgatagcatagatagggagagatacgaccaagaaatggacaaaatgagtaaagagaacattcagtatgcagaggtggaatcctatcataacatgtgtcgtttctattctaaagaattttaccatcatcctctgctatctaaatataaatatgtgtggagattagagccaaacgtgaatttctattgcaaaattaactatgacgttttccaatttatgggcaagaatgacaagatttatgggtttgttttgaacctctatgatagtccgaaaaccatcgaaacgctatggacttcaactatggattttgtcgaggaacacccaaactatatgaacgtcaacggagccttcgaa

SEQ ID NO: 79290 - DNA, 162 bp, Saccharomyces pastorianus
gcctggataagcggcgtaaatgatgaggcgaaatacagccaaagatgcgtgccgttgcagttagctagcaacctggcgttcggcgatcgccataagagatctgccaattttaaaaagggtattgccaatacacatagtagccttatctgcagcaagccatag

SEQ ID NO: 79291 - DNA, 687 bp, Saccharomyces pastorianus
atgggcctttataaaatgcatgtggaaagaatttcttccattgcagtcattgacaaacaagataatttgctaggtaacatatcggtaacggacgtaaaacatgtcacaagaacctcccaataccccttactacataagacatgtcgccatttcatttctgtcattttaaactccagaggattagaaacgggtaaagattctttccccatttttcacgtataccccagtagttcactagcaaggactcttgccaagttagttgctacaaagtctcacagactatggatcgtacaaccgccggagtcgtcaacctcggcgtcatccacaaatttaacagctgctaatactgcagccaatgcagtttctgccaccgctcaatcgtctgctaatggtgcgactccaatgtcaaagtcatcctcttcaacatccctcaactcccactctccgttgatgacagcaatggaagacccaccatccccacgttcttcggccatcgcgatcccaccaccaagtcccgcctcctcaacaaacacaccaaacctattcgaaaaggaatatagaacgggtaagttgatcggtgtggtctcattgacagacatcatcaacttattagcaaggaaacaaacagggaataaagaagtggatccgcaatccgcaagaagacagagaggcagtatcgccatgtga

SEQ ID NO: 79292 - DNA, 321 bp, Saccharomyces pastorianus
atggggattctcggttcgggtgttcatcgtgtagcgataacaaacgaagaaatgaccaaagttaaaggtattttgtcccaacgtcgtttgataaagtatctttgggacaacgctagatcttttacaagcttagaacctctattaaactcctcattacaagatttgcacatcggtgttctcaatattcaatctaagccaacttcaagacaatcccgtgttatctctattcaaggcgaggagcccttatcatgggcctttataaaatgcatgtggaaagaatttcttccattgcagtcattgacaaacaagataatttgctag

SEQ ID NO: 79293 - DNA, 645 bp, Saccharomyces pastorianus
atggcttctacttcgaacacgttccctccaagccaaagcaattcttccaacaaccttccaacttctagacatgcatccattgtggagatgctgtctactccgccattgctgccccacgttcaagtgaacgatacagacgacaaggaacaaccagaagagtccacgccgccaacagcaacagcggcagcgcctggtccaggtagtgctgctacacccgcccccttgcgcgatgaaaagcctcaattcaaactatcagctgttcctatgacccagacgccatcgcagtgtctgtcatgtgtgcacgcccaaaaatggcaacacataccgttgtcgcaattgatcgaacagaataagcttatttttgttccaggttccatatcggtagaggaggcattcaacactttgatcaagtatcatctaaactctattcccgtggaatctttccccggcgacatgaactgttttactttcgactacaatgaccttaattcgtaccttttgctggttttgaataaaatcaccgtcagcaacaaacaacttactgcagattgccagaatggaaaacccgtaccagtgggcgaaatggtgaaactaactcctaagaatccgttctataagctgccggagaatgagagtttgtcgtga

SEQ ID NO: 79294 - DNA, 351 bp, Saccharomyces pastorianus
atggctattgatgcgataaataaaggcttacatatccatcctacaaaacacttaacgaggacattcaaggatgtagggtttacaggcatcaagtcctcggtcctaagtttgaaaactggtgacttcaaaacagatatgggctttttgaatgaatttaattctttagatatgtgggactacatgttaaggaggcaactaccagatagtagttgtcctccaaaggataccgaccctaccactcttttcaaaagatatgtggaagaacacataggaaaaatcgatgacaacgctggctgctttagaactttgtatgtggtggcgcaaaagccaaaactgccatataccaaataa

SEQ ID NO: 79295 - DNA, 933 bp, Saccharomyces pastorianus
atgggctccaataaggaagcaaaaaacattgatagtaagaatgatagggggttaaccagtataaccagtaacaaaatttccaacttaaaagcacatgataaccatacaagttcaacgattactgaacataaaaatgctgacaaagaaaaggggaaacaagaaaaagagagtagaaatggaaccacgcaatcaagtagttcagtagaatcacactcaccacaagtaagccatcattcagataagctctcgtcctttgattcgcccttacatttgccaaactttagactggcggatgacttgttctcaaactcgtcaagacgatcatctgactccgctgcctcatcctcagtatccaaactgaagtccgctcagctttccaaaataggtctacatcatcatcatacaagtaataataaacatagtcatagaagcggaactccgacttccgaagtgaaagctaattactcaccagacccttctgcaccgcgattcattgtatccaatatggtcggcaatggccggggaggtggtggtctacacggtgcaacttcgaacgttgtcaagaaactccattctagaaaaaaatgggactggaacactttaccggcatcagattcttctcttctaatcaaaaccgtttcaggaaatcataatttaatcaacatttgcatagacggtgaattcaaacaaataatgtacgacccgaatcataatgagctctttaatagaatggacttgtttctatctttcaacatggactcctcgccagaagactctttaatatttgccaagaaaagattacggtcgtacattgatttcctaacaaaatatttggaatctaggaaatatgcatttgaatgttatccatttaacattgaaaacatcataaatatagagactgaggttaaatgctttccttcgttgacccgttag

SEQ ID NO: 79296 - DNA, 393 bp, Saccharomyces pastorianus
atgaatggtatagaatatataaatatagatgtaataaatgtagtaaatgaacaaataatcttcctacaaagtactatgccatgggaagtaaaaaaaattaataaatattggctaaagtgtttcaaattggttctacgatactgggagactactccttatcataatgctttttgtcaagtagtaaaaattgaagtaattcttgaacaatttaaaaaaaaaattggtacggcggcacaattatttggtatatggcagttttggcttttgcgccaccacatacaaagttctaaagcagccagcgttgtcatcgatttttcctatgtgttcttccacatatcttttgaaaagagtggtagggtcggtatcctttggaggacaactactatctggtag

SEQ ID NO: 79297 - DNA, 417 bp, Saccharomyces pastorianus
atgaccatctttcttttccccagtgctaaacacgacagtaacgctagcccaaattctgactctgaagacggtcaccaccacaacaataagaaggaatgcgctatcgaatatctgaaggcacggttaaatagtgcatcagcagtcgcttgcggctacctccaagcttttgtcagtaagacgcaagactttgccaaagtatgctttttagaacttcagaatcccgttgtcttggtcaacttgttgctgcattcttcagtggtatgttatttatgtaacgggtatgcgaaccacaacgccagattcttgaaggggaaacctaactctacagtcttagcaacaaccgccggcgctctgggtcttttgacgctggacggtataatttcaaagaaatactactccagatacgacaagaaataa

SEQ ID NO: 79298 - DNA, 3408 bp, Saccharomyces pastorianus
atgcagaaataccctattatggcctatatgttagctattgcaaattttcactttttcaagttctatactagaatgagaaaaaaacacgaaaacaattcttgcaatgaaaaggacaaaggtgagaacctattcaaaattattctcgccatatttttgcaagaaaaaaaaaaatacgattgtatttcatctggttcaattatgactgcttcagaagagtacttggagaatttaaaaccgttccaggtcggtctccctccacatgatcctgaatcgaataaaaaacgttacctgctgaaggatgctaatggtaaaaagtttgatctggagggcactacaaaaagatttgaacatctgctatccttgagtggtttattcaagcattttattgaaagtaaagccgctaaagatcccaaattcaggcaggtcttagatgtattagaagaaaataaagcaaatggtaaaggcaaaggcaaacaccaagatgttcgtagacgaaagactgaacacgaagaagatgcggaattattgaaagaagaagactcggatgatgatgagagcattgaattccaattcagagaatcacctgcttacgttaatggtcaattgagaccttatcaaatccaaggtgtcaactggttggtgtctctgcacaagaacaaaatagcgggtatccttgctgatgaaatgggtttaggtaagaccctgcaaactatttcatttctgggatatcttaggtacattgaaaaaattccaggtccatttttagtcattgcgcctaagtctaccttaaataattggctgagagaaataaatagatggacgccagacgtaaacgcctttattttgcaaggagataaagaagaaagagctgaactgatccaaaaaaaacttttaggttgtgactttgatgttgtgattgcttcttatgaaattattataagagaaaagtcgccccttaagaagattaactgggagtatattatcattgatgaggctcacagaatcaagaatgaagagtcaatgctttcgcaagtcttaagggaatttacctcacgtaataggctgttgattactggtactcctttgcaaaacaatttgcatgaactatgggcgttattaaattttttgttaccagatatcttttccgatgcacaagatttcgacgattggttttcttctgaaagcacagaggaagatcaggataaaattgtcaagcaactccacactgttttacagccttttctactacgtcgtatcaaaagcgatgtggaaacatccttactgcctaaaaaggaactgaatttatatgtcggtatgtctagcatgcagaagaaatggtacaaaaagattttggaaaaggatctggacgctgtgaacgggtctaatggcagcaaggaatccaaaacaagacttttaaatatcatgatgcaacttagaaaatgttgtaaccatccatatttattcgatggtgctgagccaggtccaccgtacactacggatgagcacttggtttataacgctgccaaacttcaagttttggataagttattgaagaaattgaaggaagaaggttctagagttctgattttcagtcaaatgtcaagattattggatattctcgaggattattgctacttcagaaactatgaatattgcaggatcgacggttccaccgctcacgaagatagaattcaagccattgatgattataatgctcctgattctaagaagtttgttttcttattaacgacacgtgcaggtgggttaggtatcaatttaacgtcagcagatgtcgttgtcttgtatgattcagattggaacccacaagcagatttacaagcaatggatagagcgcatcgtattggtcagaagaagcaggtcaaggtattccgtttggtcacagataactccgtggaagagaaaattttagaaagggctacccagaagttaagattagatcaattagttatccagcaaaacaggacttctttgaaaaagaaggaaaataaagcagattccaaagatgctttattatccatgattcaacatggtgccgccgatgtattcaaaagtggtacatctaccggttcagctggtacgccggaacctggttcaggagaaaaaggagatgatattgatctggacgaacttttactgaaatcagaaaacaaaactaagtcattaaatgcaaaatatgaaactttaggtcttgatgatttgcaaaaattcaaccaagattcggcctatgaatggaatggtcaagatttcaagaagaaaatacaaagggatattataagtccgctactgctcaaccccaccaaacgtgaacgtaaggaaaattactccattgataattattataaagatgttttgaatacaggaaggtcctcgaccccatcacaccccagaatgcctaagcctcatgtcttccattcccatcaattacaacctccccaattgaaagtcctgtacgaaaaggaaagaatgtggacggcgaagaagactggttatgtaccgaccatggatgacgtaaaagcagcatatggcgatatttcagatgaagaagaaaagaaacaaaaattggaattgttaaaattgtcggttagcaactcgcaaccattaactgaagaggaagaaaagatgaaggccgattgggagtctgaaggatttacaaattggaataaattagaatttagaaaattcatcacggtatctggtaaatacggtaggaactccattcaagccattgcgagagaattggcccctggcaaaacactagaggaagttcgcgcatatgctaaggccttctggtctaacattgaaagaattgaagattatgagaaatatctgaaaataattgagaatgaagaagagaagatcaagcgtgtcaaaatgcaacaagaggctttacgtcggaagttgtctgagtataagaatccattcttcgatttgaaattaaaacatcctccttcttctaacaacaaaaggacgtactctgaagaagaagatcgttttatccttctcatgttattcaagtatggcttggatagagatgacgtatacgaattagtgcgtgatgaaattagagattgtcccctattcgaattagacttttacttcagaagcaggacacctgtagagctagccagaagaggaaatacattactgcaatgcttggaaaaggaatttaacgcagggattgtattggatgacgccactaaagatagaatgaagaaagaagatgaaaatggtaaaaggataagagaagaatttgcagatcagaccgctaatgagaaggagaacgttgatggagtagagagcaaaaaagcgaagattgaggatacgtcgaatgttgaaactgaacagttggtagcagagaaaattccggaaaacgaaaccactcattaa

SEQ ID NO: 79299 - DNA, 1170 bp, Saccharomyces pastorianus
  modified_base (93)..(93): a, c, g, t, unknown, or other
atgacggttggaaaattgcaaaagctaagtacggttcagaatttattgcggcagtcaacaagaataatatattcgctactcagttccatcctngaaaaatcaggtaaagctggtttgaacgtcattgagaattttttgaagcaacaaagtcctccgattccaaactatagtgcggaagagaaggaactcttaatgaatgactattcaaattatggtctaacacgcagaattattgcttgtcttgatgtacgtactaatgaccaaggtgatttggtggttactaaaggtgatcaatacgatgtacgtgaaaaaagtgatggtaaaggtgttagaaaccttggtaagcctgttcagttggcacagaaatattaccaacagggtgcggatgaagtaacatttttgaatataacttcttttagagattgtcctttgaaggatactccgatgctagaggttctgaaacaagccgcaaagacagtctttgttccattgacagtcggtggggggatcaaggatattgtcgatgttgatggaaccaaaatacctgctttagaagttgcaagtctatacttcagatctggtgctgataaagtatcgatcggtacggatgcagtctatgcagccgaaaaatactacgagttgggtaacagaggagatggaacgtcaccaatagagacaatctcgaaagcatacggtgctcaggcagttgttatttctgtcgaccctaagagagtatatgtaaattcacaagcagatacgaagaacaaagtcttcgagacagaatatccgggccccaatggagagaaatactgctggtaccaatgtacaatcaaaggtggaagagaatctagagaccttggtgtgtgggaattaacaagggcatgtgaagctctaggtgctggggagattttattgaactgcatagacaaggatggctctaattctggttatgatctggaattgatagaacatgttaaagatgcggtcaagattcccgtcattgcatccagtggcgccggtgtacccgaacatttcgaagaggccttcctaaagacccgcgcagatgcttgcttgggtgcaggtatgttccacagaggtgaattcactgttaacgatgtaaaggagtatttactagagcacagattaaaggttagaatggatgaagagtaa

SEQ ID NO: 79300 - DNA, 165 bp, Saccharomyces pastorianus
atgccggtcgttcacgtgattgacgttgaaagtggtaacctacagtcactaaccaatgcaattgagcatttaggttacgaagtacaactggtgaaatcaccaaaggattttaacatatcaggcacgtcgagattgattttgcctggtgtcggaaattatggccat

SEQ ID NO: 79301 - DNA, 150 bp, Saccharomyces pastorianus
  modified_base (136)..(136): a, c, g, t, unknown, or other
ttttgctgcattctgaattcagaaaagaaaaaaaacctagaaaatgacggttggaaaattgcaaaagctaagtacggttcagaatttattgcggcagtcaacaagaataatatattcgctactcagttccatcctngaaaaatcaggtaa

SEQ ID NO: 79302 - DNA, 159 bp, Saccharomyces pastorianus
atgggtgctgtcttcagagctgataagcaattgctcaagttccagacaaattattatcgtgaggaacagaaaagaagagaaaagattatggatgaagctgctgagagaggcctttttctggaggatgagagtttgaactcttcccggtcaactacatga

SEQ ID NO: 79303 - DNA, 1461 bp, Saccharomyces pastorianus
atgactgacccaacaaaaacaaagctgaccttgagaggttccaaaactacgaaagaacaagaagaagaattgttaagaaaaatcgataacgccgatctggaatataagcaaaaagtagatcattctaattctttgagaaacacatttataacgaaggagagacctagaattgttcaagaattaaaagatttgattttagaaatagacacagcgatgactatccaattgcagaagtacacgatatggacggaaaatttggttctgaatacaggtgttacaataagcccattggactccaccaaatctatgaaatcatttgctggatctgtttccaatgaacgtgatctttacagttttttgaacaagtataaccaaacaggaaaacattccctactgatcaacaaaaacttgatccctgtatcatacaaaaagcatccatcaatgaatcatggtcagaaaaataagagccctccaaagtttgccgtggacccttcaagaaactccatcccgaagagaatgatatccactcataatgaatctccatttttgagcagtaatagtaacactgccgctgttccgaatgctaatcttaacagtgctacaccgtccttaaataccaacaaacaattaccacctactatggcttcatctatttcttccactagcaatgcggctggcgctatgtcaccgtcttcttccattgtaacaagcgacaccacatcatccataacaaagaccctggatcctggcaacaatagtccacaaattccagaagaattgattaactctttagactcggatcgcccgatttctcacattcagactaacaacaatatgccacccggtgttcaaaaaaatttcaaaacattcggtgtaccgctagaatcacttatagaattcgaacaagacatggtccctgcgatagtgcgccaatgcatatacgttatcgataaatttgggcttgatcaagaaggaatttatagaaaatcggcaaatgtacttgatgtcagcaagttgaaggaggaaattgataaggatcctgcaaacatttccatgattctaccatcaaagccacattctgattcggatatttatttagtaggatcactgctgaaaactttttttgcgtcgctgcctgatagtgttttaccaaaggccctatcatcggaaatcaaggtttgtttacaaattgaagacccaacaacaagaaaaaattttatgcacggactaatatataacctccccgacgcacaatactggacgttaagggctcttgtctttcatttgaaaagagtgttggcacatgaagcccaaaacagaatgaatttaagggctctttgtataatttggggtccaactattgcgcctgcaaatccagatgacgctaatgatgtaaattttcaaattatggcaatggaagtattattagaggtttcagatcaagcttttgagcctgaataa

SEQ ID NO: 79304 - DNA, 540 bp, Saccharomyces pastorianus
  modified_base (365)..(365): a, c, g, t, unknown, or other
atggaagagactgcgaagaaaccagctagtgccacagtaagtgcgaagtcgtcgcacgatggtggcaccgacgatttggcgcacctttttagcacgccagagatcaagaaggtgctaaattccgatgtggcgattaacgctttgttgagccgtttaaagcagtcgttgttgacttgtgaagagtttatgaaatttattagaaagaaatacgccttcgaagaagagcacgtccaggagctctccaagcaatataagcactttttcaacattcagggttccacaaattcatccttaaaaaagatgattcacgaagttttgggattcgatggcaagatggctcaagtaaagcagagttatatcaccgncttgcagaaaatgtactccgagattagtagtcttttattaacaatgacaaaaattaagaaagtctgtcaaggtagaacagtaaaaggctggaaaaggatgtttctgatgccatacacagcgcagaacaggcgcaatctcgttacaattcgttgtgccaagattgggacaaattga

SEQ ID NO: 79305 - DNA, 1473 bp, Saccharomyces pastorianus
atgtttcccagagcttctgcattggccaaatgtatggcaactgttcatcgtcgtgggctactcaccagtggtgcacaatcgctagtctccaaaccagtttcggagggagatccagagatgtttgacatcttgcaacaagaacgtcacagacaaaaacactctatcacccttatcccatcagaaaacttcacctcgaaggccgttatggatttgctaggttctgagctccaaaacaagtattctgaaggttatccaggtgaaagatactacggaggtaacgaaatcatcgataagtccgaatccttgtgtcaagcaagagctctggaactgtacggattagaccctgccaagtggggagttaatgttcaaccattaagcggggcacctgccaatttgtatgtttactccgctatcatgaacgttggtgaaagattaatgggattggatttgccagatggtggtcacttgtctcacgggtaccaacttaagtcaggaacgccaatttctttcatttccaaatacttccaaagtatgccataccatgtcgaccacactacggggctaatcgattacgataacttgcaagtattggccaaggcattcagaccaaaggtgatcgtggccggtacttctgcgtactcgagattaatagactacgctagattcaaggaaatttcccaagaatgcggcgcatatttgatgagtgatatggcacacatatccggtttggtggcagccaatgttgtcccatctccatttgaacattccgatatagttaccacaaccactcacaagtccttgagaggcccaagaggtgctatgattttcttcagaaagggtatcaagtctgtcaccaaaaagggcaaggaaatcccatatgagttagaaaagaaaatcaacttctcagttttcccaggacatcaaggtggtcctcacaaccatactatcggtgcaatggcagtggcattaaagcaagcgatgtctccagaattcaaagaataccaacaaaaaattgtcgacaacagcaaatggtttgctcaggaactaaccaagatgggttataagttggtttccggcggtaccgataaccacttgattgttattgacttatccggtactcaggtagacggtgcccgtgtggagacaattttaagtgccttgaacattgctgctaacaagaacaccatcccaggtgataagagtgctcttttcccctttggtctaagaatcggtactccagcaatgaccacgagaggatttggccgtgaagagttttctcaagtcgcaaagtacattgattctgccgttaagctcgctgaaaatttgaaaactttggaaccaacaacgaaactagatgcaagatcaagactcaatgagttcaagaagttgtgtaatgaatctagtgaagtcgctgctttgtctggcgagatttccaagtgggtcggtcaataccctgtcccaggtgatatctaa

SEQ ID NO: 79306 - DNA, 144 bp, Saccharomyces pastorianus
atgattctctccgttatctgctggttcttagtccactgtctgttctgtcccccttctgtccaagagatagaatataaaaaagactcattatttttttttaggtacttcgcttattggtggtcaataagaaaaaaaaaatactaa

SEQ ID NO: 79307 - DNA, 933 bp, Saccharomyces pastorianus
atgaatacacttcatgcaggttcatctactgatggcataaatgtcggaaacgcaggacgaactagagacacacaaactggcgtagaaggggaaacggaaatagggtctgacgaggaagatagcatagaggacgagggaagcagcagtggaggaaatagtacgacagaaagactagtaccacaccagctgagggaacaagcagccagacatataggaaaaataggaagacattttaatattcttgatagactttttaagaaacgtacacaacagtcttcggatatacaacaaggtgccatgtttgatggtgtctttagcaatttaagcgcaaaaccagataccacagagactgaaggtaataacgaacaagacataccacctacatacgacgaagctgctgctgatatggccccctcgtattatggaatggatttgaacaattcagatatctactacgacgaaatatgcattgaggggcttcctgtaggaaatatagcaaatttattatggaatatcatcgtaagcacgagttttcagttcattggatttttaataacctacattttacacacatctcacgcagcaaagcaaggttcaaggtttggattagggttaacgttcattggatatggttattcaatgattcccaatgatgttacttcaaaagtcggcaaaaataaaagcttaaatagaatggaattagaggatccaaatgaattcgatgatgttcgtctaaattcacaatcaacgacacaagataaatttgaatcacatttgaatcacggtctggatgaagaaaaacaaaacataccatggttggctgtttttgtggcatttcttgggctatttatcaccctgaagagtatatacgactacattcaagtcaaaaaattggaaaagaaatacctcaaccaaagtcaaaatcaagcataa

SEQ ID NO: 79308 - DNA, 1110 bp, Saccharomyces pastorianus
atgctttcctacgatgatcttcacaagcttttggaggaaaattatgaggactgcagcacttattggtttctggtatccctttcggcagctactcttagcgacttgcaaattgaaatagagtatgaggaaggagtcacttttactggagagcagttatgcactctttgcatgttatctcggcaatcctttgacgaccttagtaacagcgacatatttcgaatcatgacatactattgtttgcaccgttgttacgcgcagtttgcggatacgagaacttcatatagactttcttgtgaagccgtgggcctcatcaagatagctggattccatcgggaagaaacctatgaattccttcccttcggtgaacaacaactcagaaggaaagtttactatttacttcttatgacagagagattttactctgtatatattaagtgtgtcacgagcctagatacaacaatagcgccaccactaccagaggttgtaacagaccctcgtctttctctggaaagcttccttgaggtgattagagttttcactgtacctggaaagtgtttttatgatgctttggctactaactgtgtcgatgattcctgcaccgaagactctctaaaaaggatatggaacgaacttcataccacatcacttgatatagagccatggtcttatggctatgtggacatttcattttctcgacattggattagggcgctggcttggaagctagtgtttcagatgaatggtaccaagtttttctcaaacgccaataatgctcacatattggtcgaaattgctagagacatgttgggagacacgtttttaactccgaaaaacctgtatgatgtacatggtcctggaataccaatgaaatcattggaagtagccaatgcattggtagatatcgtaaataagtatgatcacaatatgaagttggaggcttggaatattttgtgcgatgtatctaagttcgttttctccctgaaacattgcaatcataaaatgtttcaaaggttttcaactaaatgtcagagtgctctaatcgatttgcctatctctagaccactgcgcctaaatgatgattccaaagatgaagacgacataattccttaa

SEQ ID NO: 79309 - DNA, 153 bp, Saccharomyces pastorianus
atggggaaaacgagaaaattaatagcaccaaagaggaaaactgaagggagccaccgctaccaccatgaccatcataataaaaaaatgaaaatgaaaacgaaaacaaaatcgaataaactttttgaaagtggacaagatagctttgataattag

SEQ ID NO: 79310 - DNA, 1182 bp, Saccharomyces pastorianus
atgatccaagataaggattctgccgctgatgcggacgatttagaaagcgagttgaatgccatgtatagtgattataaaactagaaggtcggaaagggatgccaagtttagagctaagcaagcacgtggtggcgataatgaggaagaatggaccggttttaatgagggaagtctagaaaagaaagaagaggaaggtaaagattatatcgaagacaatgacgatgaaggtgtcgaaggagactccgatgatgatgaagccatcaccaatttgattagcaaattgaagggacaagaaggtgatcacaaattgagtagtaaggcacgtatgattttcaatgatccgatatttaataacgttgaacctgatttgccagtaaataccgtcaatgatggcataatgagttccgagtctgttggtgatatttctaaattaaataagaaaagaaaacatgaagaaatgcaccagaaacaagatgaagcagattcttcggatgagagttcaagtgatgactccgatttcgaaattgtggccaacgataatgcatcagaagaattcgattctgattatgattcagaggaagaaaaaaatcaaacaaagaaagaaaagcattccagagacattgatattgctactgttgaagccatgactttggcacatcagttagcattgggtcagaaaaacaagcatgatcttgttgatgaaggtttcaatagatacaccttccgtgacaccgaaaatttgccagattggtttttagaagatgaaaaggaacattccaagataaataagccgattactaaggaggcagcgatggcaattaaagaaaaaataaaggcaatgaacgcccgtcctattaagaaggttgctgaagctaaggcaagaaagaggatgcgtgccgtagctcggttagaaaagatcaagaagaaggcgggcttgattaacgatgattcagacaagacagagaaggacaaggctgaagaaatttctagattgatgcgtaaggttaccaaaaaaccaaagaccaagccaaaggttactttggttgttgcctcaggtaggaacaaaggtttggcaggtagaccaaagggcgttaagggtaagtataagatggttgatggtgtcatgaagaatgaacaaagagccctaagacgtatcgcaaagaagcatcacaagaaaaagtag

SEQ ID NO: 79311 - DNA, 591 bp, Saccharomyces pastorianus
atgatggtgctcctaatgttggtttgggttgggttcaggatgctttcacccaaatctcaattaaccttacaagctttgaagttggccgtcgaaaatttggtggtgaacggtacttttgttactaaaattttcagatccaaggattataataaattgatttgggttttccaacaattgtttgagaaagttgaagccacaaaaccacccgcatcaagaaatgtttctgcagaaatttttgtagtgtgtaaaggtttcaaggcaccaaagaggctggacccaagattactggatccaaaagaagtttttgaagaattgccagatgggcaacaaaatatggagtccaagatttataatcccgaaaaaaaagttagaaaaagacaaggttatgaggaaggtgataatttactgtatcatgaaacctcaattttggattttgtcaggacggaagacccaataagcatgcttggagaaatgaataagtttacaattgatgagaatgaccatgaatggaagatcttgaagaaattgaaacaaaccacagacgagttccgttcctgtattgaagatttaaaagtcttgggtaaaaaggat

SEQ ID NO: 79312 - DNA, 477 bp, Saccharomyces pastorianus
atgggtaagacacaaaagaagaatagtaagggacgtttagatagatactattatctagcaaaggagaaaggttatcgtgctcgttcatcctttaagattattcagattaatgaaaagtatggccacttcttagaaaaatcgaaggttgttattgatctgtgtgctgctcctggttcatggtgtcaagttgcatccaaactctgtcctgtcaactccttaattattggtgttgatattgttccaatgaagccgatgcccaatgttataacttttcaaagtgatattacaacagaagattgtagatcaaaattgaggggttatatgaagacttggaaagctgatacagtgttgcatgatggtgctcctaatgttggtttgggttgggttcaggatgctttcacccaaatctcaattaaccttacaagctttgaagttggccgtcgaaaatttggtggtgaacggtacttttgttactaa

SEQ ID NO: 79313 - DNA, 1065 bp, Saccharomyces pastorianus
atgaacgccgacttcaacgccaccttgtactccatggccaacaaacatttcaatgactacgattttgtctccgctgaaaacgcagacgatgatttcaagctttctatttacttgccctccgccatggacgagcctgtagtatacaatggtaagaaagccgatatcgctgacgctgatgtttttgaaaaatggttgcaagtggaagccttgccctactttggtgaaatcgacggttccgttttcgcccaatacgtcgaaagcggtttgcctttgggttacttgttctacaatgacgaggaagaattggaagaatacaaacctctctttaccgagttggccaaaaagaacagaggtctaatgaactttgttagcatcgatgccagaaaattcggcagacacgccggcaacttgaacatgaaggaacaattccctctatttgccatccacgacatgactgaagacttgaagtacggtttgcctcaactctctgaagaggcgtttgacgaattgagcgacaagatcgtgttggagtctaaggctattgaatctttggttaaggacttcttgaaaggtgatgcctccccaatcgtgaagtcccaagagatcttcgagaaccaagattcctctgtcttccaattggtcggtaagaaccatgacgaaatcgtcaacgacccaaagaaggacgttcttgttttgtactatgccccatggtgtggtcactgtaagagattggccccaacttaccaagaactagctgatacctacgccaacgccacatccgacgttttgattgctaaactagaccacactgaaaacgatgtcagaggcgtcgtaattgaaggttacccaacaatcgtcttatacccaggtggtaagaagtccgaatctgttgtgtaccaaggttcaagatccttggactctttattcgacttcatcaaggaaaacggtcacttcgacgtcgacggtaaggccttgtacgaagaagcccaggaaaaagctgctgaggaagccgatgctgacgctgaattggctgacgaagaagatgccattcacgatgaattgtaa

SEQ ID NO: 79314 - DNA, 225 bp, Saccharomyces pastorianus
atgaaaacgcgcccatataaatatccgctatcaacagaacccccaaccccctcatcagtgcccaactcagcttccgtaaaccacaacaccaccactaatacaactctatcatacacaagatgtcattcgacgacttacacaaagccactgagagagcggtcatccaggccgtggaccatatctgcgacgatttcgaggttacccccgagaagctggacgaattaa

SEQ ID NO: 79315 - DNA, 156 bp, Saccharomyces pastorianus
atggaaaaaaaaaaaattttagacgcggcgcttgcaccccgcattataagtggtgtgccgacggacggtcaacccctttcagggggccccccaatcttgggcgtggtgtcacaccacgctcaaacggtgggcactaatgaaaacgcgcccatataa

SEQ ID NO: 79316 - DNA, 885 bp, Saccharomyces pastorianus
atgcctatgatcaaggttgttgcattaaccaacgataccgtcggaacgtacctatcgcattgctacacgtccgataacacggactcaatgacgtccggagaaatctcggagccggtcatcggatgtattttcggtaccggtaccaatgggtgctatatggaggagatcaacaagatcacgaagttgccacaggaattgcgtgacaagttgataaaggagggtaagacacacatgatcatcaatgtcgaatgggggtccttcgataatgagctcaagcacttgcctactactaagtatgacgtcgtaattgaccagaaactgtcaacgaacccgggatttcacttgtttgaaaaacgtgtctcagggatgttcttgggtgaggtgttgcgtaacattttagtggacttgcactcgcaaggcttgcttttgcaacagtacaggtccaaggaacaacttcctcgccacttgactacacctttccagttgtcatccgaagtgctgtcgcatattgaaattgacgactcgacaggtctacgtgaaacagagttgtcattattacagagtctcagactgcccaccactccaacagagcgtgttcaaattcaaaaattggtgcgcgcgatttctaggagatctgcgtatttagccgccgtgccgcttgccgcgatattgatcaagacaaatgctttgaacaagagatatcatggtgaagtcgagatcggttgtgatggttccgttgtggaatactaccccggtttcagatctatgctgagacacgccttagccttgtcacccttgggtgccgagggtgagaggaaggtgcacttgaagattgccaaggatggttccggagtgggtgccgccttgtgtgcgcttgtagcatga

SEQ ID NO: 79317 - DNA, 606 bp, Saccharomyces pastorianus
atgtcattcgacgacttacacaaagccactgagagagcggtcatccaggccgtggaccatatctgcgacgatttcgaggttacccccgagaagctggacgaattaactgcttacttcatcgaacaaatggaaaaaggtctagctccaccaaaggaaggccacacattggcctcggaaaaaggtcttcctatgattccggcgttcgtcaccgggtcacccaacgggacggagcgcggtgttttactagccgccgacctgggtggtaccaatttccgtatatgctctgttaacttgcatggagatcatactttctccatggagcaaatgaagtccaagattcccgatgatttgctagacgatgagaacgtcacatctgacgacctgtttgggtttctagcacgtcgtacactggcctttatgaagaagtatcacccggacgagttggccaagggtaaagacgccaagcccatgaaactggggttcactttctcataccctgtagaccagacctctctaaactccgggacattgatccgttggaccaagggtttcgcatcgcggacaccatcggaaaggatgtcgtgcaattgtaccaggagcaattaa

SEQ ID NO: 79318 - DNA, 330 bp, Saccharomyces pastorianus
atgttcttattggccatttggtatggattatcactaggtggcctgtccgcggtttcaagatcagttttcagtttgattgtacctccaggaaaagaatccacgttttttagtatgttcagtatcacagataaggggtcgtccatcctgggacccttccttgttggactgcttaccgataaaacgcataatattcgctattcgttttatttcttctttttgcttttgatgctatcattgcctgtgctaaactgtttggatgtcaagagaggtagaagagaggctgaagaactcagtcaagttttacctgaaagtgaaagaaggttggattag

SEQ ID NO: 79319 - DNA, 384 bp, Saccharomyces pastorianus
atgtccttcggaggtgacactaacctgattttagccgcattgagagaaattgtcgctaacgaagccgctaccgtcaatgttgcagaaggtactttggccgccaaggaaggtgataacgttaccggtgaagccaaagaaccatctccattggataagtacttcgttcgttccaagagctggtcaaactggttaccagaaacttttgaaactgaaattaatattgaaaaagaactggtcggcgatgcattggaccaattcatgatatccctaccacctgttcctcaacaagaagaggaatcatccactgaactcgcttctcaagaacaagaaaccaaagaagactctgcgccggttgctgccggtgaatccgagtcttccttataa

SEQ ID NO: 79320 - DNA, 1044 bp, Saccharomyces pastorianus
atgaagatcttttgggatcctagatcggtaatagaacatcaggattactctggacctgctaacgtgtttcatcttcttttcacttctctgcccacgatgtctgctgaaaccgccgccgcaaacactgctactgccccagtcccagaagtgcaagaacaagagagctccaagagcaagcaagtcaacttgacgccggcaccattgcccacatcttccccatggaaacttgctcctactgagatccctgtttctactatctcaatagaagacttggatgccacaagaaagaagaagaacagaacacccactccgaaatcatcgactgctaccaagtgggttcccatcaaggcctccattaccgtctctggcaccaaaagatccggttccaagaatggtgcaagtaatggcaacagcaacaagagcaaaaacaacaaaactgcagcatcgtcgacatcgtcgagtaatgctaacaggaaaaagaagcatcaccaacataatgctaagaagcaacaacaaatgaagaaagatggctttgaatcggcagtaggtgaggaagattcaaaagacgctacctctcaagaaaatggtcaatctacacaacagcaacaaccacctcaccaccgtaatcatcaccacagtcatcaccataacagcaatggtcctcaaaggagaaagttccacaacagtaataacgccggtatgcctcagaaccaaggcttcccaccacagtttaaaccttaccaaggacgcaacgctcgtaataacaacaacaaccgctctaaataccacaaccacttccatcacaaccaacaacatcctcaacaacctatggtcaaattacagcaacagttttatccagtccaaccagtgttaatggccatcaacaacattgctagacaaattgaatactatttcagcgaagaaaacttgaccgtcgacaattacttaaggtccaaactctccaaggatggttttgctccattgtctttaatctctaagtttacagagttgttaacatgtccttcggaggtgacactaacctga

SEQ ID NO: 79321 - DNA, 150 bp, Saccharomyces pastorianus
atgcctgcgagggtggagatatgttgtgcaaggtgtggtggacacttgggacatgtgtttgaaggtgaaggctggaaacagttgctaaacttgcccaaggacaccagacactgtgtgaacagtgcgtctttaaacctcaagaaggattaa

SEQ ID NO: 79322 - DNA, 357 bp, Saccharomyces pastorianus
atgaataagtggagcaggctgtacgctataactgtacgcaggacttttccagggagaagaaacattgtactgacgcagtactggaataagagcaagaaaatgagtgacgaatcgaatgacgtgaagtggaacgatgccctgacaccattgcagctgatggtgctgagagataaggccactgaaaggcccaacaccggtgcgtatttacacaccaacgagtccggtgtctaccattgtgccaactgcgacagaccgttgtattcgagcaaggccaagttcgacgctcgtagtggatggcccgcattctacgaagaggtatcccctggagccatcacatatcatcgtgacaattcttaa

SEQ ID NO: 79323 - DNA, 1092 bp, Saccharomyces pastorianus
atgtcaactattgaatcattaattcaaaaaatcgcaggatacgtcatggacaaccgtagtggtggtagtgacgcctcgcaagatcgtgctgctggtggtggttcatcttttatgaacactttaatggcagactctaagggttcttcccaaacgcaactaggtaaactagctttgttagccacagtgatgacacactcatcaaataaaggttcttctaacagagggtttgacgtagggactgtcatgtcaatgctaagtggttctggcggcgggagccaaagtatgggtgcttccggcctggctgccttggcttctcaattctttaagtcaggtaacaattcccaaggtcagggacaaggtcaaggtcaaggtcaaggtcaaggtcaaggttcttttactgctttggcgtctttggcttcatctttcatgaattccaacaacaataatcagcaaggtcaaaatcaaagctccggtggttcctcctttggagcactggcttctatggcaagctcttttatgcattccaataataatcagaactccaacaatagtcaacagggctataaccaatcctatcaaaacggtaaccaaaatagtcaaggttacaataatcaacagtaccaaggtggcaacggtggttaccaacaacaacagggacaatctggtggtgctttttcctcattggcctccatggctcaatcttacttaggtggtggacaaactcaatccaaccaacagcaatacaatcaacaaggccaaaacaaccagcagcaataccagcaacaggccaaaactatcagcaccaacaacagggtcagcagcagcaacaatgccactccagttcattctcagctttggcttccatggcaagttcctacctgggcaataactccaattcaaattcgagttatgggggccagacaacaggctaatgagtatggtagaccgcaacagaatggtcaacagcaatccaatgagtacggaagaccgcaatacggcggaaaccagaactccaatggacagcacgaatccttcaatttttctggcaacttttctcaacagaacaataacggcaaccagaaccgctactga

SEQ ID NO: 79324 - DNA, 237 bp, Saccharomyces pastorianus
tttaaacgacggcagtgcaagcttgcatgcctgcaggtcgagcctagattgacagacgaaataagaatctcgctgggtgaaaaagttaaaattctggccactcataccgatggatggtgtctggtagaaaagtgtaatacacaaaagggttctattcacgtcagtgttgacgataaaagatacctcaatgaagatagaggcattgtgcctggtgactgtctccaagaatacgactga

SEQ ID NO: 79325 - DNA, 198 bp, Saccharomyces pastorianus
atgatcataacaggaaaattggtgaatgacagtattttatttttacgatctacgctttttgaaattatggttttaccaaatggagacggtagaagtttaattaaattcaataagaaaacaggatctactaaaacgctgaccaagcttgctacagaaatccaaattattttacaaaaagaaggtgttttggacaaataa

SEQ ID NO: 79326 - DNA, 1848 bp, Saccharomyces pastorianus
atgcctgcaggtcaatatcaaaccattaaggattccaaaagtatcaaagatttacctcgtgaaaatacctatctatatccactggctgactcgaacaaccatactagcgcctctatcgatgattcaatcctacaaaacttggtggtactttggcatggtagacacgccgatgacatcgtatctaaactgaaagagaatggaaccaacaaagaaaaaattctatatgcgctactataccgtttcaaactggactctgtaaggggatcgaataagaagaaccgcaataagataaagaaaaccaaaaaaaataaaagatctagcacactttcgtcatcgtcatcattattattgaacaaccgaagcatacaatctacgccacgcagacgtacatccaagaggcattccagggaattctcttctagcaggaagagatcgttctttttactgtcctcgaatcctaccgatagttctccaatacctttgagaagtagtaaaagaattacacatattaacgtagcgtctgcaaatacccaagcaacgccaagtggtgtcccgaatcctcacaagaggaactcaaaaaaacggtcaagcaaaagattatcttatatgcctaatacaaaaagaagctcactaacatcaaaatcattatcaaactttactaacctaatagatgatgatgattgggagtacattgaaaaggatgcaaagagaacaagttccaacttcgctacactgattgatgaaatatttgagcctgagaaatttgaattggcgaaaagagaaaaggctgaacttcaaagaaaagttcaggaagcaaaaaggcaatcagtgaatgcgcagaagattaatgaggacgagtttggatccgaagtttctgatggaatgaaagagctgaaaaaaataaacgacaaagtatcgtccccgttgataaattacgaattttcgcaacaagaactattgcaagatatagacaccttactaacgaatcgttatcaactttcgtcatatactaggcctatttcgagactggatcccggattaacgcctgttaccgagacacttcctaacaacctaaaagaaaaaacagctctgctgcaggatactgaaaagaaaataatagaaacgatacgcagatccaaatttttaggatcgctactaaatgttagagggggactatcgccagggaaaagtgaactggcacctatcgaagagtctcccatagtttcaaccacaccactaatatataatgatcgaatggaaccccgtaggatatccgatgtggaagtcccacatttcacgaggaaatcaaaacactttactactgctaataatcggcgctcagtcttatctttgtatgcgaaggattcaatcaaagacttaaacgaatttttaataaaggaagatcctgatttgcctccacaaggaagcactgattatgaaagtaggagcgaagatcccgaaatagccgagagtatcactgattcaaggaatatacaatatgatgaggatgatagtaaggatggtgataatgtgaataatgataatatattgagtgactttcctcaaggcgttggcatatcacaggaatacgacatgaaggataaaaatccaaaccaatctccaatatcaaaaagcgcagagcccacactggtagtgaaacttccgtctttgagttctttccaagggaaaaacgccagtgggttgggcctataccaaagagagccttctaaggtaaccttaccgagccttacaagtaataacagcagcgtcggagaaaacatagaggatgaggcggaacaagggactgaaagtgagaaaatcactgcttccctgtcagacgatgacgtg

SEQ ID NO: 79327 - DNA, 219 bp, Saccharomyces pastorianus
atgttttctccgacgctgctgttattacttgtaaggctcggtaaggttaccttagaaggctctctttggtataggcccaacccactggcgtttttcccttggaaagaactcaaagacggaagtttcactaccagtgtgggctctgcgctttttgatattggagattggtttggatttttatccttcatgtcgtattcctgtgatatgccaacgccttga

SEQ ID NO: 79328 - DNA, 135 bp, Saccharomyces pastorianus
atgatcatattggtgatgttaaacaccaggtttttcaacccgtattgcttccagccttctagtagtttatgtaggccctcgtatagtctcttttcaggtattttggcatgtatttcaagttctaagatttacctt

SEQ ID NO: 79329 - DNA, 1185 bp, Saccharomyces pastorianus
atgcaagccactacaccaacagaccctagggttttggatacgatgttgaagttttatacgggactttatggtaatcctcattccaacactcactcttacggttgggaaacaaatactgctgtggaaaatgctagagcccacgtagcaaagatgatcaatgccgaccccaaggaaataatattcacttcgggagcgaccgaatctaataatatggttcttaagggtgtcccaagattttataagaagactaagaaacacatcatcaccactagaacggaacacaagtgtgtcttggaagccgcacgggccatgatgaaggagggatttgaagtcactttcctgaatgtggacgatcaaggtcttatcgatttgaaggaattggaagatgccattagaccagatacctgtctcgtctctgtgatggctgtcaataatgaaatcggtgtcatccaacctattaaagaaattggtgcaatttgtagaaagaataagatctactttcataccgacgccgcacaagcctatggtaagattcacattgatgtcaatgaaatgaacattgatttactatcaatttcttctcacaagatttacggtccaaagggaataggtgccatctatgtaagaaggagaccaagagttagattagaacctttactatccggtggtggccaagagagaggtttaagatctggtactttggcccccccattggtagcgggatttggtgaagctgcgagattgatgaagaaagaatttgacaacgatcaagctcacatcaaaagactatccgataaattagtcaaaggtctattatccgctgaacataccacgttgaacggatctccagatcatcgttatccagggtgtgttaacgtttctttcgcctacgtggaaggagaatctttattgatggcactaagggatatcgcattatcctcgggttcagcctgtacatctgcttccctagaaccttcttatgttttacatgcgctgggtaaggatgatgcattagcccattcttccatcagatttggtattggtagatttagtactgaagaggaggtcgactacgtcgttaaggccgtttctgacagagtaaaattcttgagggaactttcaccattatgggaaatggttcaagaaggtattgacttaaactccatcaaatggtcaggtcattga

SEQ ID NO: 79330 - DNA, 357 bp, Saccharomyces pastorianus
atgttgaaatcaactgctacaaaatcgataacaagattatctcaagtttacaacgttccagcggccacatatagggcttgtttggtaagcaggagattctattcccctcctgcagcaggcgtgaagttagacgacaacttctctctggaaacgcataccgatattcaggctgctgcaaaggcacaggctagtgcccgtgcgagtgcatccggtaccaccccagatgctgtagtagcttctggtagcactgcaatgagccatgcttatcaagaaaacacaggtttggtactcgtcccatatatcttgacatgcaagccactacaccaacagaccctagggttttggatacgatgttga

SEQ ID NO: 79331 - DNA, 1059 bp, Saccharomyces pastorianus
atgactcaaatttctgaagtgattgagtatgaaatgcagcaacctatcccaacttatttgcctaaggcgcatctagatgactcgggtattgaaaaaagtgatgacaaattcttcgaaattgaagaagaacttaaggaagaattgaagggcagcaaaaccggtgatgaagatgtcggtaataataatccatccaattatattccaaaaatcgagaagcccccagcattcaaagttattagaacatcgcctgtgagaattatcggaaggacttttgaagacactagaaaatatgaaaatggctctccatctgatatttcgttcacttatgatactcacaacaatgatgaacctgacaaaaggctgatggaattaaaatttccatcccaagatgaaattccggatgacagattctatactccagcagaggaacccactgctgaatttccggtggaagaacttccaaatactccgcgaagtattaacgttacaacttcaaataacaagagcacagacgataagttgagtagcggtaatattgatcaaaaacctaccgaactgttagatgatttagaattcagttcatttaatatagcatttggaaatacctccatgagtactgacaatatgaaaatatcatccgacttaagttcgaataaaaccgtgttaggaaatgctcagaaagttcaagagtctcctagtggaccattaatctatgttttgcctcagagtagcacaaagcatgagaaagaggggttccttcgaaagaaacaaaaagacgagcccatttgggtttcccctagcaaaattgactttgctgatctaagtaggagaactaaagcattgacgccagagcgtaatactgtgtctttgaaaaacaacgacagtagaaaatacaaatatactggagagggatctatcggtaatatgacaaatatgctgttaactaaagatgcttcgtacgcgtacttaaaagattttgttgcgttgagtgacgatgaagatgaagatgggaaacagaattgcgctgttggtggcccagagaaactgaaattttattga

SEQ ID NO: 79332 - DNA, 312 bp, Saccharomyces pastorianus
atggttggtcataatcacgccaaaggtattcggctatccgctcgtgataaaaatgatgctaacaattggagaccctttatcacggttataggatcttcaaactatacgagaagggcgtattcattagatttggaatcgaatgctctcattattacaagagatgaagagctaagaaaaaaaatgaaagcagagttagataatttattacaatatacaaaacctgtaactctagaagactttcaatcagacccagaaagacatgttggcactggtgtaaagatagctacctccattttggggaaaaaactttag

SEQ ID NO: 79333 - DNA, 1302 bp, Saccharomyces pastorianus
  modified_base (1285)..(1285): a, c, g, t, unknown, or other
atgacgactcgtttgctccaactcactcgtcctcattacagattattatccctacctctccagaaacccttcaatataaaaaggcagatgtccgctgcgaacccttctccatttggcaattatttgaacacgatcactaagtccctacaacagaatttacaaacatgctttcatttccaagcaaacgaaatcgatataatcgaatctccatctcaattttacgatctcttgaagacaaaaatacttaattcacaaaatagaatattcattgcgtctctgtatttaggcaaaagcgagactgagttggtggactgcatatcccaggcattgaccaagaaccccaagttgaaagtttcttttctacttgatggccttcgaggaacaagagaattgccttccgcctgttccgccactttattatcgtctttagtagccaaatatgggtcagagagagtggattgccgattgtacaagacgcctgcttatcatgggtggaaaaaagtcttggttcccaagagatttaatgaaggtttaggcttacaacatatgaaaatatatgggtttgataacgaggtcattctttcgggagccaacctttccaacgactatttcaccaacagagaagatagatactatctctttaaatctcgaaacttctccaactattatttcaaattacatcaactcataagttccttcagttatcagattataaagccaatggtggatggtagcatcaacatcatctggccagattcgaatcctactgttgaaccgacgaaaaataaaaggctgtttttaagggaagcatctcaattactagatggctttttaaagagttctaaacaaaaaagcctcccgattactgccgtgggtcaattctccacattagtttacccaatttctcaattcactccactttttcccaaatataatgacaaatcgaccgaaaaaagaacaatattgtcattgctttccactataacaagcaatgccatttcttggacgttcactgcaggatacttcaatattttgccagacatcaaagcaaaactgctggcaacgccggttgctgaggcaaatgtaataacagcttccccctttgcaaacggcttttaccaatcaaagggcgtctcatcaaatttacctggtgcttacttgtacctgtcaaaaaaatttctacaagatgtatgtaggtacagacaagatcatgctattacattaagagaatggcaaagaggcgtagtaaataagccgaatggttggtcatatcacgcaaaaggtnatttggctttccgctcg

SEQ ID NO: 79334 - DNA, 207 bp, Saccharomyces pastorianus
atggcgcggaagaaaaccgagagagctgcaaaattagatgcaatagaaacactacttattacagatagtgtactaaaaaggaacaacgtaaaaaaacgtgaaatatacctagacctaatagagaatagtggaaagaacaatggcaaaatattcgtactcattacttcaaaaatcacagtgagcaacttgacaaaccaacagatatag

SEQ ID NO: 79335 - DNA, 264 bp, Saccharomyces pastorianus
atgattcaccatttgaataagtgcccatcatgcggccattataagagagccaatacactgtgtatgtattgtgttggacaaataagtcatatatggaaaacgcataccgctaaagaagaaattaagccgagacaagaggaggaactttccgaactagaccaaagagtcctatatcctggtagaagagataccaaatacaccaaggatttgaaagataaagataactatttggaacgtcgcgttcggactttaaaaaaggactag

SEQ ID NO: 79336 - DNA, 276 bp, Saccharomyces pastorianus
atgaattctttgatttttggtaaacaattagcatttcacaaaattgtgcctaccactgcaattgggtggttggtaccgctaggaaatccttcactgcaggttccaggccaaaaacaactgggatctatccaccgttggttgagagaaaagctacaacaagatcataaggacactgaagataaagattttttctctaataatggtattctactagcagttcctaaaaaaaaagtatcacaccaaaaaaaaaaggcaaaaactttacggtccaggtaa

SEQ ID NO: 79337 - DNA, 1191 bp, Saccharomyces pastorianus
atgagaggtattccagggagcgtatgggaaggttccgttttggacccagaagacggtattcgtttcagaggtcgtacgatcgccgacattcaaaaggacctgcccaaggcaaaaggaagctcacaaccactaccagaagctctcttttggttattgctaactggcgaggttccaactcaagcgcaagttgaaaacttatcagctgatctaatgtcaagatcggaactacctagtcatgtcgttcaacttttggataatttaccaaaggacttacacccaatggctcaattctctattgctgtaactgccttggaaagcgagtcaaagtttgctaaggcttatgctcaaggaatttccaagcaagattattggagttatacttttgaagattcactagacttgctgggtaaattgccagttattgcagctaaaatttatcgtaatgtattcaaagatggcaaaatgggtgaagtggacccaaatgccgattatgctaaaaatctggtcaacttgattggttctaaggatgaagatttcgtggacttgatgagactttatttaaccattcattcggatcacgaaggtggtaatgtatctgcacatacatcccatcttgtgggctcagcactatcatcaccttatctgtcccttgcatcaggtttgaacgggttggctggcccacttcatgggcgtgctaatcaagaagtactagaatggttatttgcacttaaagaagaggtaaatgatgactactctaaagatacgatcgaaaaatatttatgggatactctaaactcaggaagagtcattcccggttatggtcatgctgtgctaaggaaaactgatcctcgttatatggctcagcgtaagtttgccatggaccattttccagattatgaattattcaagttagtttcatcaatatatgaggtagcacctggcgtattgactgaacatggtaaaaccaaaaatccatggccaaatgtagatgctcactctggtgtcttattacaatattatggactaaaagaatcttctttctataccgttttatttggcgtttcaagggcatttggtattcttgctcaattgatcactgatagggccatcggtgcttccattgaaaggccaaagtcctattctactgagaaatacaaggaattggtcaaaaacattgaaagcaaactatag

SEQ ID NO: 79338 - DNA, 495 bp, Saccharomyces pastorianus
atgcatgaaatgggtgtttgtcatagagatttgaagcctgagaacttactgcttacgcacgatggtgtgctaaaaattacagactttggtaacagcgaatgtttcaagatggcatgggaaaaaaatattcaccttagtggaggcgtttgcggttcatcgccgtacatcgccccagaggaatatatcaaagaagagtttgatccaagacccgtagatatatgggcatgtggtgtcatttatatggcaatgagaactggtagacaattgtggagttctgctgaaaaagacgatccattttatatgaattatttaaaaggacgtaaggaaaagggaggctatgagccaatcgaaagtttaaaaagagccaggtgtaggaatgttatatattcgatgttagatcccgttccgtacagaagaattaacgggaaacaaattttgaacagtgaatggggaagagagataaaatgctgccataatgggcgcgcattgaaataa

SEQ ID NO: 79339 - DNA, 1404 bp, Saccharomyces pastorianus
  modified_base (1384)..(1385): a, c, g, t, unknown, or other
atgactggtatgaatgataataatgccgctattcctcagcaaactccaaggaaacatgcgctatcttctaaagttatgcaactttttagaagcggttcaagatcatctaggcagggaaaggcctcatcgaatatccagccaccttctaatataaacacaaacgttccatcggcgtctaaatcagccaaatttggtttacataccccaaccactgctactcctagggtagtttctaatccttctaatactgcaggtgtgagtaaaccgggcatgtatatgcccgaatattaccagtcggcatcaccatcgcactctagttcatccgcatcattaaacaaccatattgatattaacacctctaagtcatcatcagctgcttctttaacttcgtcagtatcagctttatccttatcacccacatcagccataaatattagctccaaaagtttgagcccaaagttctctcatcatagtaacagcaatactgctattacacccgcgcctactcccactgcttcaaatattaataatgtaaataagataaccaatacaagtacacctatttgtgggaggtttcttgtgcataaagatggtacccatgaacatcacttaaaaaatgctaagagacaagaaaagctaagcacaatgattaaaaacatggttggtgcgagcaaattacgtggtgaggcaaaatctgctgtccctgatataataatggatccaaagacgactttaaaatccaacaagaatcctcctactctttttgcaggcttcatgaagcaggtcgtggatatggatgataaatatccagaaggcgctcccacaagtggcgctttaaatggtcctgaaagggatatatacaggtcagatcaaaaagattccaaaaataatacgcataatatcactactactaaaaaagataggcaatgttttgccgaaaagtatggtcgctgtcaagaagtccttggtaaaggtgcttttggtgtagtaagaatatgtcaaaagaaaaatgtttcttctcaagatggtaataaaagtgaaaagctttatgcagtgaaagagttcaagcgtagaacatccgaatcagcagaaaagtattctaagaggttgacttctgaattttgcatttcttcttcattacaccatacaaatattgttactacactagatcttttccaagatgccaaaggcgagtactgtgaagtaatggaatattgtgcaggtggcgatctattcactttggtcgttgccgccggaaaactagaatatatggaagcagattgtttcttcaagcagcttattagaggtgttgtttatatgcatgaaatgggtgtttgtttcataagagattgtgagagccgtgagagacgttactgcgttacgnncacgagtgggttgtgctaa

SEQ ID NO: 79340 - DNA, 801 bp, Saccharomyces pastorianus
atgtccgaaaatcacgttcctgcctggaaaagaattgctttgaagagacagactataagcagtggtgacgaaagtaaagaaaaaggccaatccaatctaatagatgatgatccactaaatatcactacgcatttatccactggtaatttgacaaagaaagagaaaaaaagaatcattaatggtgagagcaaatcctctaccaaaaaagggaagcgtgtgtcgaaaccagggacgaagaagaaggaaaaattgtcaaaggatgaaaagaattcgaaaaaaaataaaattcttaaagatcaattacgttacctgatagaatttttcaggacaaagtctgagagcaagtttcccaccggaatcctagaattggaaagtgtaaaagaaaattacggcgactccctgatcaaagacgagccatcagagtctggtgttgttgaagtttggaaattttccaagcaaaagcaaaattggcttattaagcattttttcaacttggacgaaatcccctcagtatataatgatcttttgcttttatatttcagggacttacaaggtaaatcaaaagaagaactaatatcaaaatgcaaaggaaaactgaagcaatggaacgactatgtggaagatcaagaaacaaaaataaaagcgttaattgcagaggataaggctagcgaaccaattaatggtgaagaaaaagaagaaggtgaaaaagacggtaatgccgaacaagggaagcaaaagaggtacaagacgagcaagaggaagtacaaatgccgaataaagagcttgttcaaagaagtctga

SEQ ID NO: 79341 - DNA, 408 bp, Saccharomyces pastorianus
atggctaagctcatgggcaatacgactcgcccagctattttattaagttacttagttgttgatccaggtgaaggcaactacaatacgtacgttagtgaaacatccggaatgcacgacattgatccttctgacgatgatagatggtgtgagtatatcttgtataagggcttgagaagaacaggatatgctagagttgcaagaggaacgataaccgatacggagctacaagttggtaagttccaagttttgagtgagcaagtgttagtagagcactcggattctatgtatgaatacggtcatatgagtgaaccggaatatgaggacatgaaatttccagataagtttttaggcgaaggtgagaggggtcacttctaccatgtttttgatgagccacgttattacttataa

SEQ ID NO: 79342 - DNA, 2379 bp, Saccharomyces pastorianus
atgctgatcatcaatgggaagatcatccctatagctcatactatttgtgcattctccgccttctttgcagctttggtcactggttattcattacattttcataaaattgtaaccaatgcacattatacgtatccagatgagtggtttcctagtgtatcagccactatcggggaccgctatccggaacgttctattttccaaatcttaatagctctaactgcttttccaagatttttactgctactaggtcactactacttgaaccaatctaaggtatgcttccttgtcggtgtactccggacagtctcttgcggtggttgggtatacattacaagtacagatgaccacgatattcatgatatatttatgatcacatacattgttttaacgttaccatgggatataatgattacccgctattctagtcctttaacttcgaagaacaaagggttgactgctacaattttttttggaacattgttcccgatgatttactggtacattcagcactccgtccaacagagagctggggcatattctatatatgcttatttcgaatggtctctgattcttttagatattgcatttgatgcatttgcttacgctgatttcaaaaagatagatattgttctcgcttttaatgagaaacccggtaataccagttttttccaaattagagactctagtcccataaattatggagaagaaaaaagttcagaattgcagaaaagtggtgaaaagaaggttgaaaaggaaaaacccgttgctagaagcgcaactggttcatatttcaggtttgactcttttttttacttactaacaaatatttttaacggttttcttttctggtcgaacgttacgtccctgttatgtagtatttggcatttcccgctatggtatatgggaatctcaggttatgaagctgcaatattgggttatttgggacccattttcttatatctgccgttcgtttctgaagccttcacgcaatatggtgtacttttaggaggtattattgccattggtgcctatattgttcagatgccagaattaaggttgatttctgtagctgtgggaacttccattaccgttgcaacgtttgtacaaaatctaagatatatcacaaatgcggagactagtttctcttttgctctaacttggctgttaggtcttgttgcatctgtgatcttgaaaatggggttctataccaacaacccaacttgggtcattttagatgaacgtaatggtgggtataataagacagctctcgtgcttactgttttattcggcatgctgtcgccttatgttaattcaattaatttcgaagggaaaaggaatgctcaagcaaaatctgcttcgttgattggcaaattatttttggctgttggttttggctcgttgttattcggaattcatcagttattgacggattcttctactactatttattgggcatgggaaggttacaatgaatcacacggtcccttgccatggccttggggcgccttaacttgtacggtcatgttatttgcttctttgagttctgtgaagtttatgggcaagccattagttccatgtttgttgcttctcatatccactgctgtactttcagctagaagcattacacaatggcctaaatatattttcggtggtttattgtacgctatcgctatgctttggttagttccttcgtatttttctgcattaggccaagttcaaaacatatgggtttatgtcctatcattctccgtttatattatctttgtccttgcccatgtttgggtcgttgcatacgcatttgttccaatgggctgggtactgagggagaagattgagacggttcttgccttttcttccacatttatcattattggtgctttaacatgcaaaaaccttaacgttcaactggtgactatgggcaaaaaattcttcatttatgttttcttctttgccgtggccctactatcactaacagctaggttcgtgtatgatattagacctacaggaattcctcagccttatcatccagattctcagttgattacagctggtatttggactatccactttggtctcgataatgatatgtgggcatctgaagacagaatgatcaaccttattaaagatatggaactagatgtggtaggtctactagaaacagatacacaaagaattaccatggggaacagggatctaactagcaaactagctcatgatttgaatatgtatgcagatttcggaccaggtccaaataaacatacctggggctgtgttcttctttctcaattccctatcgtaaattctacgcatcatctaattgccctctccagttggcgaacttgcaccagccattcatgccacacttcaaacgtacaatga

SEQ ID NO: 79343 - DNA, 258 bp, Saccharomyces pastorianus
atggcaacgttggattttaccactaaaccacttgcgctagtaatcttgatacatgattcgagaaaagcaacaatattatgtatacggaatatactaggagttctcttcaaggatagaggaatcctcaaaatggaatccatatttctacatactaatattacgattatcccttcttctattttatatgtttcattatcctattacattatcaatccgtgcacttcagcttcctctaacttcgatgacagcttctcataa

SEQ ID NO: 79344 - DNA, 297 bp, Saccharomyces pastorianus
atgcctaataataaagtcgctatcgaaaatataatatctatgcttatctatattgagaaatggatgaaatttgagataattgttgggattccattgttgataaaggctataatattaggtatacagaatatactagaagttctcctcgaggatctaggaatcctcaaaatggaatctatatttctacatactaatattacgattattcctcattccgttttatatgtttcattatcctattacattatcaatccttgcacttcagcttcctctaacttcgatgacagcttctcataa

SEQ ID NO: 79345 - DNA, 303 bp, Saccharomyces pastorianus
atggaatctatatttctatataaaattaaactagttcaatttctcatagtcgatgattatgagaaatgggtgaatgttgagataattgttgggattccattgttgataaaggctataatattaggtatacagaatatactagaagttctcctcgagggtctaggaatccccataatggaatctatatttctatataccaatattacgattattcctcattccgttttatatgtttcattatcctattacattatcaatccttgctcttcagcttcctctaacttcgatgacagcttctcataa

SEQ ID NO: 79346 - DNA, 276 bp, Saccharomyces pastorianus
atgtcatcttctcacgtcgtatatgataatattgagaaatgggtgaatgttgagataattgttgggattccattgttgataaaggctataatattaggtatacagaatatactagaagttctcctcaaggatataggaatcctcaaaatggaatatatatttctacatactaatattacgattattcctcattccgttttatatgtttcattatcctattacattatcaatccttgcacttcagcttcctctaacttcgatgacagcttctcataa

SEQ ID NO: 79347 - DNA, 678 bp, Saccharomyces pastorianus
atgcatgcgtttcatttgctatgttctgggtctagatgcttagacataataaacgatctgctacgggtgaaaagttcaaagggcacaaaaccaatcgtgatttgggagccattcccagatctttgcgactttgatcatcaaaatgacattaaaagtgtaatgcagagaaacgatgttacggtaatattatctccaaatgccgaagaatcaagtcgcttatttggtttaagtagcaaggaaccgactagtttggaagaatgtctagcattagcgcatcgtttcgatgatttcatggatgaaaacaatatgtgtattctacgatgcggtgccctcggaagcatatcggtaagtgagaagtttaagaacggacgaacctatgaccatttccccgcctatcatttcaaaactcagtctaaagtactagatcctactggcgggggaaactcgttccttggcggctttgcagtttcttatgccctaacgaaaagcttagatattgctagtatatgtgggaacattgctgcaggcgcaataattgaacaattcggaataccgaggtacgatccaattgctaaaacctggaacggaatcacattcttggatagactgaaattttacctttcacagtccggtcttcaatatgatataaacgatctttacaaaagtctaacacgatga

SEQ ID NO: 79348 - DNA, 165 bp, Saccharomyces pastorianus
atgaatttgctattagatcatgttgaggaacgtatgggctccagtagtagaatgatgggcctagtcagcgtccctaggcgttccgttaagactataatgattgataagcctgttctgcaggagcttactgcgaataaagttgaattgatggctaatattgtttag

SEQ ID NO: 79349 - DNA, 420 bp, Saccharomyces pastorianus
atgttggttacccaaggtgtgatatgccaacgtcaattcttcaatttgaaaactagagggttcaatgcacttatgctgtgtacctgcatggtaatcgtttggttgtactttatctgttggggtctaagtgatggtggtaaccgtattcaaccagacggtgaggctatcttttatggtgttttggatttatgtgtatttgccatttatccatgttacttgctaattgcagtcagccgtgatggcaaattgccaaggctatctttgacaggaggattctctcatcaccatgctacggacgatgtggaagatgcggctcctgaaacaaaagaagctgttccagagagcccaagagcatctggagagactgcaatccacgaacccgaacctgaagcagagcaagctgtcgaagatactgcttag

SEQ ID NO: 79350 - DNA, 351 bp, Saccharomyces pastorianus
atgaacgatacgctatcaagctttttaaatcgtaacgaggctttagggcttaatccaccacatggcctggatatgcacattaccaagagaggttcggattggttatgggcagtgtttgcagtctttggctttatattgctatgctatattgtgatgttcttcattgcggagaacaagggctccagattgactagatatgccttagctcctgtatttgtgatcactttctttgaatttttcgctttcttcacttatgcttctgatgtaggttggactggtgttcaagctgaatttaaccacgtccaggttagcaagtctatcacaggtgaagttcccggtattagacaaatc

SEQ ID NO: 79351 - DNA, 156 bp, Saccharomyces pastorianus
atggctaaagtaagcaaagccatatcccgatcccgatcccgactcttattccgatcccttccgccacatcctgcatgtttattcgaataccaaattagctcatcttcgttatttcatcatccctttctgctatggcaaggacaagtttttttctag

SEQ ID NO: 79352 - DNA, 177 bp, Saccharomyces pastorianus
atggaaaaccgctgcagcaacccttgttacatacagtcggatccatctgacttactttccttgcgtctccctgcgcgatttgctggccattttccagatcctctagaatttttcaagggtcgagccgtaggaggattctctcagaaggcaaaaacgcatcgaaagcgtgctttgtaa

SEQ ID NO: 79353 - DNA, 879 bp, Saccharomyces pastorianus
atgatggctatatcgttgaaagattccggaaacatcaatgaggtttaccacaatttaaagacttctatagatgaagacaagtatacggtttacgttaatggaaatttccccaaagaatggaactttaatgatggaaaaaatcatcacatggcgtcaatctggattgtgcccgagcctgggtatgcagtgatgaagaaagaacaattgaagaaggtggcaaaaggtgatcataaggacaaaaacgaagacaatgtgttcacgattggatcacatggatacgacaataacgcgatcgatatgagatctgtatttattggtatggggccatattttccacagggatacattgagccgttccaaaataccgaaatttacaaccttttgtgtgatatttgcggtgtggcagaaaaggacagaaattccaatgatgggactgggatgcttatgaaccaactccgcgaaccccagagcagcgaagaagtagagattgaagatgactttgattatttggtcagtaagtttggtgaattcagcacttataatataatttggggcgggtaccccgaagagacagaacaagacaatgttgacaatgataatgatgacaacgacgatggaaacactgatgaaatagccgctatgccatcttcgtcattaacgataaaactagaaatgacaacttcaataccatcagcaactgagactctaccgggcgaaacatcaccatcatcaagaagaagcagcagcagcagcagcatacaagctagcgctactgctagcacagtgggggattggcttcaagacataatcaacgacgcaaaagatctcattgacgacataattgacagcatcgacgatttagtcgactctgatacctaa

SEQ ID NO: 79354 - DNA, 1275 bp, Saccharomyces pastorianus
atggaacttcagaatgatttagagtcgctcgataacgagctgaatgattttagtgaagatccatttcgtgatgatttcataacggatgaagatgctgtaagatcggggtggcgatctgcgtggaccaggatgaaatattggttttataagaatagactgaagtggacaaacaatcccatagtgattggcgacgcgaaagatagtagggatggttctaactttagaaggggtataccgctatatgaattagacgcgaatggtcaacccattgatactgaacttgttgatgagaatgaactttcttttggaacgggatttcattccaaagtgccttttaaaataatatttcgcacattgtttggctcgctggtgtttgccatttttttaattctgatgattaacatagcaaaaccccatcactccacgagagtgctatcgcactttggcagtcctgaatttgacccttacgtgaagtattttaacggtacgcatgaatttttccccttaacgatagtaatttcactagacggtttccatccttcactcatatctaagaggaacacaccgtttttacatgacttatatgaattgaaatatgatggaggtatgaatatcacgtccacaccttttatggtacccagcttccctacggagacctttcccaaccattggacgttggttactggacaatacccaatacaccacggtatagtctctaacgtattttgggatcctgatcttaatgaggaattccatccaggtgtattggaccctcgaatatggaacaataatgatacagaaccaatatggcaaactgttcagtctgcatttgacggtgatataccattcaaagctgctacccatatgtggccaggtagcgatgtgaattataccaagtataatgaagagaaactacaacctgaacataaaaatcctattgctagagagagaactccattttacttcgacgaattcaatgctaaagaaccactttcgcaaaaattatccaagattattgaatatgtggatatgagtacactgaacgaaagaccacagttaattctcggttatgtaccgaacgtagatgcctttggacataagcatggatatccgtcagagtcggaatactattatgaagacttcactgaaacactgggggaagtagatacatttctgaagcaactagtggaatcgctgcaagaaagaaatttaaccagctttactaatttggtcattgttagcgatcatggtatgagcgatatcgtagttccctga

SEQ ID NO: 79355 - DNA, 840 bp, Saccharomyces pastorianus
atgacgagatacatttttaatgaacaagagctacattatgctaggagaaggctccccgctagggacgaaagcacccggttagactggtcgactattcctagagtcttaaaaaggtggcactggtggatgttctctcttgtttgggttctgggaggtgagaacttgggtttcgcatctaattctacatttgcattatggttacaaaaccaaaaatatacgttggcgcaaagaaataattatccttcggggatatttgccgtaggtatagtttctacgctttgttctgctgtatatatgagtaagatcccaagagctaggcattggcatgtttctgttttcatatcattggtaatggttattgttgcggtactaatacgtgcagacccactaaatccaaaagtcgtcttttctgcacagtatcttggaggcgtagcatacgctggacaagcggtttttttttcgtgggcaaacattatttgtcatgcagatcttcaagaacgtgctatcgttcttgcttccatgaatatgttttcaggggccgttaacgcatggtggtctatattattctttgcttcagatatggtgcccaagtttgagagaggttgctacgccctcttggctacggcaatatcaagcggaattgtctcggtcgtcatacgctcactacagataaaagagaatttgtctaagaaacaggttccttatatagatgctaatgacatgcccggagaagatgacgatgacgacaaccaggataatgaaaatgatggcgacgacgagagtatggaagttgaacttcataatgaggaaatggccgaaatttcaaatcctttccgatag

SEQ ID NO: 79356 - DNA, 702 bp, Saccharomyces pastorianus
atgatgaaggaatcgaaatctatcactcaacatgaggttgagagagaatctgtttcttccaagcgtgccattaaaaagagattacttctgtttaaaatagacttgtttgtgctatcatttgtttgcttgcaatactggattaattatgtcgaccgtgtcggtttcaccaatgcatatatatccggtatgaaggaagatcttaagatggtcggaaacgatttgaccgtgtctaacacagttttcatgattggttacattgtaggtatggtccccaataatttaatgttattgtgtgttccacctaggatatggctaagtttttgtacgtttgcctggggtttattgaccttgggaatgtacaaagttacatcgttcaaacatatttgcgcaattagattctttcaagccttatttgagagttgcacattttcaggaacacattttgttttgggttcgtggtataaagaagacgaattgcccattagaagtgctatttttacaggtagcggtttggtgggatctatgttcagtggatttatgcaaacaagtatctttactcatttgaatgggcggaatggcttggcgggttggagatggttattcattattgatttttgtatcacattacccattgcaatttatgggtttattttcttccccggccttcctgatcaaacaagtgctgttagcaaatttctatga

SEQ ID NO: 79357 - DNA, 261 bp, Saccharomyces pastorianus
atgttagaaagggtatgttatttattcttcaattttacttactttacaattacgcgttataatttactaacatttcctttccataatttattcagcgctttggtatatgttgaagcagatgctgctaactatgtcttcgagagagacgacggttctaagggtactactttgagcttagttcaaaaggacattaatttattgaagaatgggaagaaattagaagatgctgagggccaagaaaatgctgcttcttcagaataa

SEQ ID NO: 79358 - DNA, 228 bp, Saccharomyces pastorianus
atgtttttacgtactcaagctcgtttcttccatgctactaccaagaagatggacttctcgaaaatgtccatcgtcggccgcattggctctgaattcactgaacatacttctgctaataacaatcgttatttgaaatatagtatcgcttcgcaaccaagaagagatggccaaaccactgggtataatatcaccgttttcaatgaacctcaaatcaattttttgacagaa

SEQ ID NO: 79359 - DNA, 279 bp, Saccharomyces pastorianus
atgaaggttaaggctgacagagatgaatcttctccatacgctgctatgttggctgcccaagatgttgccgctaagtgtaaggaagtcggtatcactgccgttcacgttaagatcagagctaccggtggtactagaaccaagactccaggtccaggtggtcaagctgctttgagagctttggccagatctggtttgagaattggccgtatcgaagatgttaccccagttccatctgactccaccagaaagaagggtggtagaagaggtagaagattatga

SEQ ID NO: 79360 - DNA, 4197 bp, Saccharomyces pastorianus
atgctttgtaaggtagggaaaagctatcgagaggagattatttctttgcttctcacatattctattggcaattataccacagctaacgaaatattttcaggtgctgaagacatgattggaggaatttcaaacgacaagataactgcaaaagaaattatttatttggctgtcaacttcattgagtggcatgtgattaattctaatgccagtgattcttcttctgtattggacctgaacaaccatatattaagattcgtcgaagatctgaaatcgctgagcgctgttccgattaatgaatctgtatttgatcctaaaaaaagttatgtgatggtttcattattagatctctcgatagctttgaatgaatcggaggacatctcaaagttcaagagctcttcaaaagtgatttcagagctcattaaaggtaatataatgtgtgctcttacgaaatatgccgcttatgatttcgaagtctatatgagcacatttttttgtcacagtacagaatacaaactggtttatccaaaaactgtaatgaacaattccagttacttagagctatcatttatagtgacactcctacccgaaatacttaatgacctggtagatagcaataacaatttgaacctgatgatgttgaagcatccatacacgatgtcaaatctcctttattttcttcgcaaatttcgacctgatatgtcacagatagttatgcctaaagatttttatttctcaagttatacatgtctcttgcattgtgttattcagattgataaatcatcattttaccatttcaaaaacgtttctaagtcgcaactgttacaggacttcaaaatctgcataatgaacttaatatattccaatactctaaagcagataatctgggagaaagaagaatacgagatgttttctgagtcactgatggcgcatcaggaagttttatttgcacatggagcatgtgataatgagaccgttggcttattgttaatattttttgccaacagattacgtgattgtggatacaacaaagcagtcttcaattgtatgaaagtgatcattaagaacaaggaaaggaaactaaaggaggtggcgtgtttttttgacccagcgaataaaagtgaagtactcgaaggtttaagtaatatcctctcatgcaataactctgaaacaatgaacctcataactgaacaatacccattttttttcaacaatacacaacaggtacggttcataaacattgtcaccaatatcttgtttaagaacaacaatttttctccaataagcgttagacagatcaaaaaccaagtttacgaatggaaaaatgcaagatcagaatacgtcacccaaaacaataaaaagtgccttattttatttagaaaagacaacacatccttagattttaaaatcaaaaagtccatatcaagatacacttacaacctcaaaacggatagagaagaaaatgcagttttctatcgaaataatttaaatcttttgatttttcatctgaaacatacactggagatacaatcaaatccaaattcgtcctgcaagtggtcatcggactttgcagaagattttgatgggatgaaacggaggcttttgcctgcttgggaaccaaaatatgaaccactcattaacgaggaagatgctaatcaagatactataacaggtggtaacagacaaaggagagaaagtggaagcattttatcctacgaatttatcgaacatatggagactcttgagtcggagctagttggagatttgaatgagaatagaaaaattcttagacttttgaaggataacgattccattgcaactatttggaattgcagtttgattattggattagaaattaaggaggggattttaattcatggcagtaattacctttactttgtaagtgattactattttagtttagaggataaaaagattctaaaattatcagaagtatcgcaagaatcacgggatatgacggttagcttaattaacggccctgatgttaaaagggtatcaactttcctaaagcacgaagtctttgtttggaaacttctcgatatcacttttgttaccaaacgaccctttctacttcgggatgtcgccatcgaattattgttcaaagagagagttagcgctttttttagtttttacaacaaaagagtgagagatgacgttttacgggtactgaataagatcccgaagcaccttccagcagatccaattttttcaagcgttttacaagaaataaacgaccgaggaaatagtatagtggcaagaaatggaataggaaaggcaagcattgcttctaaattcactagcgtcttctcagcgaacaacagcctaatagatggatttgagatcagcaaaaaatgggttaggggagagatttctaatttttattacctgttgagtatcaacatcctagcgggaaggtcattcaacgatttgacccaatatccagtgtttccgtgggttattgcagattacgaaagtaacgtactcgatttagagaatcctaaaacttaccgggacctatcgaaacctatgggcgctcaaagtgagaaaaggaaattacagtttatagagcgttatgaagctttggcttccctggaaaatgctgattccgcaccatttcattatggcacgcattattcctcagctatgatagtatcttcatatctgataaggctgaagccctttgtcgaatcctttttgttattgcaaggcggaagttttggccctgcagatcgtttatttagttcgcttgaaagggcctggagctctgcttcttctgaaaatacaacggatgtcagggaattgacacctgaatttttttttctacctgaatttttgatcaacgttaatagttatgactttggtacagaccaaagcggtaaaaaagttgacgacgtcgtacttccaccctgggcaaatggtgacccaaaggttttcattcaaaagaatagagaagctttagaaagtccttatgtatcagcacatttacatgaatggattgatttgatatttggttacaaacaaaagggggaaattgctgtgaaatctgttaacgtattcaacagattgagttacccaggcgctgtaaatctagataacattgacgatgaaaatgagcgcagagctatcacaggcattattcacaactttggtcaaacgcctttacaaatatttcaggaacctcatccggaaaaaatagcctgcaatgttcaacagctaacaacagaggtatggcgtaaggttccaatgaagccaatatttgagaagacaatcttcaatttgaatgaaaagaacaggtccgtcgattatgttatacacgatcctagttacttcgattcattatactggaggggcttcgctttcccaaacttgtttttcagaacggaagaatcgttagtgtcattgagaattgtgcataaaaattggttaaaaattggactagatatttttaaaaagacgcatatggctcagattacatcgtttgcgtactggaagttgggcgaattcataactggtgataaaaatgggctgataaaagtttggaaatatcgtaaagataagcattcggtttcaggtaaccttgagaacaaaaaaacaatgtttgggcacctatgcgagctaaaggagatgcgctgttatcacgactacaatacgcttttaaccttagacatcagcggcttagtatatgtctgggacatgattaatttcgaactagtaaggcaaataacaaatgatgcgcaaaaggtcgcaatatctcaacatgcagggagcattatggtattgactaagaataacgccatttcgatcttcaatctaaatggacaaatatatacatcaaagaaattcgaaccagctaaaattgtaagctcaattgatttttttgacttcactaagttagacgcaggttacagaaagcatatctattggaaagagatggaaatactactagtgggctttgaagatggaactatagaaatttacgagctctttttgaattttcataatgaatgggcgataaagctactgaagcagctctgtaccgaaaaagggaaagccataactagcattaagggacaggggaagacatacctgtcccagaaaagacgcaaggatacagcagagcctcatgagatagaagtgattgcgggaacattagatggcagattagctatttggtactag

SEQ ID NO: 79361 - DNA, 372 bp, Saccharomyces pastorianus
atgaaatcttctttccaaagcgcttcaagacacgaagcacagctcgaagacactcccagcatgaacaatattgtagtacaagaaataaaaccgaatattactacgccaagatcgagttctatttctgcattactaaatcctgtaaatgggaatgggcaatcaaacccagatggaaggccgttgctgccatttcagcatgctatttctcaaggcactcctactttccctttaccggcccctcgcactagtccaataagtcgtgcgcctccaaagttcaatttttcgaatgatccgttggcagctttggctgcggttgcctccgcgccagatgcaatgagcagttttttatctaaaaaggaaaataataattga

SEQ ID NO: 79362 - DNA, 1656 bp, Saccharomyces pastorianus
atggggtatccgccacctacacgaaggcttggagataagaaaaggtaccattattccaataatcctaaccgaaggcatccttccgctgtttattccaagaatagctttccaaaatcaagcaataatggatttgtatcttctcctactgccgataattcaacaaatccgtctgtaactcccagtactgcatctgtacctcttcctacagcggcacctggaagcacgtttggtattgaagcacccaggccatctcgatatgatccgagctcagtcagtaggccttcgtcatcatcttattcgtcaacaagaaaaattggaagccgttataacccagatgtggaaagatcctcttcaaccactagttcaactccggaaagtatgaatacgagcaccataacacacaccaatacggatatcggaaactcacgctattctcgaaaaaccatgagcagatataatcctcaatctactagttctacaaacgttacccactttccctcggcattatcaaacgctccaccgttttatgttgccaacgggagttctcggagacctcgatcaatggatgattatagtcctgatgtaacgaacaagctcgaaacaaataatgtttcatctgttaataataacagccctcattcttattactctaggagcaacaaatggagatccattggaacgccttccagaccaccatttgataatcatgtcggcaatatgacgaccaccagcaatactaactcgatccatcaaagggaacctttttggaaagcaaatagtactactattttaaaatcaactcattcacagtcatcgccttcccttcatactaaaaaatttcacgatgcgaataaattggacaaaccagaggcttcagttaaagttgaaacacccagtaaagatgagacaaaagccatatcgtaccatgataacaattttccaccaagaaaatcagtttctaaacctaatgcaccttcagaacccgataatatcaaggttggcgaagaagatgcattggggaaaaaagaagtacataaaagtgggcgtgagatagcaaaggaacatcctactcctgtaaaaatgaaagagcatgatgaactagaagctcgcgctaaaaaagtaagtacaatcaatattgatggaaagcaggacgaaatttggacgacagcaaaaacagtggccaatgcagtcgaagtttccaaaaaaagtcaaaaggaactaacacgctctgttgaaaggaaggaaagcccagaaattagagattatgaaagagcatacgatccgaaagccctgaaaacagacttaacaaagttgacagtagacaatgataataaaagttacgaagaacctcttgaaaaagtagaagggtgtattttcccattaccaaaagcagaaacgagattatgggaattgaaaaaccagaaaagaaacaaaataataagtaaacaaaagtacttactgaaacaggcaattaggaatttctcagaatatcctttttacgcacagaacaaacttatacatcagcaggctaccggacttatcttgacgaaaattatatcaaagataaaaaaggaagaacatttgaaaaaaataaatttaaaacatgattatttcgatctccagaagaagtatgaaaaagaatgcgaaattgactaa

SEQ ID NO: 79363 - DNA, 1575 bp, Saccharomyces pastorianus
atgattatttcgatctccagaagaagtatgaaaaagaatgcgaaattgactaaactgagtgaaaatttaaggaaggtagaaatcgaaaataaacgtaaagagcacgaactaatggagcagaaaagacgtgaagaaggtatcgaaacagaaaaggaaaaaagcttacggcatccatcctcgtcttcctcatctcgtcgcagaaatagggctgacttcgttgatgatgcggaaatggaaaatgtattgctacaaatcgacccaaattataaacattatcaggctgctgcaacaattcctccgctaattttagatccaatccgcaaatactcttacaaattctgtgatgtaaataacttggttacagacaaaaagctttgggcgtctagaatattgaaagacgcctctgacaactttactgaccatgagcactctttatttttggagggttatttaattcatcctaaaaaatttggtaaaatttctcactacatgggcggcttaagaagtcctgaagagtgtgtcctacattattatagaacaaagaaaactgtgaattataaacaacttcttatcgataagaacaagaaaagaaaaatgtcagccgctgccaagcgccgcaagaggaaggaaagaagtaatgacgaggaagtcgaagttggtgagagtaaagaagagtcaacgaacacgatagagaaggaagaaaaaagtgagaacaatgtcgaggaaaatgttcagccggttctagttcaaggttctgaagtgaaaggtgatccattaggtacaccggaaaaagttgaaaatatgattgaacagagaggcgaagagtttgcaggtgaattggaaaatgctgagagggtaaatgacttaaaaagggcgcatgatgaagttggagaagagagcaataagtccagtgtaatagaaaccaacaatgaggtacaaataatggatccaaaaggaggtgttcagaatggttattatccagaggagaccaaagaacttgacttcagtttagagaatgcgttacagagaaagaaacacaaatctgcaccagagcataaaacaagttattggagtgttcgtgaatctcaactctttccagaattgttgaaggagtttggctctcaatggtctctcatatcagaaaaactgggtaccaaatctactacaatggtaaggaattactaccaaagaaatgcagctcgcaatggatggaaattactggttgatgaaaccgacttaaagcgagatgggactagttcagaatctgtacaacaatctcaaattttgatacaaccagaacgaccaaacatcaatgcctatagtaatattcctcctcaacaaagaccggctttgggttattttgttggccaaccaactcatgggcataatacatctatttcatctatcgatggctctataagaccatttgggcctgattttcatcgtgataccttttctaaagttagtgctcctttaaccactttaccaccaccaagactaccatctattcagtttcctcgttccccacccgggaagaacagttatgccctaagcatgcatatgaaattgcatgcg

SEQ ID NO: 79364 - DNA, 360 bp, Saccharomyces pastorianus
atgcgcagcatagaaaacgatagaagtaattatcaacttacacagaaaaataaatcggcggatgggttggtatttaatgtggtaactcaagatatgataaacaaaagtactaaaccttacagaggacaccggtttacaaaagaaaatgtccgaatactagaaagttggtttgcaaagaacatcgagaacccatatctagataccaagggcctagagaatctaatgaagaataccagtttatctcgcattcaaatcaaaaactgggtttcgaatagaagaagaaaagaaaaaacaataacaatcgctccagaattagcggacctcttgagcggtgagcctctggcaaagaagaaagaatga

SEQ ID NO: 79365 - DNA, 1719 bp, Saccharomyces pastorianus
atggatttagggaaaattggtaacccaaatacgttgattttactcaatcaaggttctaattatgcactgacttatcaaatcgacaagtttaatcaaacggtaggtgattctgtttcattcatagagaaacgttgttcactcaattcaattgaatcctccctacaaaaaatcaataaggcatattacaaacttacttatacagtattgaacaactacaaaggaattctaggtagctttatgaagcaatgtccgggaaatgagttgttaaattcgatattcatgtttggaagggattttggaagaagtttccttaaatataacgcctttagctcaaagaggaagtacgttatcatctttctgatggttaaattaggaatgaactggttgaaattccttgttgaagagtgtgatcctaccgatcagcgaactttccgatggtgcgttcttgcaatggattttgcgatgcagatgactagtggttataatatcctggcgctgaatgtaaagcaatttcaagaactgaaggagagggtatcagtatgtatgtcattattaatttcacatttcgacgttatgggtgcacgagccactgaagctgaaaatggcatgcaacaggcaagattgaatattgatactgaagagaatattgatgaagaggccaccctagaaataaacagcaggttgagactggaagctataaagacgttggaaaagactatgaagaggaatcccaggcaaatgggtaaggtattggatgctacagatcagggaaacaaatacctactatcgctagcatcctcattatcgaatgtatcaatgaggtggcaaaaaagaagcttcattggcggtggaacatttggacaggtatactctgcaattaatctggaaaacggtgaaatcttagctgttaaggaaataaagatacacgataccacaacaatgaagaagatttttcccctgattaaagaagagatgaccgtattggaaatgttaaaccatcctaatattgtccagtactatggtgtcgaagtacatcgcgataaagttaacatcttcatggaatactgtgagggtggttctttagcctcgttattggatcatggaagaattgaagatgaaatggtaacacaagtgtacacattcgaactattagaaggtttggcatatttgcaccaatctggcgtggtgcatcgcgacattaaaccggagaatatcttgctggatttcaatggaatcataaaatatgtggattttggtacggcacgtaccgttgtaggatctaggactagaactgtgcggaacgcagccgttcaagattttggagtagaaacaaagtccctcaatgaaatgatggggacaccgatgtatatggctccagagactatttcaagctcggcagttaagggaaaacttggagcggacgatgtatgggcattaggatgtgttgtgctagaaatggccacaggtagacgaccttggtctaacttggataatgaatgggccatcatgtaccacgttgctgcaggtcgaataccgcaactacccaatagagacgaaatgactgcagcgggaagagccttcttggaaaggtgtttggttcaagaccccactatgagggctactgctgtggaactactgatagacccttggatgatacaaatccgtgaaatagcatttggcaactcagagaaagatcaagtacctatcctaagctcatag

SEQ ID NO: 79366 - DNA, 1899 bp, Saccharomyces pastorianus
atgatggatatactgaatacacagcaacaaaaagcggctgaaggcgggagagttctggctcctcataccatctcaagtaagctcgtgaagagattatcaagtcattccagccataaactatcaagatctgatttgaaagcattgggtggctcggaaacaataagcgacggccccagtcagctgacttttaaggaccgatacgttttcaatgaatcgctatacttgaaaaagctaaaaaagaccgctttagatgactactacacgaggggcataaaactcactaaccgctacgaggaagacgacggtgatgacgaaattattcggttgtctaatggcgacagaattgatgaagacctgcactcaggtgtcaagtttttctccactacaccttattgcaggaaaatgaggtcagacagtgatgaactagcttggaatgaaattgcgaccgaacggttcaaatggcagtcaatgctggccagagtgctgaagggagatattgttaaaggtgaaaagacgaggattgctaaccaagtcaagaaaccagggttaaataaggagctctcagatgagatatggctcgaattgaaggcatggctgaatgggaggaccatgcaagagatggaacagtcgcttacatatttaagagatagttcagattccgtttttgaagagataatgaagtttcaaattccacagggcaagatattgagcctggatgcactggaggccatcttacaagacctcatgaacagatatcacagcgttgtctcttattggcctaacttgaaaaaaatgtataaggataaaccaatcaccaatactgcagaatttaccgctagaatagacgtaatgaattcttggctgaactttaaaacgaacttaacgttgaggaggcaagagttggacgactggataaaccgtttctcaccgataagtagttcggataattgccaagaggattttgatggtgtgccccaatggaactgcaaaatgaagattcttgcagaacaattgatgaaggaaaagaacatcgagtctatattccaaaaaaaaattttctatccgctatcaccttggatgttcaaactgaaactacattttatagtctacagagaaactttgacaaagatgaacataaaatatccttatgaaaggttaagatcactactggcgttccccgtctatttaatcaaagaagttattttgactagattgtcatatgcacgaaagcttaaaaatccaacaatgatgatgatcgatcaaatgatcgatgattttaacgcttttattcgactttctgtgcaattgaagtacacactgacaaaatattgctccaatttgccgttcgatgtggattttgacccgacgttcgaaaatactgtaatagaagccattcgttatttattttttctgttgaatttaaagttgattgattccagtaaacaaaatttcaaagcacccgatctactcttgaaatactgggatcacctaaaaaacaccggtcactatattaacggtgcagaaaccgtgattccaaatgaatttctcaagttaactttgagactcgtacataaattgcaattctatcttttgaaacaacaaaacttcccaccaacatttgctaacgcttcagaagcagaaaaatggctaagttccattttcgaaaatttgggtgccatgaaaagaaagctgaacaggttcagcaatattctagtcaaggcgttccaaaattctgctgtttatcagattaatcataatgcacaacttgttaaaaagttaaaagatgctcactattttttggtatactccggtaacacttttgagtctagtggtgtatatatgtttgctgctcctgaattattaggttgtgacaatgataccatcttaagaattttgtga

SEQ ID NO: 79367 - DNA, 87 bp, Saccharomyces pastorianus
atgcttttcggtattcttcttgggcacagtatcattgcacacctcacagttgaacgtaaccatcctgtaataacaaatatttcttga

SEQ ID NO: 79368 - DNA, 282 bp, Saccharomyces pastorianus
atgtctatatatctacacataaaattccgattattcctttgcatacctgatttgcccctcagaatccacaaccagacttttcaagaaggtcttttttgcccctttatccttcatggttttcaaaattttgtacaacgacttgcccttgtgaagctcgattccgttcgaggtcttttccactttctctgccttcttgatcacaggcttctccactttctttgcaggagttgccactggctgctgctgctgcttctgcttctgcttcttgttgcccttgtataa

SEQ ID NO: 79369 - DNA, 264 bp, Saccharomyces pastorianus
atgtcactattgacaggacaagactgtattcaattagccggccatgaagtaccatttggtggcattactttccctgctgacccagaagccaggagagctgccaccgaattcgtcaagttcatcaatccaaagattagtgatgggcaaattcaccatattccagcaagggtctataagaacgggctttacgatgttcctcgtatcctggaagacattaaaatcggtaagaactctggtgaaaaactagttgccgtattaaactag

SEQ ID NO: 79370 - DNA, 753 bp, Saccharomyces pastorianus
atggatatgtcagtagaaggtattttcaggaaaaatggaaatatcagaagactgagagaactaactgctaacatcgacagtaatccaacagaagctccagacttctcgaaagaaaatgcaatccaattatctgctcttttgaagaaatttatcagagagcttccccaaccgattttatcgacagacttatatgaactatggattaaggccgcgaaaattgatttagaggatgagaaacagcatgttatattgctaatatattccttattacccacttacaatcgcaatttactggaggcacttttgtcatttttgcattggacgtcctcattctcttacattgagaatgaaatgggatcaaaaatggacattcacaatttatccacagtcataacacctaatattttatatttgcgacataaagaaatttccaatgataacgtccctgacgaaccagaatcaggtttagttgattcattcgctcaaaacaagggagaaaattactttttggctattgagatagttgattacctgattactcacaatgaagaaatggcaatggttccgaaatttttaatgaatcttttaaaagatgtgcagttacaaaaattagataactacgaatcaatcaaccattttatttccaccgttatgcaaagtaaaacaatcgattattccgaatgtgacataaaaactcctgtcacagtcaaagattcgaccacaacggtcatacaaggtgaaataaacaaataa

SEQ ID NO: 79371 - DNA, 1785 bp, Saccharomyces pastorianus
atgtacgaaaaccaattgtattgcaagtaccactttctcaaatatttttcgaaacgttgcaaagggtgcgaattcccaatatcggatcaatatatcgagtttcctaaaggtgaagaaatacattgttggcatccggaatgttatggaattcataaatattggcatgtaaatttagcagcagaaactgttggtttgcagtaccttcccaagctggaatataacccaaattccggagacaaagatataaacccaactgcctacgagttagataaacaaatgcaggcgtttaactttattctatctaaaacgtggtcggttttatatcgttttgaggaagaggcagcttcttgcatttctgatatgtttcaatatttgacaagcaatgatcagttaaagggcatagagtctacgggcctgttggtactaaaaatcgactgtcttttccggggactggatactttaaacctctcgacgaacaaaagtatgccagttaacagtgatcaagaatgcattgaaaacaacgcaatggcggccagtaaatacagcaagtttcccaaaaatctatccacaaaaattatgatatatttacaactcttaagaaagttagggacagaaagcaaaaacgaaactatcacaatttcatcttttatgtctgttattactggattagcccattttctaaaactgttaacaagatttgggctatatacggctctagaaaacaataagttgactcattctgttaatccattgttgaggtttttaagagaagtagagaaaaatgagctttttgaaaataacccgtttcagtatataaagactcctgttaacgccacagatagttgcgctggatgcaataaatacatacaggaggaatgcattcaattttatgagcaccggtggcatattgcttgttttacttgttcttcatgccataagaatataaatccgaggagtttgacggatcccacctttaataaagagaaaaaaaagatactatgttctcactgctcaattgatgatccggcctctgtgccgggtttcaaatttgttactaagctagcacaactaatttttcttctaaaaattgccctagtcaaatcaagaactgtaatgttgaaatcgaaagcatctaacaaggtaggcagaaactctttacagagtactatgctaaaggaacaaacttacattaggacactgaatgatattaaaagattgagatctagaagagaaagtgttcgggttactcataacaaacaacaagctagaaaatcagtgatactggaaactgcagagacagatttaaatgacccgacaaagcaaggagatagtaaaaatcttgtgattcaaacagatgacccatcatcgagccaacaagtgagcacacgtgaaaatgttttcagtaatactaagacgttgacactagatgatatttcacgtattgttgccgctgaacaagcaagggagctaagacctaacgcttttgcacactttaaaaaactaaaagaaaccgatgacgaaacttcgaatattgttcccaagaaaagcggagtttattactctgaattaagtacgatggaactctcgatgataagggctatcagtttgtcactgctagctggtaaacaactgatatcgaagactgatcctaactatactagcttagtctcaatggtcttctcgaatgaaaagcaagtcacaggtagcttttggaacagaatgaaaatcatgatgagcatggagcctaaaaagcccatcactaagactgtttttggtgctccttaa

SEQ ID NO: 79372 - DNA, 579 bp, Saccharomyces pastorianus
atgattcaaaattctgctggttatcgatcgctgaatactgcatctccgatggccgtgcaggtgaagaatcagaagaaaatatgcgcccgttgtaacaagttagttgtacccgatagccaacgaactaaaacaactttaaaggctctcggtaaatattatcatgaaagttgttttacctgccaagactgtcagaaacctttaaaaccgaagtacttcccatatcaagtagacaagacaagtgaacctatattgttatgccaatacgattattttagaagacataatttgttatgtcttgtatgtgataccccattgcgtgggttatattataccgcattcggttacagatacgacgaagagcatttttcttgtacaatatgtgctactccttgtggggttaaaaatgcttcatgtacgaaaaccaattgtattgcaagtaccactttctcaaatatttttcgaaacgttgcaaagggtgcgaattcccaatatcggatcaatatatcgagtttcctaaaggtgaagaaatacattgttggcatccggaatgttatggaattcataaatattggcatgtaa

SEQ ID NO: 79373 - DNA, 1461 bp, Saccharomyces pastorianus
atgaatcattggttagcatttttgaataagcctgaatccctaaaggaacaaaactcggattgcgaccagcagggggagatgagacatgttactgatggcactttaactaagtctccagaaagtaaaccttttcgagggcggcgttcacaaacttggatagactctgaagtacctacgtccactgaaaaatctaatgtgcaggaaagtatttcttctgatattatatcaaaactgtcgaataggcgttcccgaagaaaccgctcagagagttgggcaggttcagaagcttcttcaccttctggtaacattagtacattggaaaatgctacggaaaaaaatactttaaaatcgcctaataaatttctacaaaggggtggtttaccaactgtaggaataggctcgcaggctctgtcacctgcaggaaagcccagtacattaggaaatgtaagccctggtaaatttaccacatacaaagtacacaatagtattgaagtgaatagattttcttctacacctacaaagctcctcacgaatccccacaaagtcgcagcaatctcaaatgatgagcattatgttgtaagcaatgagagtctggaggagaatatagaggttgcgcatctagagaacgtatttcgctcatctaaaactccagatgaagaacagtccgaatatatgaaattaggagaaattaggctatcttcttcatcatatggaggaagtatttctaaagaaaatagtttacccaaggtattagatgagctccagtcccaaaatgaagagatcaaagcaccaagacaaaaactagaagagaaggatgacaggattcaagaactagaagaacttaatagcatgaatgatgctaaacttcaaagaatagaagacttgcagaaggaattacacaacgaaagaaaagctgcatcaaaaaggctcaacattgttcaggaccggtttcgcaaagaaattaaaaaaattagagaagaaaaaattacagactttcaaaacaaaaacgctagcaagaaggagaagaatgaagtgactagtgccaaaactaaatgtaaagctttttctcaaagaaatattttagtttcggaactatacaggaagcaaaaacaaatcctaaacttgcagcaagaaaatgataaatttctaaaagatattaacgaatcgaataactctatagtaaaattaagatctgaagttgaaatactgaaaagcaatttgcaactttctcaagatgaaaataaaaaattacatgataatggttcgttttacgagaaaaggttaaatgatgtttacagttatatgcaaaatctttctctttttgagaaagaccttggtaaattcatactagaagaaatgaaatgtggccattccccttcgatgtttcaaaacggttttgccaagctttatccggattttcaagatatcaaaaatcttgaaaatatggagcaatacaaacaa

SEQ ID NO: 79374 - DNA, 906 bp, Saccharomyces pastorianus
atggataccaatggtcccgagtattatattgaagatactaaaacttcctttgaaagcactgtgaaagttgttaagtacatacgggaaaccatttgtgatcccctcgtaaatcctatagtgacaccaaggttcgcgccctcttgttctagagaactaatgcaacagttgtccaagctagtcaaggatgaaaacatacacgttcaaacccacttgtcggaaaataaggaggagatacagtgggttcaagatttatttcccgaatgtgagagctatactgatgtatacgacaaatatgggctgctcacagaaaaaacagtattggcacattgtattcatctaacagatgccgaagcgcgtgtgattaaacagcgtcgctgtggtatatctcattgtcccatttccaactcctctctgacttctggagagtgtagggttcgatggttgctggaccagggcataaaggttggtctaggcaccgacgtttcagccggtcattcttgtagcatactcgccaccggaaggcaggcctttgcagtttcaaggcatttggcaatgagagaaactgatcatgcaaaactttcagtctccgagtgcctatttcttgctacaatgggcggagcacaagtcttgcgtatggatgagaccttggggacttttgacgtcggtaagcagtttgacgctcaaatgatcgataccaatgctcccggctcaaacgtggatatgtttcattggcagctaaaggagaaggatcaaatgcaagagcaagagcaagagcaagggcaagacccttataagaacccaccgctgcttactaatgaagacataatcgcaaaatggttctttaacggtgatgatcgcaacaccactaaagtttgggtagccggccagcaagtctaccagatttag

SEQ ID NO: 79375 - DNA, 243 bp, Saccharomyces pastorianus
atgaaacattgtggttctgatcattggaaagtatcgctaaggggtcgtatggattcgaatgagatcagttgtgctaaaagcataattgatggtgctcatgcattgaaacttaaaacaagaatctggggagccccaacctggccagctaacctggtggaaactatttctcgccaaattattcatgacttgggttccgatttacttaacctggacagtttattcatggcatcgtcattgatataa

SEQ ID NO: 79376 - DNA, 147 bp, Saccharomyces pastorianus
  modified_base (49)..(49): a, c, g, t, unknown, or other
  modified_base (95)..(95): a, c, g, t, unknown, or other
atggagcaatatttcaaatctctgattgattctggatattttttatatnacgatatgaagaaggatgaaattatccggagacccgtttttgtgantctaacgggcaactaccttttcttcattggatattttagacaatggaaatga

SEQ ID NO: 79377 - DNA, 612 bp, Saccharomyces pastorianus
atgttaggactgaaagggtgtctaactattcttattggatacgttattgctgtctgtgctttgttttccagtcggggaagaaatccttcattaactgattgggaaaagttaaaggaccagaaaatatcgaatattgataactttgggttgaccggtcaacatcttttagaatttttccaggaaaacttgccatttctaagtttttcagaggaaaagtatcgtcacaaacacgtttctttatattatgatgtattcaaagaatatatcttacgtcgtgccagttcaaaaaagtgtttaccagtagactctgctatcgcaaagttgaacaaagatgttaacccaatgccagttcactcccataatgactactggaggaaacttccgctttttgaaggtctggcctatggtgctagtagtactgaagccgacgtgtggaatatagatgaaaagatcctcgctgtgggtcataatgaagcgtatttggacccagttgaattgacattagacaagctatacactggccccctcttggagattttagacgaggtgaattgccaagattcagactccgatcgcaaaaatggtgtatttatcaagctctccagcaaactt

SEQ ID NO: 79378 - DNA, 645 bp, Saccharomyces pastorianus
atgaccgatcttttatcgcctatttatgtcatcatgaaggaagaatggaaaacgttttggtgttttacgcacttcatggacattatggaaagaaattttctaagagaccagagtggcatccatgaacaaatgttaactctcgtggaattggtacaattaatgctacccgaattgagcgaacatttaaacaagtgtgattcaggaaacttgttcttttgctttcgaatgcttctagtatggttcaagagagaatttgaaatggaagatattatgcacatttgggagaatttctggactttctactacagttcacaattccaattattcttcatgttggccattctacagaaaaactcacaagctattttacaacatctaaatcagttcgaccaaatattaaaattttttaatgaacttaacgggaagttggattggaatgacctaatggttagagcagagcttttgttcaagaagtttgagaaaatgatgcacgtcatggaaagagatttacaaaacgtatcctcctcttcatcctcatcctctaccggcgtattgccttgtcagagcgagaggttgaccctgcttctttctaaaaaacctatcataagacatgaagggcaaaggagcaaaaattccgttaaatag

SEQ ID NO: 79379 - DNA, 1320 bp, Saccharomyces pastorianus
atgtaccaaggcccaccgtacccaaatggtaatattaactttcctcccaccgcgcagcagaatataccgcccacggtttatccacaacaagtgccatttccaggtcaaccacaggggggtcaatttccacagccttcatcagaacagcaggtgtttaaccagcttccacaagtgactcaaacgtttcacaactctgcgcagaatacgaatgcaaccgggggccctggcagcgggtctatgccaatgtttacgccggtagcatcctttcctcatcccatggctacggcagcaacggcagctgctccgttaccacggtctgcatcccaggcatctttatctatgttacgggtgccgtatcatgtaagaaaatacttatctaatttggcgatgttgaaattgtacgaaataataaatgaggtgaatacggcaatgggtaagattggcctgctttcattctggacagaattaatatcagatatttttacacctgatgcagttataaggtatagtaaaaagtctatgacagattatagagaattcgaatttatcatcccagtgttcccagttatttgctctacattaggcagatttggcatcgttagaatggaagttaaggttttacaattgaaaacacaagttctaagtaattctacgatttttttcaactgtcctcgtgtcacatttgtctattattatcctgatggttcatatattacacatttttcccaaatgaaaggtgctttcgatttggacttgaaaattaattggctggacgtatctatgcatagttttgtccctgatattgaatggaatgcagtggaacggcttttgagtgatgacacaaagtctacagaaattgaacaaatattccgtaaattgaaacaagaagatgtcaaagagcaagggaattcttttgcagaaaataatgctacgaatgttcctccgaattttgaggccatcactcagctgagatcatattttgacgtattcagaaacgtctctgtgtttggcactcaagaagggttgatgagagtcatgcaaataagtaccgttatgtctactttgaaaaaccttcgaaagtttcaaattgaaaagaacattgatagtcccgtgaccgccctaagtgcgtacattgacgccgacaagaaggacagtggaagcgagcccttgcacgcaaagaggcgacgcaacagcggtatctctcctcgcaccacgacgttggggccaaacggcaactccaatacaagcaatgaagagcttccaacaagtgatgtgaatgatattaacaaagacatgacaaaaaagaagatgaagttttaa

SEQ ID NO: 79380 - DNA, 318 bp, Saccharomyces pastorianus
atgtcacgtaaaaaactttaccacttcatcaagaaatttagtgaaatgaaggaccaatcacattcgaatttaaattcaggaggcaattctatggagaagaacctattcaagaaaatataccaacagaaggcatcaagttcagggcagcaacaattacccttgcattcagtggcgaacagctctgaaatagacagtgaaaaaatgcattggacagaggttcacggcattgcatttgcgagagcttttacggatatttctgaagccttgttccaggtagagagttgtgcaaaagatatactgggcgaagaaaacttttaa

SEQ ID NO: 79381 - DNA, 2865 bp, Saccharomyces pastorianus
atgaaaagatatgagcgagatcgaagtcccactcctgatcctgatattgtgaaaggttcatactctcaaacatcactcaggtcactacatgaacttaactataagaatcctgccggtataagcgggcttagctttgcaggaagcccacaacaatccgtggcatccttatcgcaaatgcggctggaaaatttggttaaggacaaacactgggaggaagtagaggactttgggctggaagagctgagagatgggttttttgatgctgcttttaccaagccggacagcaaagctaggtctcctaacagcgacatcgatgacgacaatggcgctgcaaggaaaaaactgcaatctggttttaccaagctttccgaatatgtttggactgctatctacaggcccattattcatttccctagagatattagaaaaaatggggtatccatattcaagttttttattgcttatttcattgttatcgtgatttgcgttatcaggccttctggtaggtggattggccatgagttcaggtattttctacccatcgcagtacttatacatcatccggtcagaaatattggtgttcaactggaaatgactataagctccattatcggcgcaagttttggcctgggatggtcggctttggcatggtacatttccacagcgacaaagccgaccgcaaactaccagggaggaattttatttcagagtctgactatggccctcttatttgccatctggctaaggtctgtttaccgtcggttcttctatttcacaacttcgttttcgatatcgattatattcactcatacagttcggttggcctcatccaagtttgatttgaagtggcaaattttttgggattttggaatctcatatctcttcggccttttgctatctctcttggtttgtgtatgtgtatcaccacatagtggcaatgcagagttaatggaacattataacaagtgtctacagaccacaaagacctttttaatggcactagtagatactgaattaataaagtccaaagaacaaatttacctagcccaagtaaaaatggtgaaaacactaaacattgatttatctcaaggttttagagattttgtaaatcagttgacaatttccaggtttgaccttcaatcgttgaagagtttaagaaattctttaactgccatggaaacttctctgagagtattacccattgcacccaaaatttttaatgatgatgaattgaaaaagatgtatgaagaattggagaagtatagatcggattctgcgagcctgagcaaagaagcaagcgctagccctcaatcttcaggaattccaacaagagaaaacacgcccagtgcctttaagcctatcggtccggggcttttaaaaaatgaaatctacattaatgcattaaaggcgtccttctcgaaaagcatcttcaacttaatactggaaatgatcttcgttttggaaaatctatcaagagtactaaagaaatacgagtctccaaatcaaaaaaacaacttagatgagtgtgtcaaaatattaagtcactcgcattctaaattaaagaggaaaatttacaaactagatgtttgttacagggattttgtgaattctagttttttttcacaggaactgttgaatgacgaagagtctgtcgatattttcctttttctaagatatttgagaaactccgcaaggcagctagttactgttatccacgattgccaagttttgggtgagaatattcactggagaattgctctgccatcatatccactgtctcgtgcgttgacaagattgcccaaacagtgtgttctcgatgaaggtgcaggaaatgttcttcattattttgaggccaaacgtgatgtcgatgaaatttttgaaagagtttataacacctacacgtcaagacacaagtataacaaaggcgaagaagaagcgctgagacttgattcacaaggtggtgacgaaaagtcacagaatcgcaaaaaccacactatttccatcagagcaattgatcacaacgacttcaattttcatacaactcaaaatccttggagatttaaactatggaaattgagtagaattttatctggtgatgaatgtaagtggacactaaagattactttttgtatgatatttttgtgtctaccaacttggctacctgaatcctatcactggtaccaagaatttcattgttggtgggccccactcacgttttacttattagcacatagaagatactctggtaactgggcgttggtaatgaggagattaatctgtggtatagtaggtatcttttgggggtgggctgccaaccaatcgagacattttggtagtccatacgtggtttgcacgtttgctggtctgatcgtggtcccatttagcatcaactttcttgtctatagaaacaccaaatcgagcttcactgcattaatgtgctttaccataattgctcttgaaccatacagcaaacctaatagacattataacttaaccaccgctggaatatggaaatctacgtgggttacaggcttggcacttattatcggtattttggtttcgattcccatcaactggatagtgtggccctttagagctaggacagaactaagagatagtatgtcatcattactggcacacttgggccagtcctaccaaaccgtggcggaccggtatttatacagggatgccgacgacgcacctactgatttaactttcgcattttcccacattcgtgaagttagactgactcaaagtcttgaagcaatcagggaacttttgaagaaagcccgtcatgagccaatcattatttccaacttcaatcctgagaagtacgcaagtctaatcaattcatgccaattttag

SEQ ID NO: 79382 - DNA, 618 bp, Saccharomyces pastorianus
atgcaaggtgacatgttcggtatcgttgttccaagaaacactactgttccaaccatcaagagaagaacctttactacatgtgctgacaaccaaaacaccgttcaattcccagtctaccaaggtgaacgtgttaactgtaaagaaaacactttgttgggtgaattcgacttgaagaacatcccaatgatgccagctggtgaaccagtcttggaagctatcttcgaagttgatgctaacggtatcttgaaggttactgccgtcgaaaagtctaccggtaagtcttctaacatcactatctctaacgctgttggtagattgtcttctgaagaaattgaaaagatggttaaccaagctgaagagttcaaggctgccgatgaagcttttgccaagaagcacgaagctagacaaagattggaatcctacgttgcctccatcgaacaaactgtcactgacccagtcttgtcttctaaattgaagagaggttccaagtccaagattgaagctgctttgtccgacgctttggctgctttgcaaatcgaagacccatctgctgatgaattgagaaaggctgaagttggtttgaagagagttgtcaccaaggccatgtcttctcgttga

SEQ ID NO: 79383 - DNA, 561 bp, Saccharomyces pastorianus
atggctgaaggtgttttccaaggtgctatcggtatcgatttaggtacaacctactcttgtgttgctacttacgaatcctccgttgaaattattgccaacgaacaaggtaacagagtcaccccatctttcgttgctttcactccagaagaaagattgattggtgatgctgccaagaaccaagctgctttgaacccaagaaacactgtcttcgatgctaagcgtttgattggtagaagattcgacgacgaatctgttcaaaaggacatgaagacctggcctttcaaggttatcgacgtcgatggcaacccagtcatcgaagtccaatacttggaagaaaccaagactttctccccacaagaaatttccgctatggttttgaccaagatgaaggaaattgctgaagctaagattggtaagaaggttgaaaaggccgtcattactgtcccagcttactttaacgacgctcaaagacaagctaccaaggatgccggtgccatttctggtttgaacgttttgcgtatcatcaacgacctactgccgctgctattgcttacggtctag

SEQ ID NO: 79384 - DNA, 1581 bp, Saccharomyces pastorianus
atgttactatgtgggccagcaggtacaggaaagaccacctttgctaacaatctattggaaactaagatctttccgcataagtatcaatacggtaaatcaaatgctagtattagctctaacccagaagtaaaagttattgctcctacaaaagttgtttcatttaattcgaaaaatgggattccgtcttatgtttctgaattcgatccaatgagagccaatttggaaccaggtattaccatcacctccacttcattagaacttgggggcaacaaagatcaaggaaagccagaaatgaacgaggatgataccgtgtttttcaacttgattatgacgcatggtataggcgaaaacttggacgattcgttgtgttctgaggaaattatgtcgtatttagaacaacaatttgacattgttttagctgaggaaaccagaattaaaaggaatccgaggtttgaggacagcagggttcacgtagcattatattttattgagcccactggacacggtctgagagaagtcgatgtagagctcatgaaaagcatctccaaatacacaaacgtactgccaataataacaagagctgactcattcaccaaggaggagctaactcaattcaggaaaaatattatgtttgatgtggaaagatacaacgtcccaatttacaaatttgaggttgaccctgaagatgatgatttggaatccatggaagagaatcaagccttggcatccttgcaaccatttgctattataacttcagataccagagatagtgaaggtagatacgttagggagtatccgtgggggataatatcaatcgacgacgacaaaatttcggatttgaaagttttaaaaaacgtcctgtttggttctcacttacaagaattcaaagacaccacgcaaaatttgctttacgagaattaccgttccgaaaaactatcgtccgtggccaacactgaagaaattggtcctaattctacaaagagacagtcaaatgctccaagtttaagcaactttgcctctttgataagcactggtcaattcaattcttctcaaactcttgcaaacaatttgagagcggacacaccaagaaaccaagtaagtggaaactttaaggaaaacgaatacgaagacaatggcgaacatgattcagcagaaaatgaacaggaaatgtctcccgtgagacagttgggtagagaaataaaacaagaaaatgaaaatttgataagatctatcaaaacagaatcttcaccaaaattcttgaactctcaggacttaccagagcgtaccaagttaagaaatatttcagaaaccgttccatatgtcttgagacatgaaagaattttagcaagacaacaaaaactggaagagttggaggcccagtcagctaaagaattacaaaaaagaattcaagaattagaaagaaaagcacacgaattgaaattgagggaaaaactaataaatcagaataaactaaacggttcatcatcttcaatcaattctctacaacagagcacaaggagccaaattaaaaaaaatgacacgtatactgatttagcctctattgcatcgggtagagattga

SEQ ID NO: 79385 - DNA, 108 bp, Saccharomyces pastorianus
atgagcactgcttcaacaccgccaattaacttatttcgtagaaagaaagaacataaacgtgggatcacatacacaatgttactatgtgggccagcaggtacaggaaag

SEQ ID NO: 79386 - DNA, 249 bp, Saccharomyces pastorianus
atgaactctcacggtcatggcaacggtcatggccatggtccaatttgttttgtagaatttgaggatgttagctttgccactagagcattggcagaattatatggtagtcaactacctcacccccgcccttccctcaacaacaaaggaggtatcaggttgagcttctctaaaaatccattaggcgttagaggctcaaacagtaggagtaaatctggttacagctttaatggaagttacgggaaatcatga

SEQ ID NO: 79387 - DNA, 1497 bp, Saccharomyces pastorianus
atgtcattagtgcataatcagacgaatttaaacgaatccagatttcttatagaaagggcatttagttctagttcagaaaccgttccattatcaaaggaggcaacatatcccatgccaactgcatatagtttttccgcagttaggagcaacagcgagactaacattaaaagagagaacccgcaaggttttgcaaaagaacctattatgacttctatgcttcataatttgaccatgtccacggggaaagggaacgggaatgacgtcaattctttagccccacatgatgtggatgttggcccctactgtcttttgctgaggaatttgccaaaagacattacactaagagagtgttattgtatattttcactagcaactggggtgtcaagtatagaactaaaaagggatgatagagaaccctttaatgacaatgaaaaagtcgttgtggtcaaatttggatccctttctttagtaacccattatgctaatatattaaactcgaagtctgagatttttgggcctagtttcccctttaggtctcacattgacgtagtaaatgaacaaacgcagcttccagtgagttttcaagaacatgtttcatctggcactacaaatagttctccaaagaattaccaattgtcgtccagtgcgcaaaatgaaattcaaaatcaaagttttaatactatatcatatggaaaaactagttcctctccattagggccttcagcggccaagccaaggccttcattactttcagagagatccctccgtttctcattcaatgacccattcggattggaaacaatctctcaaagaaaagaatccgtaccctttctacgaaatagcatctcacaacatgatttatcaaacgtaaccaccacaccagttccagcaggaatgccacctcagaaggacgctggcaagtcacttttgctactagaaaaggatgaaataaatgaaagtatttggaatggtgatgaattagttaatgatgttggtaattcttcatttggtgcatctttacaagagcctccgatgtcatctacgcctgtgatggagtggaatgcttcctcaactgctaatattcctctttttcaattatctagccaagaaaatcatcagtctaatctgttgcctccatcccaccattcaattagccaggatgttccacatattcaatcacaacctaatctgaacaattcaggagtaatacattccgcgacttctctaccgcattatcacttattgaaccaaattaatgcttcaactaagacacaaagtattcagcagagcgtttcgaatgttccttccaatttggacctgaatctccaaacggaaaatggccacccacaatcttctgctcctaacgggtcttcaatattcaacaaccaaaaggtgaatcaaggctttttagtgagtgaacaagacaccagtacaatatcacgacagaaagaatgttcttctacagcttctgcctctgcattttcgaaaaataactaa

SEQ ID NO: 79388 - DNA, 2196 bp, Saccharomyces pastorianus
atgactggtactgatgtgaaccctgttgatcctagtgtttacacaagttcaggcccaaagagtaatgttagttccggtatgaacgctgtcgaccctagtgtctacacggacacaagttcgaagtctgcagatcgtagaaagtactctggcaacactgcgactggtcctcctcaagatacaattaaagaaattgcacagaacgtgaagatggatgagagcgaacaaactggattgaaaaatgaccaagtttctggttctgatgcaatccaacagcaaactatggaacctgaacccaaagcagcagtcgggacaagtggttttgtaagccagcaaccttatcatgatagcaataaaaacattcaacacccagaaaagaataaggttgataataaaaatatatcagaaagagcggctgaaaaatttaacattgaaagagatgacattctggaatccgccgatgattatcaacagaaaaacattaaatccaagacggattctaattggggtccaattgaatatagttccagcgctggtaaaaataagaatctgcaggatgttgttataccttctagtatgaaggagaaattcgacagcggtccatctggatctcagaatatgcctaaagcgggaaccgaattaggacatatgaagtataatgataatggtagggataacttgcaatatgttgccggttcacaagctggttctcaaaatacgaacaacaatattgacatgtcaccccgtcatgaagcagaatggtccgggctttctaatgatgccaccacccgaaacaatgttgtatcacctgctatgaaggacgaagatatgaatgaagattctactaaacctcatcaatatgggttggattatttggatgatgttgaagactaccacgagaatgatattgacgactactcaaatgcaaagaaaaacgacttgtattctaagaaagcgtaccagggaaaaccatcggattacaattatgagcagagagagaaaatcccaggtacttttgaacctgatacgttgtcaaaatcagtgcaaaaacaagatgaagacccgttgtctccaaggcaaaccactaaccgtgttggtatggagactgcaagagatgagagtcttggcaattacgaatactcgaatacctctggtaacaaaaaattatctgatttaagcgaaaataaatcaggcccaactccaacgcgttctaattttattgaccaaattgagccaagaagagcaaaaacaacacaggatattgcatccgatgccaaggatttcaccaataatccggaaacaggtactactggaaacgtagatacaaccggaaggatgggtgcaaaatccaagaccttcagctcgaacccttttgatgatagtaaaaatacagacactcatctcgaaaacgctaatgttgctgcctttgataattccagatctggagacactacatactccaaatcaggggatgctgaaacagctgcttacgataatattaaaaatgcggaccctacatacgccaaatcacaagatattactggaatgactcacgatcaggaaccatcatcagaacaaaaggccagttacggttctggcggcaattcccaaaatcaagaatattctagcgacgataatattgatgtcaataagaatgcgaaagttttagaggaagacgcaccgggctacaagcgtgaagtagatttgaagaacaaacgtagaaccaaccttggtggtgccgacgcctcaaacgcttatgctgccgaagttggtaatttccctagtttgattgacccacatgtcccaacatacggatttaaagacaccaacacctctagttctcaaaagccatctgagggcacctacccagaaaccacttcctattcaattcataatgaaacaacttctcagggaaggaaagtgtcggtgggttcaatgggttccggaaaatcaaaacatcatcacaatcatcaccgtcacagcagacagaattcttcaaaagggtctgactacgactataataattctactcattcagccgagcacactccaagacatcatcagtacggttccgatgagggtgagcaagattaccatgacgacgagcaaggtgaggaacaggctggtaaacaaagtttcatgggtagagtgagaaaaagtatttctgacggtacttttggatttaggagtgaaatttaa

SEQ ID NO: 79389 - DNA, 270 bp, Saccharomyces pastorianus
atgaatatgaacgagtccatttccaaagatggtcaaggcgaagaagaacaaaataattcttcgtttggtggtaagcccggttcctatgattccaattcagattctgctcaacgcaaaaagtctttcagtactacaaagccgaccgaatataacttaccaaaagaacagcccgaatcaacgtccaagaatttggaaaccaaggctaaaaacattctgttaccttggaggaagaagcataataaagactcggaaactccacagaagacctga

SEQ ID NO: 79390 - DNA, 441 bp, Saccharomyces pastorianus
atgcagggcatccaagtattgcataccactcataaccacagcacttccaaagctgccacttctcctgttactcacacgcatggtcattccagtgctaccacttcccctgtcactcacacacatggtcatgccagtgtgaaaaccacatctcctaccaatactcatgagcattctaaagcgaatactggtccatcagccactgcaactacacatggacatatcaacgtcaaaactacccaccctgttagccatggtcactctggttcaagcactggtcctaaatccaccgctgctgcacaggatcattccagtactaaaactaacccttcagttactcatggacatacaagtgttaaagatactcctcagctacgaagggttattcgaacactgattccaactcagatcgagatgtcatacctggtagtttccggggcatga

SEQ ID NO: 79391 - DNA, 2199 bp, Saccharomyces pastorianus
atgaatagagacgagaaaaacaggtttaaatttgtaaagttgattcactacgatatagaactaaaaaagttcgttcaagaccaacaaaaggtattatcgcagaaatcaaaagccgcagcaattaatcctttctttgtgccaaatagactagggataccttacattgaatcccaaaacgaattcaactcgcagcttatgacgcttaatgtagatgaaccgaccacagatataagtaacatgggagaggaaatgcatgacagcgcagatcccattgaggattcagattcctcaactacctcctcttccgggaaatatttcagctcaaaatcctacatccagtcacagacacctgaaaggaaaacaagcgtaccaaataattggcacgatgatgattccggaagcaagaggaagagaaagctttccttccacagtccgaacgcgtcctcaatccgcaaagccatcagttatgagcaactttccctagctagtgtaggctcagttgaaaggttagagggtaaaattgttggcatgaatccacctcatttcgccagtataaatgagttcaaatattgcacattgaaattatattttacgcagctcttagcaaatgtcccagacaaggtcctggtgccaggcgtcaattgcattgagatcgttatcccgacgagagagcgaatctgtgagctcttcggtgttttaaactgtcaaagcgacaagatatcggatattttactactggaaaagcctgatcgaatttccgtcgaagttgaaaggatcctgtgggacaataacaagaccgccagcccaggtatggcagtatggagtttgaagaacattagcaccgacacgcaggcgcaggcgcaggtgcaggtgcctgcgcaatcgtcggcgtcaatcaatctgtctcgcacaagaatgagcaaaatggcaaggaaagatcccaccatcgaattctgtcagttgggactcgacacttttgagaccaaatacataacaatgtttggcatgctagtctcctgctcgtttgataaacctgcctttatatcttttgtctttagcgattttaccaagaacgatatcgtccaaaactatctttacgacagatatctaatagattacgagaacaagttagagctgaacgaaggcttcaaagccatcatgtacaaaaaccaattcgaaacgtttgactctaagctcagaaaaatattcaacaacgggctaagagacctacagaacggccgcgatgaaaacctttcgcaatacggcatagtttgtaagatgaatataaaagtgaaaatgtacaacggcaaattgaatgccattgtgcgcgaatgtgagccggtcccgcattcccaaataagcagcatcgcctcgccttcacagtgcgaacatttaagattgttctaccaacgagcgttcaagagaattggcgaatccgcaatttcacgctatttcgaagagtaccggaggtttttccccatacatagaaacggttctcatctcgcgaaactgaggttcgatgaagtaaagcatgaaccaaaaaaatcacccactacaccagctctcgcagaacacatacccgacctgaatgcagacgtgtcctccttcgatgtaaagttcacagatatatcctctctcctggactcctcggctcgcctcccgcgcccacagcaaacacacaagagcaacacattatacagttgcgagggccgtatcgtcgccatcgagtaccacgcatctgatctctgcttccatatcacgaatgagctcccacttttacaaacccgcggcttggccccggagcgagtgttgcaactacacatcattacctccaagaactttgcttattttttcaaccgctcaagcgcctacttacagcgtcagcctcttgaggaaaaatatacgcaattggcacaatttctcggccattcatttaaattcaatataacctcctcgctcacgctgttccctgacactaccgtggcactccagatctggtgcccaattgaatgcacctttcgggaattgcaacaacagctggcccatccgaaggttgcagcggctcctgattcagggagtcttgattgcgcaattaatgctaccgtcaatcctctgagacttcttgccgcgcaaaatggcgtcaccgtgaaaaaggaggaggataataacgatgacgccggagccgttcccacctcgtaa

SEQ ID NO: 79392 - DNA, 519 bp, Saccharomyces pastorianus
  modified_base (480)..(480): a, c, g, t, unknown, or other
atggataccttagaagagcctgagtgtcctccatataaaaatcgtatttttgtgagctcgagtaaagactttgaaggctatcctagcaaagcaatagttcccgtgcaattcgtggcgcttttaacctcaatacacctgactgaaacaaaatgtttgctaggcttttctaattttgagaggcgaggaaatcaatcccaagaagatcaatatttaatcaaactgaagttcaaagataggggctcggagaggttagcccggatcactatttccttactttgccaatactttgatattgaactgccagatttagattctgactcaggcgcatccccaacagtaatactgagagatattcaccttgaaaggttatgtttttcaagttgtaaagctttatatgtatcaaaacacgggaactatactctattcttagaggacataaaaccgttggatttggtaagtgtgataagcaccatatctacnaaattgacaaatagcagcaagcattcgttatcagaactt

SEQ ID NO: 79393 - DNA, 372 bp, Saccharomyces pastorianus
atgctcttagtaggtatttccattgatgattctatggcggagatagataaattatcgaaaaaagttcttagtttgagaatcttcgaagatgaatccagaaatctatggaagaagaatattaaagaggccaatggtgaaattctatccgtgtctcaattcactttgatggcaaaaaccaagaagggaactaaacccgatttccatttggcccaaaagggtcatatagctaaagaactttatgaagaattcttaaaattactaagaagtgatttgggtgaggaaaaagtaaaggatggtgaattcggcgcaatgatgagttgctctttaactaatgaagggcccgttacaatcattcttgacagtgaccaataa

SEQ ID NO: 79394 - DNA, 1032 bp, Saccharomyces pastorianus
atgttctcagtacgaaagtttacggtttttttttttcaattgaggaacataaaccaaatagatacattatatcaacgttatgaaacgagttactggagttttcttaacacttttgagattttctcaatttgcatcatctgttttggtgatgtcactttggcgtatgccatccacgcctatggaaatagaggtaataagaaaaccaacttcacattggcaacaggtgtcattagtgtgttttatctgattgccttaggtattttgtgtctggccctacccacattgatctacataggaatgtacttctgtgccgaattgatcgtttgtatgctatggctagcagctttcgttgttcttgccaaagctcaaggtgaacgtagctgtagcaacactaatgcagacggattatactataatccgtacagtggccaatatactgctgacagtcatagaagagcatgtaattcttctcaggcggcaatcgccttttctggcctttgctttgtactgtttttgatcagtgtgatattactgggaattaacgtcttaacacctatcaggaagcgttatcaaacccaaggaatgtggagaagcggcgcttctatgggtacaaagctccataggtggagcggactagctttaagcgagccttttgaagaaacagctgcttacgataacaccaatgttaggaccggtgatgtcgaagcaggtgcaggtgataatgctgcttacacatctgaaccgaatggcgacgcacgctatgcaactaatgaccccaatgggcagtaccatactaccaccaccaacacacgttacaccacaacaacagcggaccctaaaacgcgttacaccaccaacgatcgtaatcctggttctgcgaatgtcgctaacagtgcagtggaccagcacgcttactctacggatgagtcaggtgatcggtcttatcaagaaaaggtcacagaaggagctcactctggcgctatgagtggtagcactgcagaaccaaacaggaacgtcaatcaaatgccataa

SEQ ID NO: 79395 - DNA, 168 bp, Saccharomyces pastorianus
atgaaacgagttactggagttttcttaacacttttgagattttctcaatttgcatcatctgttttggtgatgtcactttggcgtatgccatccacgcctatggaaatagaggtaataagaaaaccaacttcacattggcaacaggtgtcattagtgtgttttatctga

SEQ ID NO: 79396 - DNA, 294 bp, Saccharomyces pastorianus
atggaagatagaaaccttaccgagttcgacagtactgacactagtctgtgcataaacggcgaaccgagcattcatgtaaatcgcgtggaaagaagcagcaggtctaccgacaattttcacaattctaaaaaacgcatgaacagcaatcaggaaaaatgtcatgatgagggcaatgatatgttacagagaaatgtcttggagacagattatgcaagagcaaaaaatcgaatacttgcgtcaaagataaaacaatatgagcggttacgtttttacaaggacacctttacattatga

SEQ ID NO: 79397 - DNA, 1068 bp, Saccharomyces pastorianus
atgaataacaacgatcgaaaatcaataaaaactgcaggaggcagcatgtcactttcaaataagactgtaaaggaattacgacaactactaaaggaaaggtacaccgtggaggatgaactaactgaatctatagcgctgtcaagtatgcgattcaagccgtcgcaagaacctgaatttcatgcgctaagccaatcttccttgctcaaaactaaactaaaacaacaaagtagtacagatattccgagttacacccacgtacttatatcaaaattatcatgtgaaaagatcacccattatgcagttcgtggaggaaatattgaaatcatgggcatattaatgggattcacattaaaagataatattgttgtaatggactgtttcaatcttcccgtagtagggacagaaactcgcgtaaatgcacaattggagtcatacgaatatatggttcaatatatcgacgagatgtataatcataatgacggtggtgatgggcgagattacaagggcgctaaactgaatgttgttggctggttccattcacatcctggttacgactgttggttaagtaatatagatatccaaacccaggatttgaaccagagattccaagatccatatgtcgcaattgtggtcgatcccttgaaaagtctggaagataaaattttaagaatgggtgcatttaggacaattgaaagtaaaagtgatgataatagtgccacttcatactatgaactagaaacaataatatttgattcagaattgaaccgagcgctatttgaaacaaagttaaacttacattgcgtaatagaggatgatgagtcagaacaaatatcattaaatagattgatcgattcaatgaagcagtatagctatttgatggattccaaaaatgttagaacaaggattaagttggctactaccagtgaacgtgttagcaacgaaaataaaaaaaacattgactatcaaaaccgttcaacaaggtctcagttctgcctcaatacgcaaaggggggatagcactgaaacaagctcctttggaagcatgttttcaggtgataataataagtga

SEQ ID NO: 79398 - DNA, 744 bp, Saccharomyces pastorianus
atgagtgaaaagatgcattacgaggaaatatgctgtctttttaaacagctgatcaacggcgtaaaatatttgcacgacatcggtctctctcatcgtgatttgaagctagataactgcgttgtaacacgaaggggaatcttgaaattgattgattttggcgcttccagtgtcttccactatccattgtcttcacagatgattgaagcaaatggaattgttggtagcgacccctacttgtcacccgaagtcttttatttcaatgagtacgatccaagagcacttgacgtttggtccgtggggataatattcttttgtatgataacgagaagatttccttggaaatatcccaaagtgaaagatgttcaattcaaggcattttgttccggaagaggtgtgtcatcttttaaagatcttgtgacacggcctgctaccgatgacagcaataattatgatgatggttacgaagaaggagtcattaatatgggtcctaatttcattctgcacagactaccagaagaaactcacacaataatgaggcgtatactggaagtttcatctttcagaagaattaccataaacggaatattacaagatggctggatcaaagaaatagaaacgtgtcaagttgtgggcgcggcaagcccaaatgaggcatcgcttcgaataataaacaaaggtaatcacatacatacaaacatcgatcaacgatacgcccacattggcggcctgcatcagcgaacgtaa

SEQ ID NO: 79399 - DNA, 1203 bp, Saccharomyces pastorianus
atgtcgttgtctagaatcctgcgatataatcagagaaataacaaaactacagcttccttgactgcagaacacgcctattccgataattgggcatattccgtctcgttaggcgatcccactagtgttggtgtgaatatgactgctaagacgggtgaggcgctaaataaatcatatgattccgttttttcttctctccctgttgcagatagtgtacctcggacagactttactgcatcttcccgggatgatgaaaacacggacgtgcaaaagctgaccacttcctggatggagaatattgacacgaagatgcccgaaaacatatctaaaatcgactctaatattatttcctctcccatggtcagtaaggttgaagcaagatttattgttcctaaaggaagattgaggaaaaattctaccgattttacgtcatctttctcaaactcgttaagtttacccaaaagttatggcaaattaattttctttacatcaaagaaaaacagcagtagtaccaaaaaaaatccagcgaatgatatcagtgataacaagcataacaacaattcttctaatactatcggtcacaatattccagtcacgacagccacggcgacatgtgatgagattgcatgcacctccacagaacatgaatataatgtttatgaggaagagaggatgttcactactcgtgtatattctctagaagattcggtctcttcactgtccacgaatcctctcgatgacacgtattcagaagcagtgcaagtaaatacaagacatatcgaggacactgaaagcacggcccatataagaaaacactcctttactacgtcattgtcaagtatgaaaaggctcttcaaaataacgtcttttagcaataacaacagtaactcatgtgatcaccaggaaagcacagttgcagatgattgcgctatatcatcatcattgaaggaaacaacttcttcgccagtctcaactggatcattctctctcatgatcgagaatgaagacagcgatagagatcagattattcaggctttatatagtaatattgaagcatccactgacttggtttccaggaaatatagagatctcgacgttgttctcggcgaaggttctggtggtaaagtgaaactggtccaaagggtcctggataataaagtttttgcattaaaggaatacaggtcaaagaaaaaaaagggaatctga

SEQ ID NO: 79400 - DNA, 864 bp, Saccharomyces pastorianus
atgttttggcattataaagacaaaattgctcaaataaagcaagacatagttctgcctataaaaaaagctgatgtgaatgtaaggaatttgctctcacgtcataaaaggaaaattaacccgaaattcggacaattaactaatagcaaccagcaactttttaaaatacagaatgaactaactcaattgataaatgatactaaaggcgactctctagcatatcattggattttaaactttattgccaaagccgtagtacatcaggcggaaacagaagtcagggtaaaaccagagtctgctctgcccctagggaaattgactttatatttgttagtccaattcccagagttacaggaattgtttatggcaagacttgtcaagaaatgcccctttgtgataggattcacgtgtgagattgacacagaaaaaggccgtcaaaacatgggatggaaaagaaacaacgagaataaatgggaagataacacatcctacgatgagagaatgggcgggatcttatcattatttgccataataacgaggttacagttgcctcaagaatttatcaccaccacgagtcatcctttccccatcgcattatcgtggcatattttggctagaatatgtaatacgccactaaatttaataacaaatacccattttgtcatactcggttcgtggtgggatgccgctgccgtacagtttcttcaggcgtatgggaaccaagcctctaaattgctaatcttgattggtgaggaactgacctccagaatggctgaaaagaaatatgtgggtgctgcgagattaagaattttattagaagcctggcaaaataataatatggagtcctttccggaaatgtctccttag

SEQ ID NO: 79401 - DNA, 549 bp, Saccharomyces pastorianus
  modified_base (535)..(535): a, c, g, t, unknown, or other
atgagatttgtgttcgatgaggttttcaattcagatactgattctccagaattcgaggaaacatgttctacaacatcttctacgtcatcgcaatgccctacacctgagccgagcccagcaataaagttaccttcattcacgaaagttggcacgaagaaattggtaaatgagtcggtagttattttagatcctgttctagaaaacgccttgcgcgatttgaaccttcaatcgaaactgatccccattaatgagcccatcgtagccgcgtcatcgataatagtaccgcattcaaccaatatgccactaccgagagcatcgcattcgtcattgctagataatgctaagaactcaaatgcgacagcacccttactcgaggcaatagaagaatcttttcaaaggaaaatgcaaaacttggtgcttgccaatcagaaagaaattcaatctattagagaaaataaacgtcgtgttgaagagcaacgtaagcgaaaagaggaggaagagcgcaaacgtaaagaagctgacgtgaaaaggccanagccgggagcccag

SEQ ID NO: 79402 - DNA, 720 bp, Saccharomyces pastorianus
atgcccactttactaccagagggtttcgagctggggggtatcactaagcgggtcgatccaacagattgtcttgtcatgcccttttactctgcttataagtctctggatgaccttccagacggggggattgtgggaacctcatccgtgagaagatctgctcagctaaaaagaaaatacccacatttaaaatttgaaagtgtcagaggaaatatacaaactagattacaaaaactagacgacccaaaatctccgtaccaatgcatcatcttggcgtctgctgggttgatgcgtatggggttggaaaacagaattacgcagcgattccattcggatacaatgtaccatgcagttggacaaggcgccctgggtatagaaattagaaagggtgacaccaagatgatgaagattcttgacgaaatttgcgatctaaatgcaactatatgttgcctttcggagcgtgctttgatgagaactttagaggggggttgttccgttcctattggtgtggaatctaaatacaatgaagagactaaaaaattactattaaaggccattgtagttgacgttgaaggcacagaagcagtagaagacgaaattgaaatgctaatagaaaatgttaaagaagattccatggcgtgtggtaagatactagctgaaagaatgattgccgatggcgcaaagaaaattctggatgaaattaatttagacagaatcaaatga

SEQ ID NO: 79403 - DNA, 219 bp, Saccharomyces pastorianus
atgggccctgaaactctacatattggtgggagaaaatcgaaattggcggtaatacaatccaaccatgttttaaaactgatcgaagaaaagtatccggactacgactgcaaggttttcactttgcaaactcttggtgaccagattcaattcaaacctttgtactcatttggcggtaaagctttatgggacaaaggagttggaagaccatctttaccatga

SEQ ID NO: 79404 - DNA, 123 bp, Saccharomyces pastorianus
atgtattacgaaaaaggtgtcggttgtgaaattgatttggatctagccaaacgatattatcagagggctgcaagaatgggttttaggaaggcagttgatgctcttcgaagtttgacaaattaa

SEQ ID NO: 79405 - DNA, 1590 bp, Saccharomyces pastorianus
atggttaatcagggccaaccgcaaccgaacctctatgacaaacacattaacatgtttccaccagcaagggcgcgggagtcctcgcataaattgggaaatgccaattcggataggcatggtttgcccgctcaaaatatagtgcctgcaccctatccagtggatgactctatcgttgaactcacaccagctattccttttacatccccttcatcttcctcatcattatcgctgcctttgagtgcgctgaatttcacagacgggaatgctgatggtggtcaattaggcactccagtaaccataaatagtaataacggaatggacatttttaattccaagccaacaggtgaaataggatatgccaataatggcaccaacagtactggtagtaggtatgaacttcctttcaattttagttctacaaaagagagtttgtgttcaccagctgtacaagatgcatcaataagcagtggaaatcgaatatcagagtctgtaagggacaactcagcgccgccaccctatgaggaatctgaatctaggatactgcaggaaaaagtttacagaaccgaggaaaaagctccaatgcgacctttgaataataatcctgtttcaccacaaaaaatcaatcaatcacccactggcagcgcgaagacagacgataatgagtcctcaggtggtgaggacaaactgtctttctattcaccagaggcattggctttctatcaagtgtacaagaagacaattactgactcttcaaaattcacccccgagatacaaatgcaatggtgtgaaacattactaacatatgcctttaatgaggatttcatatcgcaatataacataaacgcggagaagctcaaaagaagcttaaagcctgaggaaatgctcaaaaaccagaaagtcattttggaacattcattcaaggtgctcacaaaattaataactttaaaatggccacctgccatgtatttaatggggacgctgtattcacaccaaccctatttacctataaagaacaaaaacatcgttattaaaaatgatgaaaaggcgctggaatattattgtaaagctgcgaaattgaacaattcagatgcatgctaccgtgcaggtgtatgctttgaataccaaaggggcacctcttctttggatccatcaccgaccaaagaacaatgcataaaaagggccttccaatactaccagcatggcgcagaagtttgttcaaattctgcgtgtatgtataaattagggatgagccatttatacggtctgaacatgcaaaagactgatgtattgttagctattaaatggtttgacaaagctgcccaaaagggtgactctccacaaacattatatgagttaggtaaaatatatgaattcagtgttttgccgccagaaatccagaacctattatttgcgaacggcatacgaaaagactctcaactggcaataaaatactaccaacaatgtgccaaagattttgagtactctttagcgcaatggaaattaggaaattgttatgagtttggagacctagggttgccagtgtggccaaaaaatccatatattggtattccaaagctgctgctgctcaac

SEQ ID NO: 79406 - DNA, 546 bp, Saccharomyces pastorianus
atgacctctcctcctcccgtttttaacaaacctcccactggcccccctccgattagcatgaagaagagaagcaacaagttagctagtatagaacaaaacccatctcaaggtgctacttatcctccaaccctttccagctcggcctctccattgcagccttctcaaccgccaactttggcttctcaggttaatacctccgctgagaatgtcagccatgaaattccagctgatcaacaacccattgtcgacttcttgaaagaagaactggctcgcgtaacaccattgaccccaaaggagtactccaaacaattaaaggattgtgataaacgattaaagattcttttctaccatttggaaaagcaggatttattaacccaaccaacaatcgattgtttacatgacctcgtcgcattaatgaaggaaaagaaatacaaagaagctatggtcatccatgctaatatcgctacaaaccatgctcaagagggtggtaactggctgacaggagtgaagaggttgattggcatagctgaagcgactttgaattaa

SEQ ID NO: 79407 - DNA, 2826 bp, Saccharomyces pastorianus
atggtcaaacttgctgagttttctcgaacagccacgtttgcgtggtcacatgataaaattccattattggtctctggtaccgtatctggtacggtggatgctaatttctccactgattcatctctagaattgtggtcattgttggctgctgattcggagaagcctattgcttccttgcaagtggattccaaattcaatgatttggattggtctcataataacaagattattgctggtgctctggataacggtagtttggaattgtactccaccaatgaagcaaacaacgctatcaactccatggccagatttagcaaccattcttcctctgtgaagacggtaaagtttaacgcaaagcaagacaacgttcttgcttcgggtggtaacaacggtgaaatttttatttgggacatgaataaatgcactgaatcgccctccaattatactccattgacaccgggtcaatcgatgtcgtccgttgacgaggtcatttccctagcatggaaccaatctttggcccatgtttttgcatctgccgggtcgtctaatttcgcatctatttgggatttgaaggctaagaaggaagtcattcatctaagttacacttcacctaattcaggtatcaagcaacagctgtccgttgttgaatggcacccaaaaaactccacaagagtggcaacggctactggtagcgataatgatccatctatcctgatctgggacttaagaaacgccaacacaccattgcagactttaaatcaaggccatcaaaagggtattttgtcactagattggtgtcatcaggacgaacatctattattgtccagtggtagagataataccgttctcctatggaaccctgagtcagccgaacaactgtcccaattcccagctcgtggaaactggtgttttaagaccaaatttgcaccagaggctccagacctatttgcttgtgcctcctttgataacaaaattgaggtacagactttgcaaaatctcacaaacactttggatgagcaagaaaccgaaactaagcagcaagaatctgaaacagatttttggaataatgtttctcgagaggaatcaaaagagaagccaactgttttccatttacaagccccaacttggtatggggaaccatctcccgcagctcgttgggctttcggtggtaaattggttcaaattactccagatggtaaaggtgtatctataacaaacccaaaaatttcaggcttagaatcaaacactactttgagtgaagcgttgaaaactaaggatttcaaaccattaataaatcaaagactggtcaaagttattgatgacgttaatgaagaagattggaatttattggaaaagttatcaatggacggtactgaggagttcttgaaagaggctcttgcatttgacaacgatgaatcagatgcacaagacgatgccaacaatgagaaagaagacgatggggaagaattctttcaacaaattgaaaccaatttccaacccgagggcgatttctccttgtctggtaatatcgaacaaactatttccaagaacttggtttctggcaacattaagagcgctgtgaaaaattctctagagaatgacttactaatggaggccatggtgatcgcattagattcaaataacgaaagattaaaggaaagtgtcaagaatgcctattttgcgaagtatggatctaaatcatcgctctcaaggatactatactccatttctaagagggaagtagatgatttggttgaaaatttggatgtctctcagtggaagtttatctctaaagcaattcaaaacttatatccaaatgatatcgcccagaggaatgaaatgttgattaaattgggagacaggttaaaggaaaatggtcatagacaagattctttgactttgtacttggctgccggatcattagataaggtggcttcaatttggttatcagaatttccagatttggaggataaattgaagaaagataataagacaatttatgaagctcattccgaatgtctaactgagttcattgaaagattcaccgtattttccaacttcattaatggaaactctaccattaataatgagcaattaattgccaaatttttggaatttatcaatttaactacttccacaggaaattttgaactagccactgaattcttaaatagtttaccaagtgacaatgaagaggttaaaacagaaaaggcacgtgtcttgattgcttccggcaaatcattaccggcacaaaatcctgtgacagcgacgaccagcaaagccaagtatacaaacgccaagacaaataagaacgttcctgtactaccaactcctggaatgccttctactacttctattcctagtatgcaggcaccattttatggtatgacaccaggcgcctctgcaaatgctctacctccaaagccgtacgttccagcaaccaccactagtgctcctgttcatacagaaggtaaatatgcgccaccaagccaaccttcgatggcgtcaccttttgttaacaaaacaaatagctcgaccagattgaattcttttgctcctccgcctaacccatatgccactgcaacagttcctgcaacgaacgtatctacaacgtcgattcagcaaaacgcttttgctcctatacaacctggtatgcctattatgggcgactataatgctcaatctagctctattccttcacaacctccaattaatgctgtatcgggtcaaacgccacatctcaaccgtaaagccaatgatggttggaatgatttgcctttgaaggtcaaagaaaaaccatctcggtgccaaggctgtatctgttga

SEQ ID NO: 79408 - DNA, 759 bp, Saccharomyces pastorianus
atgaaactaagaatattcagtatcatctacaaccatgcatatacaccacagttgattagacaggacgttattcctctgaaaaaaattcctaaaaggttggccgctatcttggaagtcaagccagttggcgacgttggcggcggtgtgacaggtttattaaatgacgcgagtgaaattgtttgctggactgtttcagctggtataaaacatttgatgttgtacgattacgatggaatattacaaagaaatgttccagagctgagaatggaaattcattccaacctggccaaatattttgggccagctcatgttccaaactacgctgttaaaatacctcattctaacaagatattctacaatctagacggaattgaaaccgagactgatgtaggcaatgagatagaagctaaccaagaaaaggacaaaattgctattgaaatttctttattgtctaacagagatggtagagaaacgattgtcgatctgaccaaaactatggctgagttatgtgcggttaacgaattgagtgtttctgacatcacaatggatttagttgattcagaattgaaacaactagttggacccgaaccagatttactgttatacttcgggccttcgttggatttacaagggttcccaccttggcatattagattaaccgaattttattgggaaaaagataacaacgaagtcatatattcggttttcatccgcggcctaagacagtacgcaggatgtaaagtgaatgttggtaaatga

SEQ ID NO: 79409 - DNA, 288 bp, Saccharomyces pastorianus
atgcccacgatgatcaaaaaggatgataaagcaatggagccccctaatgaaaaaccgcatagaaagatcgaaagagatgatgtcccagaatcttccaatcacatcccacctccagaatctggtgtcttaaagggcggtaaagttaattcaaaaaccagagctttaaaggccgttacaagtatcattgcagacgccgatgagaaccctcagaagaaagtgaacaatgagacgaatggagtccaaaagcaaaagacagaagatttgagtaaaagaataggtaaattttga

SEQ ID NO: 79410 - DNA, 495 bp, Saccharomyces pastorianus
atgcgtattcttatggttggtcttgatggtgctggtaagaccaccgttttgtacaagttgaaattgggtgaagttatcactaccattccaacaattggtttcaacgttgagactgtccaatataagaacatttcattcactgtctgggatgtcggtggacaagacagaattagatctctatggagacactactacagaaacactgaaggtgttatctttgttgtcgattctaacgatagatcgcgtattggtgaagctagagaagttatgcaaagaatgttgaacgaagatgaattgagaaacgccgcttggttggtgttcgctaacaagcaagatttgccagaagccatgtctgctgctgaaatcactgaaaaactaggtttacattctattagaaaccgtccatggtttatccaagccacgtgtgctacctccggtgaaggtttgtatgaaggtttggaatggttaagtaacagtttgaaaaactcaacttaa

SEQ ID NO: 79411 - DNA, 108 bp, Saccharomyces pastorianus
atgcctttaaaactagaggatgtaacacctaatgaagagttaaggcaaaagattctttgtttcaaaaaacaaaaaaaggaagaagcaaaacataaagcaagcgagtga

SEQ ID NO: 79412 - DNA, 2523 bp, Saccharomyces pastorianus
atgaccgccatagaagatattttacaaatcaccaccgatccttccgatacccgtggctactctctattgaagtccgaggaagtgcctcaaggctcaactcttggagttgattttattgatacgctactattatatcaactcaccgagaatgagaagttggataaaccgtttgaatatttgaacaattgctttcgccgtaatcagcaacaaaaaagaatcaccaaaaacaagccaaatgctgagtcattacattccactttccaagagattgatcgtcttgtcattggctatggtgtcgttgccttacaaatagaaaacttttgcatgaatggtgctttcatcaattatatcactggaattgtttctaacgttaactcatatactgatttcctttcccaaatcattcaaagagccatattagaaggtaccgctttggatttacttaacgctgttttcccgacattattagaatactgtaataaacatgtcagccactttgatttaaacgaatctgtaatttacaataacgttcttaccatttttgagttatttgttacatttaaacctattgcagaaatattcactaaaatagatggtttttttgcagactatagctgtaaaccacaggattttgaaaggaaaacgatattggggcctattttatctctttctcccatagaagctgctgtggcaatccggaactacggcgataaccttttgcgttccaaacaacagacagccatgatccatgaatctctacaagctgagcataaagttgtcatagatagactcttttttattgtcgataagcttgttcgtggctccttaaactcaaggactgatatgattagttattttgcccatatcgctaataaaaaccatttacgtagagccgatcatccaccattcaaagaactatcctctaacggatttatgtccaatatcactttgttattggttagattttctcaaccatttctagatatttcatataagaaaatcgacaagatcgacgcaaattacttcaacaacccaagtttatttattgatttatcaggggaaacacgattaaattctgattttaaagaggcagatgcattttatgacaagaacagaaaaacagcagattctaagccaaacttcatctctgattgctttttcttgacattaacctatttgcattatggtctgggaggtacattatcatttgaagagaagatgggatctgaaatcaaagcgttaaaggaagaaattgaaaaagtaaagaaaatagctgcgaaccacgatgtctttgccagattcattacagcacaattatccaagatggagaaggcgttgaaaacaacagaatctttgcgatttgctcttcaagggttcttcgctcatagatctcttcaactagaggttttcgactttatttgtggtgcatctacgttcttgattcgtgttgtggatcctgaacacgaatttccgtttaaacaaattaaattgccattaattccggaccaaataggtgttgaaaacgtggacaacgctgattttttgagagcgcatgctccagtgccttttaaatactatccagaatttgttgtagaaggtccagttaactattctctatacatttcgaagtaccagacctctccaatcttcagaaatccacgtctgggatcgtttgttgagtttacaacaatggtcctccgttgtcctgaattggtttccaacccacatttaaaaggtaaattagtgcagttattaagcgttggtgctatgcctctaacagacaattcccccggattcatgatggatatattcgaacacgacgaattagttaacaagaatctgttatatgctctactagacttttatgttattgttgaaaaaacaggctcttcttcacaattttacgataaattcaacagcagatatagcatatcaataattttggaggagctttattacaagataccatcttataaaaaccaattgatctggcagtctcaaaacaatgctgacttttttgtgaggttcgttgctcgtatgttgaatgacttgactttcctgttggatgaaggcctaagtaatttggctgaggtgcataatatccaaaatgagctggataatcgtgcaaggggcgcgccaccaacaagagaggaagaggacaaagaactacaaacaagattggcgtctgcttccaggcaagctaagtcctcgtgtggattggccgataaatcgatgaaactgttcgaaatctattcgaaggatataccggctgcatttgtcacaccagaaatcgtatatagactggcaagtatgctaaactataacttagagtcacttgtcggtcccaaatgcggggaactaaaagtgaaagacccacaaagttattcattcaacccaaaagatttgttgaaagccttaacaactgtttatatcaatctttccgagcaatcagagttcatcagtgctgtcgctaaagatgaaagatcatctactagaaatctcttcgttcgcgcagttgatatt

SEQ ID NO: 79413 - DNA, 984 bp, Saccharomyces pastorianus
atggcagaagtcttgatggaattcccagagttatatactgaaatgagcggtactaaagaaccaattatgaagcgtactactttggtcgctaatacatccaacatgccggttgcagccagagaagcttctatttacactggtatcactcttgcagaatacttcagagatcaaggtaaaaatgtttctatgattgcagactcttcttcaagatgggctgaagctttgagagaaatttctggtcgtttgggtgaaatgcctgctgatcaaggtttcccagcttatttgggtgctaagttggcctccttttacgaaagagccggtaaagctgttgctttaggttccccagatcgtactggttccgtttccatcgttgctgccgtttcgccagccggtggtgatttctcagatcctgttaccactgctacattgggtatcactcaagtcttttggggtttagacaagaaattggctcaaagaaagcatttcccatctatcaacacatctgtttcttactccaaatacactaatgtcttgaacaagttttatgattccaattaccctgaatttcctgttttaagagatcgtatgaaggaaattctatcaaacgctgaagaattagaacaagttgttcaattagttggtaaatcggccttgtctgatagtgataagattactttggatgttgccactttaatcaaggaagatttcttgcaacaaaatggttactccacttatgatgctttctgtccaatttggaagacatttgatatgatgagagccttcatctcgtatcatgacgaagctcaaaaagctgttgctaatggtgccaactggtcaaaactagctgactctactggtgacgttaagcatgccgtttcttcatctaaattttttgaaccaagcaggggtgaaaaggaagtccatggcgaattcgaaaaattgttgagcactatgcaagaaagatttgctgaatctaccgattaa

SEQ ID NO: 79414 - DNA, 702 bp, Saccharomyces pastorianus
atgcaaaaaagtaagtttcatctcaccattgaaggtccaaaagtacttgcttatttacttggtttatggattggtgatggattgtctgacagggcaactttttcggttgattccagggatacttctttgatggaacgtgttactgaatacgctgaaaagttgaatttgtgcgccgagtataaggacagaaaagaaccacaagttgctaaaactgttaatttgtactctaaagttgtcagaggcaatggtgttcgcaataatcttaatactgaaaatccattatgggacgctattattggcttaggattcttgaaggacggtgtcaagaatattccttctttcttgtctacggacaatattggtacccgtgaaacattccttgctggtctaattgattctgatggctacgttactgatgagcatggtattaaagcaacaataaagacaattcatacttctgtcagagacggattggtctctcttgctcgttctttaggcttagtggcctctgtcaacgcagaacctgctaaggttgacatgaatggcaccaaacataaaatcagctatgctatttatatgtctggtggagatgttttgcttaacgttctttctaagtgtgccggctctaaaaaattcaggcctgctcccgtcgctacttttgtacgtgagtgccaggattttatttcgagttacaagaattaa

SEQ ID NO: 79415 - DNA, 1488 bp, Saccharomyces pastorianus
atgttcaaaccaaattcacaggactatttcaggacctttcttttggggcttttttcaccatttctttattatttcctgaagacctttctattcaatataaatcaaaggtttttaatattgaacctgatagtggattttcctatcaacgacatctttatgcttttgatactgattggtttagcgtaccctcaggtgcaagatcacgaaggcggtacgatcaagcataaggaatgttcttggcacatcattccaagacaagcctatatctttggtatatcatgggccctgggtgaattcaccatatgcataatagggaatttgtttaactaccaagaaatcgccgatccaaacattaatagtggcttcacacaccaggaaagcgccaacacttactgtaacaataatgacatgagccataacgatgactgcggttgtagtacagaatatcgccccaacgtcgtagagagaagtgatattacgttgtccaaatgtattgaagtaagaaatgactcatcttccatatcgaataacgtatactcgtctgagtaccatccaatcaaacctctacgttcatcgtcatcaacttatggcagcatacgacagcaacctcatgaaaataagaagcagctgcatgtaccagataattcgcaggacgatacaattatcatgatgaaccccatcgacaattcattaaagttgacaactctagatacgggtgatttgagtttccccatagacgaagaacagcccattttgaagaaatcttttggttatacatgggcagttcctaatgaaaatacacaaaatactactaaaagcttcacaccgataaagagatttattgcatttagcacggcataccagttggtcaccggtttattgttaatggtattggtagttggtagtaatatcatgttgacaattggggaatcattaattctgtcgatgtatttcgtctatgttcgcggccatgaaggattatttactcccgtggtaaactacttcggctcaagaaccatttcaaatttcatcttatgcgtaataattcctttcatatctctaaacttcctcatcaacacttcgatatatttaagaagagagctagatgattggtttaataattcacagggggagtttgaggacgacgacgaaaatactatcagtaagagagtagctacaaatcaagagtaccaacatccactgagtgctaattacatttcgatggatagtcctgatgtaataaatagcagcccgggtcacttcgggatgaattcaggccagttgttaggtaatacgacgttatattatggtagtttaaatggggatgatgatgatatgaccaacgactccgctttactaagattctgcaagaagctagtcaaaaattggagggctttggcaagaaatgattcttttgtacttggtgtaatggtttcttggagtcttcttgtttttgtaacgggaatactttcaacagtttatatatag

SEQ ID NO: 79416 - DNA, 156 bp, Saccharomyces pastorianus
atggtccgattaaatcatgcagcatcatattttatgcctattttctgctccacaaggcctcacatagtgatactttctgcgctgttagtatttcactgttttcactattctatgcgtcgtccgaattactgctacaccagtatgatgatccattga

SEQ ID NO: 79417 - DNA, 66 bp, Saccharomyces pastorianus
atgatgaaggatttgaaggttcattatgatcctaatggaattttaaacccttacaaatacatttga

SEQ ID NO: 79418 - DNA, 117 bp, Saccharomyces pastorianus
tttgtcgacaaacttgctctaatcgattatgacggtttaaatgcacaaaaaagaaggttagattacgatgaaaaggacctttatacattcattgtgaaaaaggtaaaaagagactaa

SEQ ID NO: 79419 - DNA, 1953 bp, Saccharomyces pastorianus
atggctactggcaggattcaatttgctgtttctactccctgcaatactaagggtaaaccgtctggttataggttatttgaatttaaaaacgatcgattagcactggtcccatcagaaagaggttgtacaaaagtagatgtgaatgcaaatatacaagcgttttgttatttaaggcctaatggtagagacacgtcaatatctccagacgcaacgcatattttggactcatgtgattacatggtgctggctaaatccaacggattcattgaaatcataagcaactatcaatacaagataaaaaatggcctgcgattagcgccctcttatatccttagatgtactccggaagatttcgaatccaatttttttagtgactatatgatcgctggtcttgaatatagtcaaggtttattatattgttgtatgtgctccggtcgaatatatgtctttgtaatgaaccttcccactgattacattcagtataagaacatgtacaaccccatgttcccagattgctttttcaaagtacatcacgataataatacaacacattcttcagaggaagaaaaattatttgaaggtagtacgcggtacactggaaggtcacgctctaagcatatctgctacttccttttgcctatagaaccgtcccatttaaggtcgtcgcccgttgtatcttcgttttgcaatatgtatcaaggcctgcccatatataggccttcgatgtatctacatatagaacgaggtatttcaacattccatataaatccattagaccggtttcgtttcatgacagtatcgccacgatcaccactatttataaggaaaataattttaccattgacttatgttacatttttaagcacctttatcagcctaaagaacagtatacagggagatacatgcggtgagatactttcgtgggacaacgtagcgcaacaaaatggatttggttctttgttcagctggattagtaacaagtttacattcgatacggatattataaattcaaccatttgggatgatattgtaaaatattctggaacaggaatgctggattcaggaatcgtctggaaacagcgtcaaggtcacgctaaagatgacatatatgagttattccacactcaagatatgctgggaagtagtcgccgaaattcttcattcagtactgctagcagcgaaccgagaccgctgagtcgaagaaggagagaatcttttcaagccttaactagagacgcttttagagaaagaatggatgtaccctgttcaacgaagtgggaattagattcttttatccgaggattaagaaggaatacattcatggtagattttgaaattgttgaaaagatttctcatagaaatggaaatgatggggtgaatgaagatgataacactacagatgaaagtgatgaaacaatgacttcttttctaacagataattacaaaaagatggacattgtgtgcatcgatcatttcgtcacgttgagtgcattccgacctcggtactatgatgaaccaataattaaaatcgattcattatcgaacaaaaatggctccgaaaatggaactaatgaagaagagtgggcagaaagtcaaatgaaggtggatggccaagtgatagatgatgagacagctcaattcaagcaggcattgggaaatttatgttcattcaagaaattatttatgctggatgattctttatgctttatattggacacacatggagttttgttgataaatagatttgaaataaaaaataccaaaaatttgttaaggaattccaaggatactattcggataataccgcatgatttcggattgattaatgatacaattgttataattaatgatatagacgtaggcacagacaatgtttgcgcccttacgtttcacttggtggtaacatcaatggcggagagatactgtcttaaggcaattttcaaactgcggtaa

SEQ ID NO: 79420 - DNA, 408 bp, Saccharomyces pastorianus
atgaacagaaattcggacgaaaatgaagactatcaatttagtgagtccatatacgatgaggatccactaccgagaccttcccataaaagacattcacaaaacgatcactctcatagtggcagaaataaacgtagagcatcgaacttccatcctcctccttatcaaaagtctaatgtcattcaaccaactataaggggcgagacgctgtcactcaataataatattagtaaaaattcacggtatcaaaatacaaaagtaaacgtctcgtcgatatcggagaatatgtatggctccagatataacccttctacttatgttgataataacagcatttccaactcttccaattacagaaactacaattcttatcaaccatataggagtggtaccttggggaaaagaagataa

SEQ ID NO: 79421 - DNA, 351 bp, Saccharomyces pastorianus
atggttgatagtgtcctgcttgactttggagaaattatgtttccagcgccacctcttccaatagcaaatttttccggtgcgcttttgcccttgagcttatttttaggcttcttgaacgtggacttgatagccgccaaagcattgccattggaagtcaccacaaacaggttgtcctcgtttgcattgatagtatcctcatcctcgatattgccgcctcgtatctcatcctcttcatttccaccattgctggccaccttttttttgttgaagaaaatgtttcctgccccacctctaccaacgacaattggggcgttgttgttcggagacgaagtggtggcatgcaaagactga

SEQ ID NO: 79422 - DNA, 171 bp, Saccharomyces pastorianus
atggaatttatgtcaccaccgttatcgatggcaacaaagtcaatgaaggagggagatgggaatggtagctcgtttaacgagttcaaaagtgacaaagctaacgttaatttttccaatgttggtgataatagcgctttcggtaatggttttaatagttcggtacgttggtag

SEQ ID NO: 79423 - DNA, 1482 bp, Saccharomyces pastorianus
atgcactatgtggtactagagctgcaagttgcgcatttgccagatacccccaaggatcaatgtcgcattgcgaatatagcatttcaaattgtgaatgctgaaacattagtatgccattatgggaccaattctttaccgagcattgaagtaaacgggacgacaaagagtttggagagtgcaatggtgcaattggacaaggatattcatgacgttattggtaacgacgactttgttcttgtttccctgtattcaacatggcatatccgtgttaccttaccacgtcaagcgagagatgatgggtttattcttacttcttatttacaacatccgaaagtatttgacttatggaaggaattcgatagatggtgtgtcaaccatccggagattttgggacaaaagaaagcaatctccaacaacaattgtaatactaaaagtattagtattaatgcagccaaaaatacgaaggatttggacgaaatagttagaatattggaagtttcaatcccaactgaagaggcaggctctgttccagagatatactctcttttaaaaaggacaacggatatattaatacaattgcacaagaagtgtacttcccctgaagatatggaatctgtcttaacaaaaccatatgactcacacaccgatattagagcttttttgcaagagaaatctaagattttgtacatgaacaatttaccgcccgacacaactcaaagtgagttggaatcatggtttacccaatatggtgttagaccagttgggttttggactgtcaaaaacatcgtagaagatacgtctaacgttaataataactggagtctaaataacagtccctatgtggaagatcaagatagtatctcaggatttgttgtcttccaaacacatgaagaagcaactgaagtactagcgttgaatgggagatcaatcctatctaatctggcaaacactaagcaaccaagggtggtggaacatgtccttgagcttcaaccttcttccaccggagtactcgataaggcacaagaaattttatcgcctttccctcaaagtaaaaacaaaccaagaccaggtgactggaattgcccatcttgtggtttttcaaactttcaaagacgtactgcatgttttagatgttcttttccggcaccatcaaatagtcaaatacatactgcgaactcaaacaataatgttaacagtagtagaaataatttaaacaatcgcgtgaactcgggatcttcaagcaatattagtaacactgcagcgaatcacccctatggtgcccctgagttcaacatgattgctaacaacacgccagcagctttaacatacaatagagctcattttcctgcaattacgccattgtcgcgacaaaattcattgaacatggcaccatcgaacagtgggtcgccgataattatagcggatcatttctcgggaaataataatatagccccaattatcttatataataatattacataa

SEQ ID NO: 79424 - DNA, 258 bp, Saccharomyces pastorianus
atgctgcaggtcgtggtgatgtatctaaagaagcgttataaaatcctcagccaaaatgaaggtggtaatgatatgaaaattgccgatgaagtagtaccaatgatacagaaatatttggatatattcattgatgaggcggtgctgcggtccttgcaatctcacaaggacattaacggagaacgtggcgataaaagtcccttagagttatcgcatcaagatttagagcgtatcgtagggcttcttctgatggatatgtaa

SEQ ID NO: 79425 - DNA, 234 bp, Saccharomyces pastorianus
atgaatatagttttgagaaagggatgtgaaaaaaagtgcaatatgttcctaactaatgttatcgcatgcattcaatgggttgatctttccgattgtttcttttctaacttggcacggtccaaggcttctcttttaattctcttgtcttcctttattttagattttatttttctacaccaatgtctaaatttatcatctttagacggtgatacgtatttcattataagatcatga

SEQ ID NO: 79426 - DNA, 102 bp, Saccharomyces pastorianus
atgccatcaggtgtatcgttatgcccacctaggggaaactctccagttaccagctcgatgatcattaagcccaatgaccaaacgtcccctttgatagaataa

SEQ ID NO: 79427 - DNA, 132 bp, Saccharomyces pastorianus
atggatattggcaaaggtgccgaaaccacatttttacaagatgttatagcattaagtatcgctgatgatgcatcctcagcggaacttctaggccgtgtggacggtaaaatagtagtcacacctcaaatctaa

SEQ ID NO: 79428 - DNA, 861 bp, Saccharomyces pastorianus
atgagccagttcctggaacaaatcaagtttaattctttaaagaggatagcttttggcgctgtcttggtaaggattgtttcacaatatcaacgcatttccaaacggtacataccggaggtggtttacttctttcaaaaaatattactcacttttatagttgagaaagaaaatcaagaaaaaccattagattttgaaaatattagactagactcttacgagttggggcttccattggacgttaactttacaaaaaagagatcaactattattccattacataccttgtcaacaatggataccgaggcacatccggttgatcaatgtgtctccgttttactaaatgttatggaatctttagatgcaactatctctactgtgtggaagagcttacctgctttcaatgaaattattttaccgattcagcagttattaagtgcatacacctcaaagtattctgattttgaaaagccaagaaatattttgaacaaagttgaaaaattaacgaaattcacagaacatattccgttggctttacagaaccacaaacccgtatccatacctacgcatgctcctaaatacgaagaaaacttcaatcctgataaaaaatcgtacgatcctgatagaaaaagaagtgagataaataagatgaaggcccaactaaagaaggaacgtaaattcactatgaaagaaatccgtaaagacgccaaatttgaagctagacaaagaattgaagaaaagaacaaggagagcagcgactaccatgcaaagatggctcatattgttaacactattaataccgaagaaggtgcggaaaaaaacaagtatgaaagagaaagaaaactacgtggcggaaagaaataa

SEQ ID NO: 79429 - DNA, 1053 bp, Saccharomyces pastorianus
atgatacaaaaggttatggaatatttgaaaagctcgaaatctttggatttaaacaccagaattagtgtcattgaaactatcagggtggttacagagaacaaaatatttgtagaagtggaaagagctagggtcaccaaagatttggtagaaattaagaaagaagagggtaagattgatgaagctgcagacatcttgtgtgagttacaggttgagacctatggctccatggaaatgtctgagaaaattcagtttatattagagcaaatggaattgagtatattaaaaggtgattattcccaagccacggtgctttcaagaaaaattctgaaaaaaacttttaaaaatccaaaatacgagtcattgaagctagaatattataatcttctggtaaaaattagtttgcacaagagagaatacctagaagttgcgcagtatctgcaagaaatttatcaaacagacgccattaaatcagatgaggctaagtggaaacctgttttatcgcacattgtatatttcttagtcctttcaccttacggcaatttacaaaatgatttaattcacaaaatccagaatgataacaacctgaaaaaattagaaagccaagaatctttagtaaaattgtttactacgaatgagttgatgagatggccaattgttcaaaaaacctatgagcccgtcttaaatgaggatgatttggcatttggtggagaagctaataagcatcactgggaagatttacaaaaaagggtcatcgagcacaatttaagagtcatttccgaatactattccagaattactttactaagattgaatgaattgctggacctaacggagagccagacggaaacatacatcagtgatttggtaaaccagggcatcatatacgctaaagttaatcgcccagccaaaatcgtgaattttgaaaaaccaaaaaactcaagccaattattgaacgaatggtcacataatgttgacgaactattagaacatatagaaacaataggccatttaattacaaaagaggaaatcatgcacggtctgcaagctaaatga

SEQ ID NO: 79430 - DNA, 777 bp, Saccharomyces pastorianus
atggacgatatgttcaataacgcggagtttaaactgctgttggcgttgaacgaccaatatatgatgtttgccaaggagtacgacattgagaacaaggtctataagtatttgatcaatgggtctgtctcaagatgttttacggagctattattactgaaattcaatagggcatcggaccctccgttacaaattatgatgtgcaaaattatttatcttatcttgacaccaagaggagactactctccgatgaatttcttttatacaaacgacttacatgttcttatcgatgtattaatcagagaactacagaatatcagtgaggatgaagaggtattgagaaacacccttctaagggttctgattccgctattaaagaatacacaattatccaaaacacattatagaaaggatgatttgaataaactattaaactacttgtcgactttagataatatatgcgttgacagtccagcgttgcacgagcatcaagttacagtggccttatctcggaagtgtcttcaacaaattccttggttagagacaccttcaacgccttcagatggaggttcatcggtctctagtaataacactagtagaaactctagcattgttgcattggggacgcccgacaatcaaaatatcttggctcgtaaaggccatctttatagtaatcgtgaattagatgtttctgcagaatctttgactaaaagaaaggctaaagctccgcctccgcctcctcctcctcctccatcaagaaaatgtggaactccaaaataa

SEQ ID NO: 79431 - DNA, 468 bp, Saccharomyces pastorianus
atgatattagatccattatctccaaatattgaaaatcatactcaagatgaaataattgagttttgggaaaaaactgagtctattgctaacataccaaaggaaaacttggatgaatcccatgttaactcaagcctggttgcctacctgaagtttgctactgattcctataaggtttttattaatactgatcgtgacctctaccggatgtcgctaatactgttagaatcgtccttatttgaatttaaaaaagagttttgcctaagtaagttgcagtcgttactcaacatagacctactggaaatgaatatgaagttcattattgtttacattcttctctgtgaggcgaaaaaaaacgtgtactccttagaaatcatgctcaagttccaaggatttactgtgttttataataccttgtacacacaattcgcctatttgagcaaatacggaaaggaaaggacaagttgcctt

SEQ ID NO: 79432 - DNA, 537 bp, Saccharomyces pastorianus
atggtcgatgatgctgaagatgaaaaattagcacacaagatactggaaactgctagggagtatatattaggtttatccattgaattggaacgccgctcattaaaggagggaaatactgtacgcatgcttgagctagctgcatactttacaaaggcaaaactatccccaattcatcgtaccaatgctttacaagtggctatgtcccaacatttcaaacacaaaaatttcttacaggcctcatattttgccggtgaatttttaaagattatttcttctggtcctcgtgcagaacaagcacgtaaaatcaaaaacaaagccgactcaatggccagtgacgccattccaattgactttgatccttatgctaaattcgatatttgtgcagccacctacaaaccaatttatgaagatacaccttccgtttctgacccattaacaggtagtaaatacgttatcacggaaaaagataaaatagatagaattgctatgatttctaagatcggtgcacctgcatccggattaagaatacgtgtataa

SEQ ID NO: 79433 - DNA, 2934 bp, Saccharomyces pastorianus
atgaagatgttaactaaatttgaatcaaagtccactagggccaagggcattgccttccacccctccagaccttgggttttggtggctttgttttcctctactattcaattatgggattacaggatgggaacactacttcacagatttgaagaccacgagggccctgttcgtgggctagatttccatccaacccaaccgatttttgtttcggcaggtgacgactataccattaaagtttggtccttagatactaacaaatgtctatacaccttaactgggcatttggattatgtccgtaccgtgtttttccaccgtgagctgccttggatcatatctgcttctgatgaccagaccataagaatctggaactggcaaaaccgtaaggaaattgcatgtttgaccggccacaatcattttgtcatgtgtgctcaatttcatccaaccgatgacctgatcgtttccgcttctctggatgaaaccatcagaatttgggatatttccggtttaaggaaaagacactccgctcctggtactagttcatttgaggagcaaatgagtgcacaacaaaatctattggatggctctcttggtgactgtgttgtcaagtttattctagagggtcacacaagaggtgtcaactgggcctctttccatccaactttaccattgattgtctccggcagtgacgaccgtcaagttaaattatggagaatgagtgctacgaaagcttgggaagttgatacttgcagaggtcacactaacaatgttgatagtgttatctttcacccacatcaaaacttgatcatttctgtgggtgaagacaaaacgctaagggtttgggatcttgacaagagaactccagtaaagcaattcaaaagagaaaacgatagattttggttgattgcagcacatcctcatatcaatctatttggtgcagctcacgattctggtattatggttttcaagctcgatcgcgaaagaccatgcagctttatccatcaaaaccagttgttttttgtcaatgctgaaaagcaaatccaaagtttcaatttccagaaaagagtcgcttcattaccttatgcgtccttaaagggcattggtcaaccttgggatgcattcagaagtatatcgtacaatccctcccaacattcagttttggttaatgaagctaatggcaaatttgctctcgttattttaccaaaacaaccagttggagctgtggagccaacaagtgtcacccaagatacaggtaattttgctacttttgttggtcgtaatagatttgttgtttacaacaagaacactgaatctgttgaagttcgctccctcgaaaacaaagttacaagaaatatcaaagtagaggaaacagtaagaactattgtagctgcaggtcctggatctgttttggtcatacaccccagagaagttattctttatgatgtccaacagggcaaaaaagtatcccaattggctgttaaaaacgtcaagtacgtttcgtggtccttagatggtcaatatgttgcattgatgagtaagcacaccataactttggctaccaaaaagctagaattgattaattctatgcatgaaacgattagaatcaaaagtgccgcttgggatgaaactggtgtattaatttattcaactttaaatcatataaggtactcactattgaacggggatagaggtattatcaaaactttggagaaaactttatatatcacaaaagttcagggaaaattagtgtactgcttgaaccgtgaaggtgagattgaaattttaaccattgatcctacagaatatcgcttcaaaaaggccctggttaacaaaaatttcccagaagttttacgtctgataaaagattctaatttggttggccagaatatcatttcctatctgcagaagtcaggttacccagaaattgctttacaattcgttcaagacccacatatccgttttgatttagctttggaatacggtaatttggatgttgccttagatgaagccaaaaaactgaatgattctagtacttgggaaagattaatccaagaagccttggcacaaggtaatgccagcttagctgaaatgatttatcaaactcaacattcttttgacaaactttccttcctgtatttagttacaggtgacgttaacaaactatctaaaatgcaaaatatcgctcagactcgtgaagactttggaagtatgctattaaacaccttttacaacaattcaaccaaggaaagatctagcatttttgcagagggcggctctttaccattagcttatgccgtagcaaaggctaacggagatgaagcggctgcttctgctttcttggagcaagctgaagttgatgaacaagatgttactttaccagaccagatggatgcctccaacttcgttcaaagaccagtgatctcaaagccacttgaaaaatggccattaaaagaggctgaactatcttactttgaaaatgctgttttaggtcaaattgacgatttgactatagacgatgaaactccagcagtaaacaccactcaagagcaagaagaaccactaggcgaagaaaactttaacgatgaggatattggtgaagacgaaggtgcctgggatttgggtgacgaagatttggatgtgggagaagagttacctgaagaagttgagcaaggcgaaattacctctccagcacaggaagttgaaacagccatttggatcaagaattctaaactgcctgctgtcctagttgccgctggtgcctttgatgccgctgttcaagccttgagcaagcaagtgggtgtagtcaagctggaaccattgaagaaatattttaccaacatttatgagggttgtagaacatacattcctagtacgccctgtgaacttcctgctcaattaggttatgtcagagcgtatgatgataccgtaagtgaagat

SEQ ID NO: 79434 - DNA, 159 bp, Saccharomyces pastorianus
atgattactggtatcacggaagactacggtttactgattgcaaaagaattggtaagcggtagttccactcaatttacaggaaacgtttataatttacagccggacggtaacacttttgatatcttcaagagcttaattgctaaaaaggttcagagttaa

SEQ ID NO: 79435 - DNA, 1881 bp, Saccharomyces pastorianus
atgaatgtattagtctataatggcccagggactacgccaggatcagttaagcatgctgttgaaagtttacgtgactttttggaaccctattacgccgtcagtactgtcaatgttaaggtattacagacagaaccatggatgtcaaagacctccgctgtagtttttcctggtggtgccgatcttccttacgttcaagcttgtcaacccattatttctcgattgaaacattttgttagcaaacaaggtggtgtctttatcggattttgtgcaggaggttactttggcaccagccgtgtagaatttgctcaaggtgaccctacaatggaagtatcaggaagcagggatttgcgattctttccgggaacaagcagaggacctgcgtacaatggatttcagtataacagcgaggccggtgcacgtgcagttaaattgaatcttccagatggctcacagttctcaacttatttcaatggaggagccgtttttgttgatgcagataaatttgataatgtcgagatcttggccacgtacgcagaacacccggatgtgccttcttctgactcaggaaaaggtcaaagtgaaaacccagctgctgtagtgctatgtacggtcggaagaggaaaggttttactcactggaccacaccctgaattcaacgtccgttttatgaggaaatccacagataagcattttcttgaaaccgttgtggaaaacctgaaagcacaggaaatcatgaggttgaaatttatgagaacggttcttaccaaaactgggttgaattgtaataatgacttcaattatgtaagagctccaaatttgacaccactgtttatggctagtgcacctaataagcggaattacttgcaagaaatggaaaacaacttagctcatcatggaatgcatgcaaataatgttgaactctgctcagaattaaacgccgaaactgactctttccaattttatagaggctatagagcctcttacgatgcagcaagttcgtccttgcttcataaagagccagatgaggttcctaagaccgtaatatttcctggcgtagatgaagatattccaccatttcaatatacgcccaattttgacatgaaagaatacttcaagtatctgaatgttcaaaacaccataggttctttacttctatatggtgaagttgttacatcaacgagtaccatattgaataataataaatccttattaagttcgatccctgaaagcactttacttcacgtgggtactattcaggtttctgggcgtgggagaggtggtaacacttggattaatcctaaaggtgtttgcgcatcaacggccgtcgtaacaatgccgcttcaatcgcctgtgactaatcgaaatatatcagttgtttttgtccagtatctttctatgcttgcttactgtaaggcgatactttcgtacgctcctggattttcagatattcctgttaggatcaaatggcccaatgacctttatgctttgagccccacctactataagtgtaaaaacttgaaattggttaacaccggttttgagcatacaaagttgcccttaggtgatatcgagcccgcttatcttaagatctctggtttattagttaatacccacttcataaacaataaatattgtgtgctacttggctgtggtataaatttgactagtgatggtcctacaacttcattacaaacttggattgatatcctgaatgaagaacgccaacaattacaccttgatttattgccagcaataaaggcagaaaaactgcaggcactctatatgaataaccttgaggtcatattaaaacagtttattaactacggagctgcggaaatattgccaagtattatgagttgtggttacatagtaaccaaatag

SEQ ID NO: 79436 - DNA, 354 bp, Saccharomyces pastorianus
ccttcctactctcccacgtcgccaagcgacagccctacgtgtccttcttattctcctacatctccatcatactctcctacgtcaccaagttacagcccaacgtcaccaagttacagcccaacgtctccagcctattccccaacatcaccaagttatagtcctacatcgccttcatactctccaacatcaccatcctattccccaacatcaccttcttactctcccacctctccaaactatagccctacttcaccttcttactccccaacatctccaggctacagcccaggatctcctgcatattctccaaagcaagacgaacaaaagcataatgaaaatgaaaattccagatga

SEQ ID NO: 79437 - DNA, 4581 bp, Saccharomyces pastorianus
atgcactgtggtaagctattactggatgaacataatgaattaatgagacaagctctagcaatcaaagacagtaaaaaaaggtttgctgcaatttggactttatgtaaaacaaaaatggtctgcgaaacagatgtcccttctgaagatgatcctactcagctcgtatcaaggggaggttgtggtaatacacagcctacaattcgtaaggatgggttgaaattagttggtagttggaaaaaagatagagccacgggggatgcggatgaaccagaactaagagttttaagtacggaggaaatcttgaatatttttaagcatatctcagtaaaagacttcactagtttgggtttcaacgaagttttttctcgtccagaatggatgattttaacatgccttcctgtcccaccaccaccggtgcgtccatccatttccttcaatgaatctcaaagaggtgaggatgatttaacctttaaacttgctgatattttaaaagctaatattagtttggaaacactagagcataacggtgctccacatcatgctattgaagaagcagagagtttattacaatttcatgttgccacttatatggataatgatattgctggtcaaccacaagctcttcaaaagtccggccgtcccgttaaatctattcgtgctcgtttgaagggtaaagagggtcgtatcagaggtaatttaatgggtaagcgtgtggatttttcggcaagaactgttatttctggtgatcctaatttggaattagaccaagtcggtgttccaaaatctattgccaagactttaacatacccagaagtggtcacaccatataacatagatcgtctgacgcaacttgttaggaatggaccaaatgagcaccccggtgccaaatacgtcattcgtgatagcggagaccgtatagatttaagatacagtaaaagggcaggtgatattcaattacagtatgggtggaaagttgaacgtcatattatggacaatgatccagttttattcaaccgtcaaccttcgttgcacaaaatgtccatgatggcccacagagtaaaagttattccatattctacatttagattgaatttgtccgttacatctccatacaatgccgatttcgacggtgacgaaatgaatcttcacgttcctcagtctgaggaaacaagggcggaactttctcaattatgtgctgttcctctgcaaattgtttcaccacaatctaacaaaccttgtatgggtattgttcaagatactttgtgtggtattcgtaaactgacattaagagatacatttatagaacttgatcaagttttgaatatgctttattgggttccagattgggatggtgttattccgacacctgcaattatcaagcccaaacctttgtggtccggtaaacaaatcttgtctgtggctatcccaaacggtattcatttacaacgttttgatgagggcactactctgctttctccaaaggataatggtatgcttattattgacggtcaaatcatttttggtgtagtagagaaaaaaaccgttggttcctccaatggtggtttaattcatgttgttacgagagaaaagggacctcaagtttgtgctaagttgtttggtaacatacagaaagttgttaacttttggttactacataatgggttttcaacaggtattggtgataccattgcggacggcccaacaatgagggaaattacagagacaattgcagaggctaaaaagaaagttttggatgttacgaaagaagcccaggcaaacttattgactgctaaacatggtatgactctccgtgagtcttttgaggataacgttgttcggttcctaaatgaagcaagagataaggcaggtcgtttagctgaagtcaatttgaaagatttgaacaatgtgaaacaaatggttatggcaggttccaagggttcatttattaatatcgcgcaaatgtcagcttgtgtaggacagcaatctgttgaaggtaaacgtattgcttttgggttcgttgatcgtaccttacctcatttctctaaagatgattactccccagagtctaaaggttttgttgagaactcatatttgagaggtttgaccccacaagaattttttttccatgcaatgggtggtcgtgaaggtcttatcgataccgccgtcaaaacagccgaaacaggttatattcaacgtcgtttagtgaaagctctagaagatatcatggttcattacgataacaccacaagaaactcattgggtaacgttattcagtttatttatggtgaagatggtatggatgctgcgcatattgaaaagcaatcgctagatactattggtggctccgatgcagcttttgaaaagagatacagagttgatttattgaatacagaccatacccttgatccctcactattggaatccggatctgagatacttggcgatttgaaacttcaagttctcctggatgaagaatacaaacaattagtgaaagatcgtaaatttttgagggaagtttttgttgatggtgaagcaaactggccattaccagtcaacataagacgtattattcaaaatgctcaacaaactttccacatagatcatacgaaaccatctgatttaacaatcaaagacatcgttcttggtgtaaaggatttgcaagaaaacttattagtgttgcgtggtaagaatgaaattatacaaaatgcccagcgagatgcagttacattgttctgctgtttattacgttcccgtttggccacacgtagagttctacaagagtacagactaacaaaacaggcattcgattgggtattaagtaatatcgaggcacaattcctccgttctgttgttcaccctggtgaaatggttggtgttctagcagcccaatccattggtgaaccagccacacaaatgacccttaacaccttccattttgctggtgttgcttccaaaaaagttacttctggtgtcccccgtttaaaggaaattttgaatgtggccaaaaacatgaaaaccccttccttgactgtatacttagagcctggtcatgctgccgatcaagaacaagcgaagttgatcagatctgctatcgagcataccactttaaagagtgtcactattgcttcagaaatttactatgatcctgatccacgttccacagttattccagaagatgaagaaattatccaacttcatttctcattattggatgaagaggctgaacaatcttttgaccaacaatcaccttggttattacgtctggaactggatcgtgcagcaatgaatgataaagacttaacaatgggtcaggttggtgaaagaatcaagcaaacattcaaaaatgatttgtttgttatctggtctgaagacaacgatgagaagttgatcatccgttgtcgtgttgttcgtccaaagtcactagatgctgagactgaagcagaagaagatcatatgttgaagaaaattgagaacacaatgttagagaatattacattacgtggtgtagagaacatcgagcgtgttgtcatgatgaaatatgaccgtaaagtaccaagtccaactggtgaatacgttaaggaacctgaatgggtgttggaaacagatggtgttaacttatctgaagttatgactgttcctggtatcgacccaaccagaatctataccaactccttcattgatataatggaagttctaggtattgaagctggtcgtgcagccttgtataaagaagtttacaatgttattgcttctgatggttcgtatgttaactaccgtcatatggctttgttagtcgatgttatgacaacccaaggtggcttaacttctgttactcgtcatggtttcaacagatcaaatacaggtgccttaatgagatgttcatttgaagaaactgtcgaaattttgtttgaagctggtgcttcagccgaattagatgattgtcgtggcgtttcggaaaatgtcattcttggtcaaatggctccaatcggtaccggtgcatttgatgtgatgatcgatgaggagtcactggtaaaatacatgccagaacaaaaaataactgagattgaagacggacaagatggtggcgtcacaccatacagtaacgaaagtggtttggtcaatgcagatcttgacgttaaagatgagctaatgttttcacctctggttgattcgggttcaaatgacgctatggctggaggatttacagcgtacggtggtgctgattatggtgaagccacgtctccatttggtgcttatggtgaagcacctacatctcccggatttggagtctcctcaccaggcttttctccaacttccccaacatactctcctacctctccagcgtactcaccaacatcaccatcgtactcaccaacatcaccatcgtactcacctacatcaccatcgtattcaccaacgtcaccatcatattcgccaacgtcaccatcatattcgccaacgtcgccatcgtattctccaacgtcaccatcgtattcgccaacgtcgccttcctactctcccacgtcgccaagtctacagccctacgtctccttcttattctctacatctccatcatactct

SEQ ID NO: 79438 - DNA, 378 bp, Saccharomyces pastorianus
atggccatctgcgttaacgccgtggcgattgcgtatattatttacattgcacacgatgaatttgctggtaaacctgttggtttgaggaatccgttaagcaaactgaaactaattttgttggacttactttttataattttttcaagcgctaatctagcgctggcatttaatactcgtttcgacaaagagtgggtttgcacttctattcgcaggtcaaatggaagcacgtatggatacccaaaaataccgcgtatctgcagaaaacaggaagctttatccgcttttctgttcgttgccttgtttatgtgggtaatcactttctcgatcagtattgttagagtagtcgaaaaagtcagttcaattaccaacagaaactga

SEQ ID NO: 79439 - DNA, 294 bp, Saccharomyces pastorianus
ggttcaccactagactatccaaaattaaatacttacacgtttgtgcctaccacagtgccgccttatgttttagaggcgcagtttgataaattaagacttcaggataagggcaccgttgatggaaatgttacagatgataaaaatcttccaaaagagtttaaatggggccagtttgcatctaccatcggctgtcattctgcatacactagagaccaaaactacaatcctagtcacaaatcctacgatggttactctctagtcatcatctaccgcatcaaaaaatgcggctcttag

SEQ ID NO: 79440 - DNA, 861 bp, Saccharomyces pastorianus
atgctaggtagtcttctttctaatttgctgttagtgcttggattctgcttcatattcggtggatacaatagagtccaacagacattcaaccaaaccgccgctcaaacgatgtcctcattacttgccattgcgtgtgcatccctactaattcccgctgcctttagagccaccttacctcatggcaaggaagaccacttcatcgatggaaaaatattggagttatccagaggcacctctattgttattctcatcgtttacgttttgttcttatatttccagctagggagccatcacgccttgtttgagcaacaagaagaagagaccgatgaagttatgagcaccatttccaggaatccacatcactctttgagtgtcaagtcatcattggtgatacttctaggtacaactgtgatcatctctttttgtgcggattttctagtcggtacgatagacaacgttgttgaatctaccgggctatctaaaacatttataggtttgattgtcattcctattgtgggtaatgcagcagagcatgtcacttcagtcttggtggccatgaaggataagatggatctggcgctaggtgttgccatcggttcctctttacaaattgccttatttgttacaccattcatggttcttgtgggctggatgatcgatgttccaatgacgctaaatttctccacttttgaaaccgctactctttttattgctgttttcttatccaattacttaattctcgatggtgagtcaaactggttggagggtgtcatgtctctagctatgtatattttgattgcaatggcatttttctattatccagacgaaaaaaccattgactctattggaaatagtttatga

SEQ ID NO: 79441 - DNA, 291 bp, Saccharomyces pastorianus
atggatgcaactaccccactattaactgttgcgaacagtcatcccgcccgcaatccaaagcacactgcatggagagcagctgtgtatgatttacagtatattttgaaagcgtcacccctgaattttctattagtatttgttcctttaggtctgatttggggacacttccaactatctcacacactgacatttctttttaatttcttggcaattataccgttggcagctatcttggctaatgccacggaagagttggctgataaggctgtaacaccattggggggctgctaa

SEQ ID NO: 79442 - DNA, 90 bp, Saccharomyces pastorianus
atgtctctagctatgtatattttgattgcaatggcatttttctattatccagacgaaaaaacccttgactctattggaaatagtttatga

SEQ ID NO: 79443 - DNA, 2082 bp, Saccharomyces pastorianus
atgtttttgaagccttattttgtggaagcctacagaccagtgaggaaaggtgaccattttgttgtcagaggcggtatgagacaagtcgaattcaaggttgtggatgtcgaacctgaagaatatgccgtcgttgctcaggatactattattcactgggaaggtgagccaatcaacagggaagatgaagaaaataatatgaatgaggtgggttacgatgatattggtggttgtcgtaagcaaatggctcaaattagggaaatggttgaactaccattgagacatcctcagttgttcaaggctattggtatcaagccaccaagaggtgttttgatgtatggtcctcctggtactggtaaaaccttgatggcaagagctgttgctaatgagaccggtgccttttttttcttaattaatggtccagaagtcatgtcaaaaatggctggtgaatcagagtctaacttaagaaaggcctttgaagaagccgaaaagaacgctccagccatcatttttatcgatgaaatcgattctatagctccaaagagagacaagactaatggtgaagttgagagaagagttgtctctcaattgttaactttaatggatggtatgaaggcaagatctaatgttgttgtcattgctgctaccaatagaccaaattcgattgatcctgctttaagaagatttggtagattcgatcgtgaagtcgacattggtattccagatgctacaggtagacttgaagttctacgtattcacaccaagaacatgaagttggctgatgatgttgatttggaagccttggctgctgaaacacacggttacgtgggtgctgatattgcctctttgtgttctgaagctgccatgcaacagatccgtgaaaaaatggacttgatagatttagatgaagatgaaattgatgcagaggtactcgattctttaggagtcaccatggacaacttcagattcgcattgggcaattcaaacccatctgcattgcgtgaaaccgttgttgaaagtgttaatgttacttgggatgacgttggtggcctagatgaaatcaaggaggaattgaaggaaactgtagaatacccagtcttacatccagaccaatacacaaagtttgggttatcaccatcaaagggtgtgttgttctacggtccaccaggtacaggtaaaactttgttagcaaaagctgtagctactgaggtttctgccaactttatctcagtcaaaggtccagaattattgagtatgtggtatggtgaatcggaatctaacatccgtgatatttttgataaggcaagagcagccgcaccaaccgtcgtttttctagatgaattagactccattgccaaggcaagaggtggttccttgggtgatgctggtggtgcttcggatagagtcgtcaaccaactattaacagaaatggatggtatgaatgctaagaaaaatgtgttcgtgattggtgccaccaataggccagatcaaattgatcctgctattttaagacctggcagattggatcaattaatttatgttccattgccagatgaaaacgctagattatctattctaaatgctcaattaaggaaaacaccattagaaccagggttagagttgactgcgatcgccaaagccactcaaggtttctctggtgctgatttactctatattgtgcagagggctgctaaatacgctatcaaggattctatcgaagctcacagacaacacgaagctgaaaaggaagtgaaagtagaaggtgaagacgtggaaatgacagatgagggagcaaaggctgaacaagaaccagaagtagatcctgttccatatattacaaaggagcatttcgcagaagctatgaagaccgctaaacgttctgtttcagatgctgaattgcgtcgttatgaagcatactcacagcaaatgaaagcatctagaggtcaattcagcaatttcaactttaatgacgctccattaggtactacggctacggacaatgctaacagtaataatagtgctccaagtggagcaggtgctgcatttggttctaatgcggaggaagatgatgatttgtatagttag

SEQ ID NO: 79444 - DNA, 477 bp, Saccharomyces pastorianus
atgggtgaagaacataaaccacttttggacgcctcgggtgtcgaccctcgtgaggaggataaaaccgccaccgccattttaagaagaaagaagaaggacaacatgcttttggtggacgatgctatcaatgatgacaattctgtcattgctattaattctaacaccatggacaaattggaattgttccgtggtgacaccgttctcgttaagggcaagaagagaaaagatactgtcttaattgtgttgatcgatgacgaattagaagacggagcatgcaggataaaccgtgtagttcgtaacaatttacgtattaggctgggtgatttagttacaattcatccttgccccgatatcaaatacgctactagaatttctgtgttaccaattgctgattcgatcgaaggtataactggtaatcttttcgatgtttttgaagccttattttgtggaagcctacagaccagtgaggaaaggtga

SEQ ID NO: 79445 - DNA, 228 bp, Saccharomyces pastorianus
atgccgattgccaagagactggccaaggcaatgaagttggacacttataatgtgttgcagaataatggtaaaattgcgcatcaagaagtcgaccacgtccacttccatttgattcctaagagagatgagaaaagtggtttgattgtagggtggccagcccaagaaacggacttcgataagttgggcagctacacagaattgcttgccaaactagaaggctccgattag

SEQ ID NO: 79446 - DNA, 114 bp, Saccharomyces pastorianus
atggagccattgatatcggcaccgtacctaacaacaacaaaaatgtctgctcctgctaggcttgatgttgcctgtattttttgcaagattattaaaagtatgtcacattactaa

SEQ ID NO: 79447 - DNA, 1461 bp, Saccharomyces pastorianus
atgactcctttagatggtatcacggcagaaagaattggttgtttacagtgtggtgagaacggtggcataagatattccgtattttcgggattaagcttaaatttaccgaacgagaatattggttccactttaaaattatctcagttattaagcgactggagtaaacctgaaatcatcgaaggcgtagaatgtaaccgttgtgccctcacagcagcgcactctcatttatttggtcagttgaaagaatttgaaaaaaaacctgagggttcgatcccagaaaagttaattaacgctgtaaaagatagggtccatcaaatcgaagaagttcttgccaaaccagttattgacgatgaagattataagaagttgcatacagcaaatatggtacgtaaatgctctaaatctaagcagattttaatatcaagacctccaccattattatccattcatatcaacagatccgtatttgatccaagaacgtacatgattagaaaaaataactcgaaagtattgtttaagtcaaggttgaatcttgccccatggtgttgtgatattaatgaaatcaatttggatgctcgtttgccaatgtcaaaaaaggaaaaagctgcgcaacaagagtcaagtgaagacgaaaacattggcggtgaatactatactaaattacatgaacgcttcgagcaggaatttgaagacagcgaggaagaaaaagaatacgatgacgcagaggggaactatgcgtctcattacaatcataccaaggatatcagtaactatgatcccctaaacggtgaagtcgatggcgtgacatccgatgatgaagatgagtacattgaagaaaccgatgctttagggaatacaatcaaaaaaaggatcataaaacattctgatgttgaaaacgagaatgtaaaagataatgaagaactgcaagaaatcgacaatgtgagccttgacgaaccaaagatcaatgttgaagatcaactagaaacatcatctgatgaggaagatgttataccagctccacctatcaattatgctaggtcattttccacagttccagccactccattgacatattcattgcgctctgtcattgttcactacggtacccataattatggtcattacattgcatttagaaaatacaggggttgttggtggagaatatctgatgagactgtgtacgttgtggacgaagctgaagtcctttcaacacccggtgtatttatgttattttacgaatatgactttgatgaagaaactgggaagatgaaggatgatttggaagctattcagagtaataatgaagaagatgatgaaaaagagcaggagcaaaaaggagtccaagagccaaaggaaagccaagagcaaggagaaggtgaagagcaagaggaaggtcaagagcagatgaagttcgagagaacagaagaccatagagatatttctggtaaagatgtaaactaa

SEQ ID NO: 79448 - DNA, 267 bp, Saccharomyces pastorianus
atgtccaaatctccaagaaaaaatattcttcttggctacgaccaagaggacgcgcaagaattcttccagaacatactagccgagttggaaagtaacgttaaatcattgaatactgaaaaactagataccactccagttgcgaaatcagaattacccgatgatgctttagtaggtcaacttaaccttggtgaagttggcactgtttacattccaactgaacagattgatcctaactctatactacatgacaagtccattcaaaattga

SEQ ID NO: 79449 - DNA, 1143 bp, Saccharomyces pastorianus
atggcatctgtcatactagattctttgccatcagttattcattcatccgtggaaatgttgcttgatgtcgtcaagggaaccgaagctagtaacgatattatagataagccttatcttctgaggatagttacacatttagccattttccttgatataattaatccaggttctgttgaagaggttgataagtccaagctcattactacgtatatcagtcttctgaaattgcaaggcctttatgaaaatattccaatatatgctactttcctgaatgagtcagactgcttagaggcatgctctttcatattgtcttctttagagaacccccaagtaaggaaaaagcaaattgagacaataaactttctaagattacctgcctcaaatattttgagaagaaccacacagcgtgttttcgatgaaaccgaacaagaatattcaccatctaacgaaatttccatatctttcgatgtaaacaacattgatatgcacttaatatatggcgtggaatggcttattgaagggaagctttatgtggacgctgtccactctatcattgccttatcgaggagatttttgttaaatggccgcgtaaaggctctcgaacaatttatggagagaaataatattggagaaatatgcaagaattatgaattagagaaaatagccgataacatatcaaaggatgaaaatgaagatcagtttttggaagaaataactcaatatgagcatttgataaagggcataagagaatatgaagaatggcaaaaatccgttagcttgttaaaccctgaatcgaacattcctactttaatagagaaattgcaaggtttttcaaaggatacatttgaattgatcaagacatttttagtagatttaacttcctctaatttcgcggattcggcagattatgaaatcctgtatgagattagagccctatatactccatttctactgatggaattgcataaaaagttagtggaagccgcaaagttgttaaaaatcccaaaatttatttcggaagccctggcatttacctcattggtcgctaatgagaacgacaagatttatttattattccaatctaatggaaagttaaaagagtatctggatctcgttgctcgcacagcaaccctttcgaactga

SEQ ID NO: 79450 - DNA, 363 bp, Saccharomyces pastorianus
atgattggttttcacaagtgtatgagcaggcatttcagaagtttgcccacggaatgtaataaaactggaataaaaacactactggtgtgcccgggaaaaatcaaaactaatatgtttattgatgtccctacaccatctaagttattggctcctgacatcataccttcccaactggcactagcgataatctctgcgatggagcataatcatctgcaaacactaaatgccccatattatgtgaacctggttccctttttcaaaactttgagttggccatataggcatctcttaaaacatttcagtggaatggaccatgtaacgtcaaccagcccgcgagcaataaatccgaagagaagtgcataa

SEQ ID NO: 79451 - DNA, 807 bp, Saccharomyces pastorianus
atggtacgcaagaataaaataaatagcgcgagtggaactacaaaacacctcaaggattttccatcagtcatcctaagtctgcccagctacaacccttccatcctttctaaaaatgcaattgcactaataaccggtggttctagtggactcggatttgaacttgcaaaggaactttccagaagaattaataaagttattgtggcagatattcaatcatttcctacttttgctcaggtagaatataataacattttctactatcaatgtgacataacaagtctagatgaaattaaaaatttgaaaaaagctattgaaagagatcatggcaatattaatataattataaataatgctggtgttgctcacatcaaaaagttagaacatatgacaaacaaggaggtagaacaattgatcgacataaacttaataggtgcttaccgaatcatcagtacatttgcagaagatatgatagacaatagggaaggctttataattaacattgcttcagtcctcggagaactgactcctgcaaggctgacatcgtatggtgcatcaaaaggagcaatgattggttttcacaagtgtatgagcaggcatttcagaagtttgcccacggaatgtaataaaactggaataaaaacactactggtgtgcccgggaaaaatcaaaactaatatgtttattgatgtccctacaccatctaagttattggctcctgacatcataccttcccaaatggcactagcgataatctctgcgatggagcataatcatctgcaaacactaaatgccccatatgatgtgaac

SEQ ID NO: 79452 - DNA, 621 bp, Saccharomyces pastorianus
atgaaaggtcctgatggcttgattaaagagacaccgatacggaatctgttaacagcgcagtacatctcctgtgacacttctccactgctaacaaaaagtggagcttgggaaaccgttctggatctggacaataaaaaatcgaatgatgtcgttacacgttctgaattgattgtggtatcttcattagtcgataagccgccaaacctgggaggtatttgtaggttatgtgatgttttaggtgtgggactgcttactgtacaagacatcaaagtcaaaaaccatcctcaatttaaaaatgttgctgtgactgctgatagatggatgcccatggaggaagttgccctagatgagattgcaagtttcatgaaagggaaaaagaaggaagggtacacattaattgggctagagcaaacggataaatcagtgaagctagacaacaatttccaattccctaaaaaatcattgatcttgctaggaaccgaagcattcggtattccggggactttgttaagcgaattggatttatgtttagagattcaacaatttggtgtgatcagatcaatgaatattcaaacggcaaccgcagttatcgttcattcctatacagttcaacacatgtaa

SEQ ID NO: 79453 - DNA, 3705 bp, Saccharomyces pastorianus
atggttggaggtgctctcatctgcaaatatttaccacgcgaagagcaactaaagcttatatcagacttgattcagaatgacagcttagaagaggtgctggagttgattgaaactttgccactggatataacgacagacagcaacattgaaacaccaatctttgaaaaaattactgagcaggtcattgcgtatgctagtatagacggtgaagccagggaaatgtttcgctcttcgagggctgaaatgaacaaggcgctaagaacttctgcacaattactatgttgtttacccagtgtatggcataaatttcaggtgtggatgagctaccggttaaatgacatcattagcgaaaactataaacatctcttcaatgacaactttggaaaaaagattgtacaaccatttttcgattcttttgctgaggaacaaaacgctaatatcaagaatgaaaatctgcacttagatatccttagcctgcttcactacttagaagttgtatatttatttgacgaatgtaagaatggtatatcgtccaaatgcctagattttatcattgttccattgttaggctgtaattcggaagagattgctgattcctgctccaagttaatgagatggcatatcaaatatttatcgaaatgctgtaataccgatagtaactttgataagctcatttggacatttatcaaacaattgtacgctgaaggctcccaacaagcttggaagcaaaagaacagtttatcttttctcctaagattcctcttagcagcagagttgtctcctgaacttattacttatataaagaccgatgcttattggaggcacattcaaacagagctggataatgatgtgcacgaacacagaaaattggcactctcaattcttaaattaaccattcaaaaactgtcatctcatggtataacattgcaaacaacattttataaatgcaatgatctagcaaatatcgagatgcttggtagctggaagaaattcaccaccttatatgaaatgattgctctggacacatcattgaatcaaatacaagcggccaaacaagatataataaaaatttttgataacgtgcatttgcaccatagttggggccttatcttgctttctacaggattgaaatcatcaatggagagtgtcagaaaatacatgatgacgttaatgttctcgattacaaatatgtcagcattctcttcaaacttgccattattgacaaaaactcttcttccagctgcaatgtccgctcattattttgacgtaaaaggtgtcagttgtccccatggtgaaaaactttcattatttgtcaataacttactttcccaaacaacagaaggcatatcagatatattatttgaaattttgaaattattggtggaaaaagggacctcttttgacccttctaggatatacttgtcctgcggtatcttagttttcttccagaataacaaacagaaaacaatcaactctgaccatttgagtctgatcaggaaattgtacgattttgcagccgaagaagaggttctcgaaactacaatccaaacaatttacttgaagttcttactgtacattgatccatctgtctccgcatctgaattattgtttacattagtttcacacattaagttaaagggagggacatacaaatatgttgagcctctttttgaagattatagggatcttgccgtttctcactttgacgatttgcaagcgaaagaaaacttgacgacaaacatcggaaaggatactatttttgacctcttagcatctatcatcttcgatttcaaggatattgatattactcccgattttttaattgaagttgcgaagtcgaagcaagatatacccgtttacactccaaaggcagttacttttctaactcagctactttcaggcgaaccttcgaacggttatacctatgaaaatgcaaccgctttgttgtcttaccccaattttacaatatctacatggaaatccatcaatgtgaataatttatttaagtcggtaatggaaaaattttcgcttgataaattcaagttctttgctgaaatttaccagaagacttatgaatgtaggttcgacacaatcgagctaaattttaatgaccttctgagcctatatgaaatggttaaaaagtctgccaatcagtgttcaagagagagctttaaagtgaaggactgcgcttattcttcttactttgaacttttaaataccttcctcaaaacatacgccttaaatcgtgactcctctgaaggaaatgatgatgagcttcacatgctactacgcttagttgacgagaatattaacaaagataatgggaattatctggggaatctggcagtctgtaaattattgtactttatcatagattcctacatccattgctccacatctgtttctgatgatgatattttcatagtgaaattcatttttgagaaattttcgtttatatgggaatgtattaatagtgaaagattagttttgaaggaaagggatctgcatttgatgctaattaagggattatttcatcctgtgattctgtactttggatcaaatcagtatatcgatactttgacctcgaagttggaggaacatgcacaaacgattatatcattgagttattccagaagaagcctactccctcttctcggatcacaactcagagtatttatgaagttttatgggaaattgttaagagaggatgtcaactattggtggttgattaacattatagtaggtgttttcaaacagccgcaaatggatgtcaacctttacaagctcaaacctgttatttccagcctatttgaccacaaactgaacaattattacataaaaggcgatgaactttatgaaaaggtgtacggacccgacgaaatattggctagagtatctattattgattctattctatatgcaaatgatcagttgaaaattcgattaatcgaaaaagttactgaaaaaacaaacgcactttatgctataaagagaaccgacggtgccgaagcgttacagaggttgttgcagtggcaattgttattattatcactactaaccaccaataaaaaaaaattaagcgaaactagcatgatcagaattctaaagagtatcgaggatgaaagttcaccattagtaagagtatataaagaatggttcatttcctcaaaggttgttgattattataaaactggcaatccaaaatttgctgaggattatctcttctcattgctggaggatcatagcaaaccggtgtttgtagttagcgcagaaaaaatatgctttatggtgttgaaagatttaagaaacgacgaaaagaaatatggatttacacagttactagacagattcatttgcacgttagttcctaacgcagcttcaaacaaacctctggtaaggcatttttctaattctctaataatttcattatggcctacattcaaagcctacctatcggatcacacattgagaaacatcattgagaacttatattccaatgccaaaaagactcaaatattcggtcaatatcgtgccggggatgccaacatatgggatctgaagggtgattggaaattaacgaacatgtttggtggtgtgctcaaaaaagttaacgaacatgattgcccgtacatttctgagtctgttgtcgaaaaatatttgcaggagaaagatattgttcctataggtaccgatgaaaggtcctga

SEQ ID NO: 79454 - DNA, 777 bp, Saccharomyces pastorianus
atgtcagctatccgtgaagttaagtacctccaagaaatgcagcatccgaacgtcatagaactaatagacatatttatggcttatgataatttaaatctcgttctggagttcctaccaactgatctagaggtggtaataaaagacaaatcaatactgtttacaccagcagatattaaggcatggatgcttatgactttgaggggcgtgtaccattgccacagaaatttcattttgcacagggatctgaaaccaaacaatttattattttcacctgatggccagataaaagtagcagatttcggtctagcaagggcgataccggccccacatgagatactgacaagtaacgtcgtaacaagatggtatagagcgccagaattgttgtttggagctaaacattacacatcggctattgatatctggtcagtaggcgttatattcgcggaattaatgctaaggataccttatttaccaggacagaatgatgtcgatcaaatggaagtaacattcagggccttagggacacctacagatagagattggcccgaagtttcttcctttatgacgtataacaagttacaaatatatccgcccccttcaagagatgaattgaggaaaaggttcattgctgctagcgaatacgccttagattttatgtgtggaatgctaacgatgaacccacaaaagaggtggaccgctgttcagtgtttagaaagtgattatttcaaagaattaccaccaccaagtgacccgtcttcaataaaaatacgtaactga

SEQ ID NO: 79455 - DNA, 339 bp, Saccharomyces pastorianus
atgagttcagagcccatgaaagccaaagccttgctagaaaattgtgcatcaattggatttaaagaatgctttaaaacattaggatttcttgaattaaactatttcaataattatgaaagggcgaaagaatggttcaaaacgggtatggaaataatggacttggaatgtttctctggatttttcgattgctgtgtgaaagaagagaattttaaaggtgcacgagattgcctagaaagcgtaaaaaagctagggaatgataaagacaagaaaacaatgataaatgtctttcttgaaagtagaaaagattccataaagttgctggacaaagcacggctttaa

SEQ ID NO: 79456 - DNA, 342 bp, Saccharomyces pastorianus
atgcagaggtttgtcagtaagtttgtttccacaccaccagtacccaaaaagtttcaagagattttcccgaagaaacgtacggttaacaaaattttattccagttagatacaaggcttacataccatgaaatgtacccgatatttctgcaggtatcacaaaatactaatgaagagaatatcccatggaggaagaaatacccctatataaggagttcagacattatgcagatgcgaaacgtcttgataactctaaggacgcagaacaaattcgtccacaaagacttattagctatggaggataaattattgaatattgctgccgaacttggcaacaacggatgc

SEQ ID NO: 79457 - DNA, 747 bp, Saccharomyces pastorianus
atgaataaagttttaaagaaaattttaattgaaagaaatgtagatggtgctttagcttttgtcagagaaactatcaatgatattctgcataatagagtagatatttcaaagttgattatatcaaagacgttagccccaaattacacaaatccacagccgcacgccgttttggctgaacgtatgaagaggagagagggcgttggtccaaatgttggtgatcgtgtggactatgtcattatcggtggtaatgataaactttacaatagagcagaagatccattatttgtactagaaaacaatattcaagtggattcgcgctattatttaactaatcaattacaaaatccaatcattagtattgttgcacctattattggtgacaaacaggcgaacggtatgttcgttgtgaaatccattaaaattaacacaggctctcaaaaaggaggcttgatgagctttattaaaaaagttgaggcttgtaaaagttgtaaaggtccgttgaggaaaggtgaaggccctctttgttcaaactgtctagcaaggtctggagaattatacataaaggcattatacgatgtcagagatttagaggaaaaatactcaagattatggacacaatgccaaaggtgcgctggtaacttacatagtgaagttttgtgttcaaataagaactgtgacattttttatatgcgggttaaggttaaaaaagagctgcaggagaaagtagaacaattaagcaaatggtaa

SEQ ID NO: 79458 - DNA, 303 bp, Saccharomyces pastorianus
atgagtgaaaaaagatcccttcccatggttgatgtgaagatcgatgacgaggatactccccaattggaaaagaaaatcaaacggcaatcaatagatcatggtgttggaagtgaacctgtttcaacaatagagattattccgagtgattcttttcgaaaatataatagtcaaggcttcaaagcaaaggatacagatttaatgggtacgcaattagagtctacttatgaacaagagctatcgcaaatggaacatgatatgccgaccaagaagagcatgacctgtcatcattcgagcgtaagaact

SEQ ID NO: 79459 - DNA, 1884 bp, Saccharomyces pastorianus
atggtcaacaaactgcgtactgcgtttgaaagaggtcatctttcattcaactcgtggttttctaatggcacgactacttatgataacattgcctacactttaagattaatggtagattgtggaattgtcggtatgtcctggataacattaccaaaaggaaagtattcgatgattgagcctaataacagagtttcctcttgtcagttggaagtttcaattaattatcgtaacctaatagcacatcctgctgagggtgattggtctcatacagctccattgcgtatcatgtcctttgatatcgagtgtgctggtaggattggcgtctttccggaacctgaatacgatcccgtcatccaaattgccaacgttgtgagtattgctggcgctaagaaaccattcattcgtaatgtgtttactctgaatacatgctcacacataacaggttcaatgattttttcccacgccactgaagaggaaatgttgagcaattggcgtaactttatcatcaaagttgatcctgatgttatcattggttataatactacaaattttgatatcccttatcttttaaaccgtgcaaaggcgctaaaggtgaatgatttcccatattttggaaggttaaaaaccgttaagcaagaaattaaagagtctgtgttctcttcgaaggcttatggtacaagagaaaccaaaaatgtcaatattgacggccgattacagttggatcttttgcaatttattcagcgtgagtataaactaagatcctacacgttgaatgcagtctctgcgcactttttaggtgaacagaaggaggatgtacattatagcatcatttctgatctacaaaatggagatagtgaaacaagaagaaggttggctgtttactgtttgaaagacgcctacctgcctttaaggcttatggaaaaactaatggcgttagttaactatacagaaatggctcgtgttacaggtgtgccattttcatatttactagctcgtggtcaacaaattaaagttgtttctcaactatttcgaaagtgcctggagattgatactgtgatacctaacatgcaatctcaggcctctgatgaccaatatgagggtgccactgttattgagcctattcgtggttattatgatgtacccattgcaactttagatttcaattctttatatccaagtattatgatggcgcacaacctatgttatacaacactttgtaacaaagctactgtagagagattgaatcttaaaattgacgaagactacgtcataacacctaatggagattattttgttaccacaaaaagaaggcgtggtatattaccaattattctggatgaattaataagtgctagaaaacgcgctaaaaaagatctgagagatgagaaggatccattcaaaagagatgttttaaatggtagacaattggctttaaagatttcagctaactctgtctatggttttacaggagcgacggtgggtaaattgccatgcttagccatttcttcatctgttactgcttatggtcgtaccatgattttaaaaactaaaaccgcagtccaagaaaaatattgtataaagaatggttataagcacgatgccgttgtggtttacggtgacactgattccgttatggtaaagtttggtacaacagatttaaaggaagctatggatcttggtacggaagctgccaaatatgtctccactctattcaaacatccgattaacttagaatttgaaaaagcatacttcccttaccttttgataaataaaaagcgttatgcaggtttattctggactaatcctgacaagtttgacaagttggaccaaaaaggccttgcttctgtccgtcgtgattcctgttcctggtttctattgttatga

SEQ ID NO: 79460 - DNA, 1311 bp, Saccharomyces pastorianus
atgctgagtttcatactgcaaatggatgtggataatttccaaagaaatttgattaatgttatcgataagagcagaaacggaacttttattaatggtaatcgtttggtgaagaaagactacatccttaagaatggtgacagaatcgtctttggcaaaagttgctcctttttgttcaagtacgcatcttcatcttctactgacatcgaaaatgacgatgaaaaggtaggttcagaaagtcgttcatataagaacgacgacgaagttttcaagaaaccgcaaataagtgctacgagtagccaaaatgctacaactagtgccgcaattagaaaactgaataagacaaggcctgtgtcgttctttgataaatatttattaggtaaagaattaggtgcagggcactacgctctggtaaaagaagccaaaaacaaaaaaactggtcagcaagtagctgtgaaaatattccacgctcagcaaaatgacgaccaaaaaaagaataaacaatttagggaggaaaccaacatcctaatgagagtgcaacatccaaacattgtcaacttactagatagttttgtagagccaatcagcaaatctcagattcaaaaatatttggtactggaaaagatcgacgatggcgaactatttgaaagaatcgtcagaaaaacatgtttgagacaggatgaatctaaggctctattcaaacagttacttaccggattgaagtatctgcatgagcaaaacatcattcacagagacatcaagccagaaaatattttattaaatataacaaggcgcgaaaatccaagtcaagtccaactaggcccatgggatgaagatgaaattgatattcaagttaaaatagcggattttggcctagcaaaatttacaggagaaatgcaattcacaaacacactttgtggtacaccttcttatgtagcgcccgaagtcctcacaaagaaaggatacacatcaaaagtagatctttggagtgctggtgtcatattatatgtctgtttatgtggttttcctccattcagtgatcaattggggccaccttcattgaaggaacagatcttacaagctaagtatgcgttttactctccgtactgggataaaatcgatgactcagtactacatttaatatccaatcttttggtcctaaatcctgatgaaaggtacaatatagatgaagctttgaaccacccttggttcaatgacatacagcaacaaagctcggtctcattagaattgcagcatttacaaattactgacaataaaatacccaaaacatactcagaattatcttgcctctaa

SEQ ID NO: 79461 - DNA, 264 bp, Saccharomyces pastorianus
atgagtttgtccacgaaaagagagcactctggtgatgtaactgactcttcattcaaaagacagcaacgaagtaataagcccagctcagaatacacttgtctgggccatctggtgaacttaatacccggaaaggagcaaaaagtggaaataacaaatagaaacgttactacaatcggtagaagtaggtcgtgcgacgttatactgagtgagcctgacatctcgactttccatgctgagtttcatactgcaaatggatgtggataa

SEQ ID NO: 79462 - DNA, 1086 bp, Saccharomyces pastorianus
atgcgcgagtttattcctcattctacggagtatatgatgcaatttgccaaatccaaaacggtaaaggtattgaaaacgttgattgaaaaattcgagcaagtgccggactccttggacgatcagatctttgtgtgcgagaaaagcatcgaatttgccaagagagaaaaaagggtgtttttgaagcattcactctcgatcaaattggccaccttacattaccaaaagaaacagtacaaggactcattagcattgattaacgatcttttgagggagttcaaaaagctggacgacaagccctctttggttgatgtacatctattggaaagtaaagtttaccataaactgaggaatctagccaagtccaaggcctcgttgactgcagcaaggacggccgctaactccatatactgtcctacacaaacagttgcggagctggacttgatgagtggtatcctgcactgtgaagataaagactacaaaactgcattttcgtatttcttcgaaagttttgaaagctaccacaatttgactacgcataattcctacgaaaaggcatgtcaagtgttgaaatacatgctattgtctaagatcatgctgaaccttattgatgacgtaaaaaacatcctaaacgcaaaatacacaaaggaaacgtaccagtcccgaggcattgatgccatgaaagctgtcgctgaggcttataacaacagatcgcttttagacttcaacacggcgctaaagcaatacgagaaggaactaatgggcgatgaactaacaagatcccatttcaatgcattatacgacacgttattagagtccaatttgtgtaagattattgagccatttgaatgtgtggaaatatcccacatttccaaaataatcggtctggatactcaacaagttgaaggaaagctctctcaaatgatactagataagatattctacggtgttctggatcaaggtaatggttggctctacgtttacgaaactccgaatcaggatgccacatacgactctgcattagaattagtcgggcaactaaataaagtcgtcgatcaactatttgaaaaggcaagtgtcttgtattag

SEQ ID NO: 79463 - DNA, 165 bp, Saccharomyces pastorianus
atggttgtatgtttctatttcttcagcgaacattctccactgatttatgctactggatggtcgagtaacctgtgtaagaggtccaagtggttaggaagctgggacttttattgcaattcactattactatccgatagccagaatgaattaaacgctgaatcataa

SEQ ID NO: 79464 - DNA, 474 bp, Saccharomyces pastorianus
atggaccaaataaatgttgaaaagcttttagaatggtctagtgctcgtcaattgcaagaagaacgaggattttgcggaaggagcaacaaacttgttgacggttgctatagtttttgggttggaggttcggctgccattcttgaagcttttggatatggccaatgcttcaacaaacatgctcttcgggactacatattgtactgttgccaagaaaaagagcaacctggtttgagagataaaccaggggcccactcagacttttaccatacaaattattgcctattaggactggctgttgcggaaagttcatacagttgcactcctaatgattctccacataatattaagtgtactccagaccgcctaattggatcatcgaaacttactgatgtcaaccctgtctatggtttaccaatagaaaatgtaagaaaaattatccactactttaaatccaatttatcttctccaagttaa

SEQ ID NO: 79465 - DNA, 1305 bp, Saccharomyces pastorianus
atgatcaactgggatgcttatgctaaaagtctagctaagccattagggaattttttaacaatacttttttttatcataagactcttgcaggacaatttgatcaagcccaactattacaaactaaacgtcaagtctggcgctttcgatctttctaaatccaataaattaaaagagtttgattatctatgggagatatcatccagctttcaaaacagtaatcaattttatgcatttcaatcttggtattttgttaccttaaggtttttgaataatcttttcaggtttactattttcatactgctgtccctgaacctgtacgtaagctgtaaattcatgtttggatactttaagacttacaatctcttccatttgaaaaaagagttcaactccccaaacctcactaaacacaacttgaaggatctaagcaaagaatactatgaagatatttataagcagtccttgtggtctatgttgaagcattttttcagaggatctcgtgatgacggtcctcatgttaatcaaaatgaagatgagatattttttcagttaagaaaatggatccccactaacttcatgattaatctttttgtgtctttttcaccaacggcaattgtttttttaagcttttctgatgtttcgtttacttcagcaattgctatagtattccatcaatatattctggattatatcataactaagagatttcaaagaagcgtggacgacgacttgattttatcaagtgcagctttgcaagaatatgaggacaagcatataatggcacgaattaaccaatgcagcaatatagatactctatcatctgcaatgggtactagatctaaaacaccgagaatattcaccactcactccctatgtggcgaagaaatcagagaggtttataattatgaaaaaagggaatttgaggcattaccgaaaatgacagaaagtgtgccaggatcccgtgaaaccagaataaaggattatggaggcatttctcaattatccgacaatcaacgtcatcccattggttttcattattctcctagaatgtccccatattatagggataaagttttggataacaatttggctcaatcatcgtcaaatgaaaatttagaaaagggcggagctttcctgccgaatcaagaccaaaatagaccatcgaaatccctgagcccattaagaaaaacgcctttaagcgcacgacagaaaaggtttgaaggctcagagttcaatgtattgaataagaatgatattaattccattcttcgctctccaaagaaaaagaagaactatcacaaaagataa

SEQ ID NO: 79466 - DNA, 114 bp, Saccharomyces pastorianus
atgggttcaaatgatttgataaatgaagcatatgacgactcggaagtagttggtgaggaaagagcatcacaatctgcatggatgaagaggtggtatcagctacttacttctcct

SEQ ID NO: 79467 - DNA, 1164 bp, Saccharomyces pastorianus
atgaacgctactatgagaaatttcagtaagcaaaatcaagattccaagcataatgaaagaaataagtctgcggcaaatagtgacatcaattctctgttgtcaaattttaacgatattccaccctccgttactttacaggattggcaacgcgaggatgaattcggttctattccatcattaacaactcagtttgtttccgacaaatacacggcgaagaaaacaaataggtcagcttatgattccaaaaatactccaaatgtttttgataaagactcttatgttagaatagcaaacattgaacagaaccatttagataataattacaacaccgccgaaacaaacaataaagtccatgaaacatcttccaagtcttctagtttaagcgcaattatcgtatttggctatcctgaatcaatttccaatgaattgattgaacacttctcccatttcggtcatattatggaagactttcaagtattgcgattgggtcgcgggattaaccccaacaccttcagaatattccataatcatgatacaggctgtgatgaaaacgattctactgttaataaatctattactttaaaaggcagaaataatgagtcgaataacaaaaaatatccaatatttactggtgaaagttgggtcaaactcacttataattctccatcttctgctttgagagcactgcaggaaaatggaaccatatttcacggttctttgattggttgcatcccatattcaaaaaatgcggtggagcaattagctggctgcaaaattgataatgtcgacgacattggagaattcaacgtttctatgtatcaaaattcctccacatcgtcgacatctaatacaccatccccaccaaacgtaataataactgatggcactcttctgagggaagacgataatactcctgccggtcatgctggtaatccaacaaatatttcaagtccaatagtagcaaattctccgaataagcggctggatgtaatagatggcaagttgccattcatgcaaaatgcaggaccgaattcgaatattcctaatctgttgcgaaacctagaatcgaaaatgcgtcagcaagaagcgaaatacagaaataatgaacctgctggttttacgcacaaactgagtaattggttatttggttggaatgacctataa

SEQ ID NO: 79468 - DNA, 165 bp, Saccharomyces pastorianus
atgtttggaatacgttcaggcaataataacggtggatttactaacctcacgtcgcaagcaccacagacaacccagatgtttcaatcgcaatcacagttgcagccacaaccgcaaccgcaaccacaacaacagacctgcaggcatgcaagcgttgcactgccgtcg

SEQ ID NO: 79469 - DNA, 102 bp, Saccharomyces pastorianus
gagtcagacgccgaactcttgagacaaaagcaggccgccgcagatgctagaagagaggctgaaaagcttgcgaagttaaaagccgaaaagacgagaagataa

SEQ ID NO: 79470 - DNA, 1041 bp, Saccharomyces pastorianus
atggaggaactatcgatatcagttatcctacgacagaagtggttggccatggttcatttggtgtttgtagtcacgactgtaataattgagaccaatcaaaaagttgccataaagaaagtactacaagatagaaggtataaaaatagggagctcgaaactatgaagatgttgtgccatccaaatactgtgggtctacagtactacttttacgaaaaggacgaagaagatgaagtatacctcaatctggttttggactacatgcctcagtcgttataccaaaggcttcgtcattttgttaatttgaaaatgcagatgccgcgtgttgaaattaaattctatgcataccaactattcaaagctttaaactatttgcataacgttcctcgaatctgtcacagagatataaaaccgcaaaacctactggtggatccgacaactttttctttcaagatttgcgattttggcagtgccaaatgcttgaaaccggatcagcctaatgtgtcttacatctgttcaaggtactatagggctcccgaactcatgtttggtgccactaattactcaaaccaggtcgacgtgtggtcaagcgcttgtgtcattgctgagttgcttttgggcaagcccttgttctctggtgaaagcggtatagatcagttggtggaaattattaagataatgggcatacccacaaaggatgaaatttcaggaatgaacccaaattatgaagaccatgttttccccaatatcaagcccattactttggctgaagtattcaaagccgaagatcccgatactcttgacttgttaacaaaaactctgaagtatcacccttgcgaaagattggtacctctacaatgtctattatcaagctattttgacgaaatcaaacgttgtgataccgacacttacgtaaaagcacaaaacctgcgtatatttgacttcgacgtggaaactgagttgggccatgttccacttgtggaacggcccgccattgaagaacggttgaaacattttgtttctgcaccttcatcgtctttgtga

SEQ ID NO: 79471 - DNA, 1737 bp, Saccharomyces pastorianus
atgattcgttctaaatgtgaagaaatgatcatcaagagtatttttgacctatttataaaattttgggctccacctcaattagttattttgaaagtttttccctcagccatttcaagcttggtattggaaattacgggccaagagcatcactgcttgttgaaggaagccgaggaggttaaggaaacttatgacatcccgccacacttattgaacagatggtgtttaccttatttgactgacacaaggcgacatttgcaaaacttattaagcaaggaaaacgatgacgaaagccgcataacttggtgctatcgcgaccgtgaaatcaagcaaagttttgatttctttctgatcagcaaccacgatgatgttgaccttaacacaatgttaactctgatagatacagttttattcaaatgttatctttactataacccccccatggtgggtccattcattcgtgtagaaaaccactgcgattcccatgttatagtgaccgaattaaaaatacgccatatgttcaaagatttaattgatttttactataaacgtggtaatcatgaagaagctttgaaatttctcacggatttggtcgatgagttggaaaatgataatactgaccagaaacaacgccaaaaaatcgatcacggtgtcaaaatattagttatttattatttgaaaaaattatcaaacccgcagttagacgttatattcacttatactgattggctactaaatcgacacaacgactcaattaaagaaaacctttcctcgatttttttttatgattctcaagcatgtagcagtagggaccatttgaaagtgtatgggtacatcaaaaagttcgacaagttacttgccatacaatacttagaatttgcaattagtacgtttagattagagggaaataaattgcatactgtcctgatcaagttatatcttgaaaacttagatattccctccacaagaatcaaattaaagtctttattagaaacaacatctgtctatgagcctagaacaattttaaagttattgaacgatgctattgagagtggctccgaccagttgccaaccaatcaactaaatttcgtaaagtacctaaagattttccccttatcaaaattagaaaaccataaggaagctgtgcatatattacttgatgagatagatgattacaaagcggcgacaagttactgtaacgacgtgtaccaaagtgatccgacaaagggagaagagcttctattgtacttgtacagcaagttagtctccatatacgattccaataggaactccaagctgattctgaattttttgcaagaccatggttcaaaattgaattcagcggaaatatacaaaaatttacctcaagatatttccttgtacgatattggtagggtggtgtcgcaattattaaagaagcacacatcaaagatggatgagaccagattagaaaaggcactcctccaggttgagcttgtggccaccacatacaaactcaatgaacgcatgtcatcgtatggagtcttatcagatagccataaatgtcctatttgcaagaaagtaatttcaaattttggaacagattcgatttcctggttcaccagggaaggcagaaatatcatcacccattataactgtgggaaagtactacaggagcggtttaacgctaaaaatgaaaagtcctcgagaattaaacagaagactttgggagaagttataaatgagctaaataataagtaa

SEQ ID NO: 79472 - DNA, 1353 bp, Saccharomyces pastorianus
atgttaagagctcaaaagctacactcgctgaaatcatcggatatcactgcgattttgcccactgaacagtcacaaaaattagttttagcaaagaaaaatggtgacgttgaagtttactctcgagatggcaatacactcaaattatttcaagtatatcctgatctcttacgaaacgccaaaaatgatcctttgcctccagtgattgaaaacttttattttgccaacgagctttcaactatctttgcacaatgtaaagaaaccttaattttattgagcactacaaatttacacgaatatgatcgaataattgacagaagaggtataaaccattgctggctctttgaaaggtcacacaaaaataaagaagaaaagaatacttacctaatatattcaaccatcaatactgccaagatgagagtattaatatgggagggtaggacttacaaaaatatgatggaagcatcgttatcgtatagaaaggaaaccattcggtccatatatcctggtgaaacaggaatcaccttagcgacagatttaggtatctatcattggccatataataaaccctctctaatcagaatagaaaaaacagtgaaaaacaaattcccaaaagatatgatatcagcattaaccgaactcaaagagcaggcggagaaagtcattgaaaagaagcccaaaaagaatagccattttgatgctcaatccttttcttctatggatagaatgtccaggaagtcgagcatgtcaagcttatggtataggaccataagaaacgagcgtggcaacaaaatacgatatacttttgaattggacggcaatgacgctaccccaatgataattgatggtgctacaaaaaaaattttcaaggtagagttaatgcataacaatgaggaaccatttttgatcgccactgaccatgctacattttccgaatcaaattccgaattcgatcacatgcaatatttgtcgtccaacctcctgatgttatataattcaagtaccatcaagtttgttgattatgaaaatggatttacttttttgcaacaaaaaataccagaaggtataaaatgggtcaaaaatctctcgggaacctactttttagtatggacttcaaacgacgaagtacagttattctcttatcatgtagatgatggctctgaagatgatgatcaagagtctatttgtggtgacattaatgatcctgatttttatcaactatggagaaaagtgcttttctataagttcttcattgattctcctcattctaaggagttatgtgtttcggacaatccagaagaatccttggatatatgtgctatgaaactaagggatttaacaagtgatagtggtgtc

SEQ ID NO: 79473 - DNA, 213 bp, Saccharomyces pastorianus
atgggtactgatgatgtccgtctagctccagaattgaaccaagctatctggaagagaggtgtcaagggtgttgaatacagattaagattgagaatttccagaaagagaaacgaagaagaagacgccaagaacccattgttctcctacgttgaacctgtcttagttgcttctgccaagggtctacaaactgttgttgtcgaagaagatgcttaa

SEQ ID NO: 79474 - DNA, 1134 bp, Saccharomyces pastorianus
atggattccccacttgtcattagacgttcagttagtaccaccaatgacaatattggggaaagcgggaatagagaaggcatcagtggtggtagacccaaaagaactattcatccacccaaatcaaaagatttgtttgatatatatgaaaactccaaaccaaaatcaaagactttacaaaaaaaattcaggacttgcctgaaaatactaaaggttttgatgagtaaaaaaaattcggatataaattttccctttttacaacctgttgatccgattgctttgaatctaccaaattactttgatgtcgtgaagaatcctatggatttgggtacaatatcaaataatttaatgaactggaagtacaaaacaattgatcaatttgtcgacgacctcaaccttgtcttttataattgtttccaattcaatccagaaggcaatgaagtccattcaatgggcaaaaaactaaaagagcttttcaattttcattggttagagaaccaggatattttgaatgaaattgaaacggattcagatcttgaagaggataactattcttcttcatattcatctgatgatgaatatgatgatgaagacataaatgaaaacgatataactaatccggctattcaatatttggaacaaaaactgaagaaaatggaggttgaattgcaacaattgaaaagacaagagttaagtaaattatcgaaggaaaggaagaggaagcatctaggtaaaacgcttttgcgtaggaaggcaatgaagcatacagttgacgatttaaagaaatctattactgataaaatcagtgaattaagtgatttagaaatgaatgggatgattcgtatcattaaaaattcattacccgcagatgaaatactaacttccaatgaagatgaaattgaaattgatttggatattttagatgaagcgactattgcaataatttatgaaagatattttgagaaaaaaaataacaataatagcaaaagaaaactaagtggcaactactcgactgcgccaactaacaagaaaaagaaaaccttgaaatttttggaaaaggatgaaatcataaataataataattattccgattctgaagaagacagtagtgatagtagcgacagtgacagtgattaa

SEQ ID NO: 79475 - DNA, 84 bp, Saccharomyces pastorianus
atgaagatgttggaaattgatggtaatgatccgaacttggggaaccttgataaggaattaaccgacggttgcaaacaacaataa

SEQ ID NO: 79476 - DNA, 1038 bp, Saccharomyces pastorianus
atgaaaataacttatgatcaatgtaacaaaatgatccactctgtatgtcattccattaataacattgatccagtacagttagttaatgacattaataaccctgtagaaattggacctgctactagtaaagatgaaagcagtaaggttataactaagatcaaggattacaatgcgaaacgtaacgaatccatgatgaaattgcaaagcattgaaatagcaattgatcttatcaccgcaatcattgagatagttgcatccaaatatgaatcaccagaatcacaggaagtagcaattccagaggagctaatcaataccttaacaaatttcttgcctcacgttttcatgattttgaaagataccttcacctcgcgaatattgatcggatggaacaatctgatctggctctttgtgtctctatctctaacagagctctctggagagttgttaaccaccttatggagttatgttacacagttggacagccaagatgatttgagtattaaaataggaagaatgggctgtatttgggcgcttctgaaactcatctttcctgatggagcgtttgaaagtgagaatcgagcattgatcaatatccaaatgctgaacaattcaggattcgctaggggaattattgaagagttccaaaataataatgaccttgagttacaacaaaaatgtattaatgtactaagcacatatgctatgattcagggacaaattgatgcaaataaggaaattgggcagttcttcatacaaactttaacacagttgaatgttcgccctgaaattttgatagaaatgacaaattcgcttttccaaatttacggggatgcctcttacgactataatgaaccaatatttgtaaggggtggatttttatccattctaaaagaccaagttgtaccaaatttgaggcagcaattcaaaatggttgataaaaataaaaatcccgaactaaaagaaagatgtcatgattgctttactacgttggatagtttcattcactacaaaatgaatgaaaattctactaaccaatag

SEQ ID NO: 79477 - DNA, 564 bp, Saccharomyces pastorianus
atgggcagatcaaagaaaagatcaagagcatcttcgtctcgattaaatccactacgcaaagctgggtcaaatgacaataataaagataccaacgtcgttaataaaaaactccagccgctattgcagaatttgtcaagtgtggtgccaaatgatagaagtattgctttgagttccatcagtgttctttgtgaggatgcacatatgagacaacttttactgaaagagaaattagttcctatcattttgaataaattgctgaacgattctaattcggacatagttgtggagtcgttcggcttattaaggaacttgtctttggaagaaggttatgatgtgtcaatctacctttggagatctgatatatggacaagtataacaagtaattttggcaagattgttgaatcgttatccgctttgcaagcagcagaacagcaaccgcagctaaaacctgcaggaaaatccaaaatagaatctaaaaggttgttattcgattttgccgataacttactgtcgttagtggtggctctgtctaatggatccgacgatattctaatgagatataac

SEQ ID NO: 79478 - DNA, 228 bp, Saccharomyces pastorianus
atgttgcaattacaaaggaaaaacaaattgagttccttggtgaagaaatttgaagacaatgccaagattcataaatatagacggattatcagggaaggtacggaaatgaatattgaagaagtagatagttcgctggatgtaatactacagacattgatagccaacaataataaaaataagggcgcagaacagatcatcacaatctcaaacgcgaatagtcatgcataa

SEQ ID NO: 79479 - DNA, 1332 bp, Saccharomyces pastorianus
atgtctaaccaaatatactcagcgaaatattcgggggttgatgtttatgaattcattcattctacaggatctatcatgaaaaggaaaaaggatgattgggtcaatgctacacatattttaaaggccgccaattttgccaaggctaaaagaacaaggattctagagaaggaagtacttaaggaaactcatgaaaaagttcagggtggatttggtaaatatcagggtacatgggtcccactgaacatagcaaaacaactggcagaaaaatttagtgtctacgatcagctgaaaccgttgttcgactttacgcaaacagatgggtctgcttctccacctcctgctccaaaacatcaccatgcctcgaaggtggataggaaaaaggctattagaagtgcaagtacttccgcaattatggaaacaaaaagaaacaacaagaaagccgaggaaaatcaatttcaaagcagcaaaatattgggaaatcccacggctgcaccaaggaaaagaggtagaccggtaggatctacgaggggaagcaggcggaagttaggtgtcaatttacaacgttctcaaagtgatatgggatttcctagaccggcgataccgaattcttcaatatcgacaacgcaacttccctctattagatccaccatgggaccacaatcccctacattgggtattctggaagaagaaaggcacgattctcgacagcagcagccgcaacaaaataattctgcacagttcaaagaaattgatcttgaggacggcttatcaagcgatgtggaaccttcacaacaattacaacaaggttttaatcaaaatactggatttgtaccccaacaacaatcttccttgatacagacacagcaaacagaatcaatggccacgtccgtatcttcctctccttcattacctacgtcaccgggcgattttgccgatagtaatccatttgaagagcgatttaccggtggtggaacatctcctattatttccatgatcccgcgttatcctgtaacttcaaggcctcaaacatcggatattaatgataaagttaacaaatacctttcaaaattggttgattattttatttccaatgaaatgaagtcaaataagtccctaccacaagtgttattgcacccacctccacacagcgctccctatatagatgctccaatcgatccagaattacatactgccttccattgggcttgttctatgggtaatttaccaattgctgaggcgttgtacgaagccgggacaagtatcagatcgacaaatttctcaaggccaaactccattgatgagaagttccttattccacaattcatacactag

SEQ ID NO: 79480 - DNA, 477 bp, Saccharomyces pastorianus
atgctccaatcgatccagaattacatactgccttccattgggcttgttctatgggtaatttaccaattgctgaggcgttgtacgaagccgggacaagtatcagatcgacaaatttctcaaggccaaactccattgatgagaagttccttattccacaattcatacactagaagaactttccctaggattttccagctactgcacgagaccgtatttgatatcgattcgcaatcacaaacagtaattcatcatattgtgatacgaaaatcaacaacaccttctgcagtttattatcttgatgttgtgctatctaagatcaaggatttttccccacagtatagaattgaattacttttaaacacacaagacaaaaatggcgataccgcacttcatattgcttctaaaaatggagatgttgtttttttaatacactggtcaaaatgggtgcatggggatcctctagagtcgacctgcagc

SEQ ID NO: 79481 - DNA, 537 bp, Saccharomyces pastorianus
atgaatcaacaatatgagcaaatgatgatacaaaatggtacgaatcaacatgtcaattcttcaaacacggacttgaatatccacgttaatacaaacaacattgaaacgaaaaatgatgttaattcaatggtaatcatgtcgcctgtttctccttcggattacataacctatccatctcaaattgccaccaatatatcaagaaatattccaaatgtagtgaattctatgaagcaaatggctagcatatacaacgatcttcatgaacagcatgacaacgaaataaaaagtttgcaaaaaactttaaaaagcatttctaagacgaaaatacaggtaagcctaaaaactttagaggtattaaaagagagcagtaaagatgaaaacggcgaagctcagactaatgatgacttcgaaattttatctcgtctacaagaacaaaatactgagaaattgagaaaaaggctcatacgatacaaacggttgataaaacaaagctggaatacaggcaacggttttattgaacaaattaatagaagatga

SEQ ID NO: 79482 - DNA, 420 bp, Saccharomyces pastorianus
atgtcggaaaggcctccatatatccttaactcatatggcgttctcaaaccagatatcacattctttggcgaagcactgccaaataaatttcataagagcattcgcgaagatatcttagaatgtgatttgttgatttgcattgggacaagtttaaaagtagcgccagtgtctgaaatcgtaaacatggttccttcccacgttccccaagtcctgattaatcgtgatcccgtcaagcacgcagaatttgatttatctcttttggggtactgtgatgacattgcagctatggtagcccaaaaatgtggctggacgattccgcataagaaatggaacgatttgaagaacaagaactttaaatgccaagagaaggataagggcgagtatgtcgttacatcagatgaacatcccaaaaccctctaa

SEQ ID NO: 79483 - DNA, 831 bp, Saccharomyces pastorianus
atggagctcaaaccaactaatgacatggatcccttggcagtgtcagcagcttcagtagtgtcaatgtccaatgacgttttgaaaccagagacgcccaaggggccaatcataatcagtaaaaacccatcaaatggtattttctatggtccctccttcactaaacgagagtctctcaatgctcgaatgtttctgaaatactatggtgcacacaaatttttagacacttacctccccgaggatttgaactcgttatacatttactatcttatcaagttgctaggctttgaagttaaagatcaagcgcttatcggcaccatcaacagtattgtccatatcaactcgcaagagcgtgttcaagatttgggaagtgcaatatctgtcacaaatgttgaagacccattggcaaaaaagcaaacagttcgtctaatcaaagatttgcaaagagcaattaacaaagttctatgtacaagattaagattatccaattttttcactattgatcattttattcaaaaattacataccgctagaaaaattttggtcctgactggtgcaggtgtttcaacttcattagggatcccggacttcagatcttctgaggggttctattcaaagatcaaacatttggggctcgatgatccccaagacgttttcaattacaatatatttatacacgacccctctgttttctataatattgccaatatggttttacctccagaaaacatttattctccattgcatagtttcattaagatgctacaaatgaaagggaaattattgagaaattatactcaaacattgataatttggaatcttatgcgggaataa

SEQ ID NO: 79484 - DNA, 570 bp, Saccharomyces pastorianus
atgcttcgtcaacaattcccagcatgggaagtcaagaattttttaaagcactacctaaccagttcaccgggtgatatcattaccgttgacccacaatccggtgccaaaacgacatggggcagacacgatggattgtggtcttacacaattggacagaaagtgggcatatccatgccacaagctgaccctaattaccaagggacctggtttgtcagtgaaaaactaagggataccaacgaaatcttgatagtcagaggaagagataatccggcgctatacagtgacactatgcgaatcgaaaacttttcgtctttgggccccagggaggacactataaacgctttccaaaatactggtgccttgacattacaattccggtccctgcaggtcccagtccaaattaaatcgtgcaaactgaatcgctctgccgacaacctcgacataacaatacacttagcctcaaaacaacgtgccataactcctgggcaatcgtgctgtctatatatcgacgatagagtccttgggagtgggcccatttcccatgttaataataatgacacccatgcatag

SEQ ID NO: 79485 - DNA, 672 bp, Saccharomyces pastorianus
atgctggcaagatatttaaatttaataggacggaggagtgcttcaccgtacagaccacagcggctaccggcaaagtttgacaacgtgatagtggcaatgtcatctggggtagattcctctgtggcggcagcactatttgccggagaatttccaaatacccgaggagtatatatgcagaactggtctgaatcacaatctttggacgaccctggcaaggagccatgctacgagagggattggagagatgtgaaccgtgtcgctaagcatttgaacatccgagttgacaaagttaattttgagcaagattattggatagatgtatttgaaccaatgttgagaggctacagtgaagggtcgacacccaatccagatatcggttgcaacaagttcgtcaagttcggcaagctgagagagtggctggatgagaagtatgggacgggtaactattggcttgttactggtcattacgcccgagttatgcaggaaatgaatggaaaaggattattccatttactgagaagcatttataggcccaaggatcaaagctattacctttcacaaatcaactccactgttttgtcatctttggttgctacccattgggcatctaacgaaaccagaagtacgaaatttagcgaagtatgcaggcctcccgactgcagaaaagcctga

SEQ ID NO: 79486 - DNA, 1722 bp, Saccharomyces pastorianus
atgcctgcagctaatgaacttcgttctgataaagcaactagtctgttcgttccaacaagacatcatgtggaatacatttctcaactcgtaagagactgcggatacttgatttcgtacatctacggtactttggaccaacatgctcgtaaacgtcaattatataattttagggcgggcttaacttccattttggttgttacagatgttgctgcaagaggtgtcgatattccaatgttagccaatgttattaattacacattacctggttcatcaaaaatttttgttcatcgtgtaggtagaactgcaagagccggtaacaaaggttgggcatattccattgtcgctgaaaatgaattaccttacctattagatttggagctatttttgggggaaaaaattcttctaacaccaatgtacgatagtctagtcgacgtgatgaagaaaaggtggagagatgaaggaaaaccggaatatcaatttcaacccccaaagctttcttacacaaaaagactcgttctaggttcatgtccaagactggatgttgaaggcttaggtgatctttataagaatctgatgtcctctaattttgaccttcagttggcgaagaaaacagccatgaaggcagaaaaactttactacagaacacgcacttccgcctcccctgaatctttaaagagaagtaaagagatcatttcttctggctgggatgctcaaaatgcattttttggtaaaaatgaagagaaggaaaaattggattttttggctaaattgcaaaacagaagaaacaaggaaacggtatttgagttcaccagaaacccagacgatgaaatggcagtgtttatgaaaaggagaagaaagcaattagcgccaattcaacgaaaggcgactgaaagaagggaactattagaaaaggaaagaatggctggtctttcacattctatcgaagatgaaattttgaaaggtgacgatggtgagacaggttacaccgtgtcagaggatgccttaaaagaatttgaagatgcggaccaattattagaagcacaggaaaacgaaaacaaaaagaaaaagaaaccgaagtcttttaaggatccaactttctttttaagtcactatgcgccagctggtgaaatacaagataaacaattacagataaccaatgggttcgctaatgatgctgctcaagcggcttacgatttaaatagcgatgataaagtgcaagttcataagcaaacagcgaccgtaaaatgggataaaaaaagaaaaaaatatgttaatactcaaggtattgataacaagaaatatattattggtgaaagtggccaaaaaatcgcggcaagcttcaggtctggtagatttgatgattggtcgaaggcaagaaatttgaaaccattgaaggtaggttcgagagaaacaagcataccatctaacttgctcgaagacccttcacaaggtcctgctgcaaatggtagaaccgtccgtgggaaattcaagcataaacaaatgaaagcgcctaaaatgccagataaacacagagacaattattattcgcaaaagaagaaggtggaaaaggctctacaaagtggaatttccgtcaagggatataataacgctccgggtctgcgaagcgaattgaagtccactgagcaaattagaaaggacaggattatagcagagaaaaaacgtgcgaagaatgctcgtccttccaaaaagcgtaaattttag

SEQ ID NO: 79487 - DNA, 1302 bp, Saccharomyces pastorianus
atggcaggcgtgcagaaaagaaaaagggatctcgaagatcaagacgacaatggaagcgaggaggacgacatcgcctttgatattgcaaatgaaattgccttaaatgatagtgagagtgatgctaacgactccgatagtgaagttgaagctgattatggtcccaacgatgtccaggatgtgatcgagtacagctcagatgaagaagaaggagtgaacaataagaagaaggctgaaaacaagaacatcaagaaaaaaaagaatagtaagaaggaaatagcagcatttccaatgttagaaatgtcagatgatgaaaacaatgcatctggtaaaactcaaaccggtgatgatgaggatgatgtcaatgaatatttctccacaaataacttggagaaaacaaagcataaaaaaggtagttttcccagctttggcctatccaaaattgtattgaacaatattaaaaggaagggatttcgccaacccactcctattcaaaggaagactatcccattaattttgcaaagtagggatattgttggtatggcacgtaccggttctggtaagactgcagcattcatcttgccaatggtggaaaaattgaaaagtcactcaggtaaaattggcgcccgtgcagtcatcttatcgccttccagagaattagccatgcagactttcaacgttttcaaggattttgccagaggaacagaactaagaagcgtcctcttgactggtggtgattccttggaagaacaatttggcatgatgatgaccaacccagacgttattattgcaacacctggtagatttttacatctgaaagttgaaatgaacctcgatttgaagagtgttgagtacgttgttttcgatgaagctgataggttgttcgaaatgggttttcaagaacagttgaatgaattacttgcatctttgcctacaacaagacagactttgttgttttctgctactctacctaattcattggttgattttgttaaggctggtttggttaatccagttttggttcgtttggacgcggaaacgaaagtttcagagaacttagaaatgctttttctatccagtaaaaacgcagatagagaggcgaacctattatatattttgcaagaaatcataaagattccgttagccactagtgaacaacttcaaaagctgcaaaatagtaacaatgaggcagatagtgactcagatgatgaaaatgatcgccaaaagaagaggaggaatctcaagaaggaaaagttccgtacacaaaaaatggctgcaggtaatggaattccttctgaaaaagca

SEQ ID NO: 79488 - DNA, 1014 bp, Saccharomyces pastorianus
atgattggtgatgaggcaagtgaagttcgctcttatctgcaaatatcttatcctatggaaaacggtattattaagaattggacagatatggaacttctttgggattacgcctttttcgagcaaatgaaactaccatccacctccaacggtaagattttactaacggaacctccaatgaatccgctgaaaaatagggaaaaaatgtgtgaggtaatgttcgaaaaatacgattttggcggagtttatgttgccatccaagctgttctagcattgtatgcacaaggtttgtcttcaggagtcgtcgtcgattccggtgacggtgttactcatatagtcccagtttacgaatctgtcgttttgagccacttaacaagaagattagatgttgcgggtagagacgttactaggcatttgattgatctgctttctcgtcgtggttatgcatttaacagaactgcagatttcgaaactgtgcgtcagataaaggaaaaattatgttatgtttcatatgatttagacctagatacaaaattggctagagaaacaaccgcccttgtggaatcgtatgagttaccagatggcaggacaatcaaagtgggacaagagagatttgaagctccagaatgtttgttccaacctggtttggttgacgttgaacaacctggcgtgggcgagctgttatttaatactgtgcaatcggctgatgttgatatcagaagttccctgtataaggccattgttctttcaggtggttcaagtatgtacccaggactgccttccagattagagaaagaattgaaacaattatggtttagtagagttttacacaatgacccttcaagacttgataaattcaaagttagaatcgaagatcctccaaggagaaagcatatggttttcattggtggtgccgttttagctagtatcatggctgataaagaccacatgtggttgtctaagcaagaatggcaagaaagcgggccatctgcaatgactaaatttggtccaagatag

SEQ ID NO: 79489 - DNA, 666 bp, Saccharomyces pastorianus
atgagatcattacaattacaacctatggttcagagttggaaagagatatcttccaggatgggaattccaaacgagtttgccaaaggtttgaatgttgatttagtaaagcaagaagaaaccagaaagcagtttctaagtttcctgcagaaaagagtgttggagtccctcaccaagaacgaactgggaataagatcctactttttaggagacagcgtcgagaaatggatcaaagaatcctatgacttggaactcgatattgataattgccgaagtgaactcagaaaattccaaactttcatattttccagtgttcgatacaagttgtatttagactcaatgaaaaatttaccgctaaacccttcaaaaaaactcgagggcaagaagcatattgcagacgtatatgtcattgttttagacgaatcctttcctgcaataatgttcaatggcggagcttattcgaaggctgattttttcaggatattacaagaaagtgaaacctctaacagcagcaaaacccttaacacaattattgccatcaaaagtgtaaatacgctactatcaaaacactttgttatcacaacaaatggtgattctggagaattcttttcaaaatataacatttcaaaaataaacgacaaaaacactgaatacaccctaaaagagtaa

SEQ ID NO: 79490 - DNA, 555 bp, Saccharomyces pastorianus
atgttcaaagttccagtgggattagccagtaggacaagggagcttatgaacagcgttacgcccaatagtctcaataatggaaagggtttcaatatgtacttgccaggaatattaagggcttttcctaaaccagtgccttcggcgattacatctcccgcaattccaaaatatcgaggagaaagtttccagtttcgtaagctttcatgcatttcttctaattattgttctaccactcaccaatttctatccagtctgaaaagctcgacatccaggttggttggtaaaagagccttccattcgtcacgacgtgcagaaataaagtttatattttcttcgaagtcaccaaagaacggtaacaagccgtttgtgaaagtatataaagtctccccattttttatcatatttgcaactgcaagtatcttcacattcattctaacatcaacgatagtcgttattcccttaatttttcactttttttttccccttcttattatgttcatttttttaaacaattcaaaaaatggcagaaaaatatcttttacaaagatgtcttga

SEQ ID NO: 79491 - DNA, 1293 bp, Saccharomyces pastorianus
atgcatcccgtagagatactacagaaacagattgaagacaaacacttcatggactctcaagcctccacccctgggtccgtggaactacagcataattcttcaagcggtagtgatgatacctcatcaagaaagaaaaaatccttgagattaacaagatttttcaaaaaaattcataatgattatcacgataaccatcatcatcaccaccatcacaaccgtggatccacccctacaaaaccgaagctcaatttgaacaccaatgaaaatatagtagaaagtaacggaaaagcgttatacgaaacagataacccagtggagctattagaaaaatatggtattcctggtagaaaattaggcgaaggagcttccggttcggtgtccgtagtagaaagaacagacggcaagttatttgcttgcaaaatgttcagaaaaccacacttaaacaatgaaggaactaatcagtctcaattagctaattattctaagaaggttaccactgaattttgtattggttccacgctgcaccacgaaaatatcattgaaaccctagatatgttgactgaaggtgacacctatttattagtaatggagtatgcgccatatgatttttttaatctcgtcatgagtaacctaatgacacaagatgaagtcaactgttacttcaagcagctgtgccacggcgttaattacctgcactctatgggcttagctcatagggatttaaaattggacaattgtgtcgtcactaaagatggcatcttgaaactgattgactttgggagcgctgtagtgttccaatacccttacgaagataccattgtaaaatcacatggaatcgtgggctctgacccttatttggctcctgagttattgaaacaaacatcctacgatccaagagtagcagatgtgtggtctatcgctattatattttactgtatggtccttaaaagatttccttggaaggctccaaaaaagagcttcaactcatttaggttatttactgaggaacctgaggacgaagatgatatagttcgggggccaaataaaatattaaggctactgccaagacattcacggacaataataggcagaatgttggctttagaaccaaagcaaagagttttaatgaatgacgtggtaaaggatgattggcttgtatccgtcccctcctgtgaagttgaccctacatctggcgatttggttgaaaaaccaaagaatcataagcatcacttggtcactgaggaggagttgaatgagctgaccaagcaacacgggaataaagattcaaattaa

SEQ ID NO: 79492 - DNA, 150 bp, Saccharomyces pastorianus
atggttaaggaaactccattacactcatcttcatcaacttcgctgtcttcattatttaggccaactaagttgaagaatttatcggctaaaatattcaatggagctgctcaccactcatcattccagaccgaatattgttcggaatcttga

SEQ ID NO: 79493 - DNA, 969 bp, Saccharomyces pastorianus
atgtgggtgttcgaagaagagatcaatggtgaaaaattgactgaaatcataaatactagacatcaaaacgtgaaatacttgcctggcatcactctacccgacaatttggttgctaatccagacttgattgattcagtcaaggatgtcgacatcatcgttttcaacattccacatcaatttttgccccgtatctgtagccaattgaaaggtcatgttgattcacacgtcagagctatctcctgtctaaagggttttgaagttggtgctaaaggtgtccaattgctatcctcttacatcactgaggaactaggtattcaatgtggtgctctatctggtgctaacattgccaccgaagtcgctcaagaacactggtctgaaacaacagttgcttaccacattccaaaggatttcagaggcgagggcaaggacgtcgaccataaggttctaaaggccttgttccacagaccttacttccacgttagtgtcatcgaagatgttgctggtatctccatctctggtgctttgaagaacgttgttgccttaggttgtggtttcgtcgaaggtctaggctggggtaacaacgcttctgctgccatccaaagagtcggtttgggtgagatcatcagattcggtcaaatgtttttcccagaatctagagatgaaacatactaccaagagtctgctggtgttgctgatttgatcaccacctgcgcaggtggtagaaacgtcaaggttgctaggctaatggctacttctggtaaggacgcctgggaatgtgaaaaggagttgttgaatggccaatccgctcaaggtttaattacctgcaaagaagttcacgaatggttggaaacatgtggctctgtcgaagacttcccattatttgaagccgtataccaaatcgtttacaacaactacccaatgaagaacctgccggacatgattgaagaattagatctacatgaagattag

SEQ ID NO: 79494 - DNA, 273 bp, Saccharomyces pastorianus
atgaatctcattacaaatgaaccgtgtggtgcccaattttcaaggtcctatgatttaacgagacaccaaaataccattcacgctaaaaggaagattgtcttccgttgctcggagtgtataaaaattcttggatctgagggctatcagaagacgttttcgagactggatgctttaacaaggcatataaaatcgaagcatgaagatttgtcgttagaacaacgtcaagaagttacaaaatttgcaaaggctaatattggttatgtcatgggttaa

SEQ ID NO: 79495 - DNA, 1134 bp, Saccharomyces pastorianus
atggcttctacggaacttagcctaaaaagaaccctaacggatattttagaagacgagttgtaccatactaatccaggtcatagtcagtttacgagtcattatcaaaactatcatccaaatgctagtattactccgtataagttggtgaataagaacaaggaaaataacacttttacgtggaatcattcattacaacaccagaatgaatcgagtgcagcttcgatacccccacaacaaacctaccatttcccgatattcaacaaatacgcggatcctactttaactaccaccacctcttttacgactagtgaagcaacggccaacgatagacagattaataatgtccatctcataccaaacgagattaagggtgctagcgaaaccccattgcagaagaccgtcaacctgaagaatataatgaaagtatcagacccgtatgtaccgacacggaatacgttcaattatgatgttaaaatttccaacgattttttcgataacggtgacaatctatatggtaatgatgaagaagtgcttttctatgaggataattataatccgaaaatgcagtggtcacttcaagataatagcgccgcaataaacaatgaggatgcgagagctatttttaacaatgaatttgactctgatgacgacgatatcagtgatgatgaagaggatgaaatagaagaaaattgtttgcaacaagagcaacaccaagaggagcctttactgtcattggatgttacaccaatctcaatgtttggctcagatcaaaaaacgggtcgtgccaagagttctagtcatttatttaatgagtacagttacgttgactctaacatggacagcatttccagtgttgtatctgaagatctgttagatgaacggggacatgagaagatagaggatgaggatgaggataatgatcttgatgaagacgatatctacgatatctctctcttgaagaacagaagaaagcaaagttttgtcctcaataaaaacactattgattttgaaagatttccatctccctcaacctcggcaaacgtaccgtctactgctactaccggtaaaaggaaaccagcaaaatcatccagtaaccgtagttgcgttagtaacagtaatgaaaacggcacatta

SEQ ID NO: 79496 - DNA, 270 bp, Saccharomyces pastorianus
atggttacccccacagatacacgtttgagaccagatcaaagagcaatggaagatgggcgttatgacgaagctggtgatgagaaattcagagttgaagaaaagcaaagagcagcacgcagaaaaagggaggaaaataaccttgaatatcacccacaatggttcgtcagggatactcatcccatcacaaaagctaaatattggagatatacgggcaaatattgggttaaaagaagagatcatgatttgaaagattgtggtgacattttttaa

SEQ ID NO: 79497 - DNA, 2640 bp, Saccharomyces pastorianus
atgtctagggaagacttgtccattgctgaagatctcaaccaagtgagcaaacctttactcaaagtgaagctgctggaagttttgggtcagggggatttcaaacatttaaaggcgcttgtggacaatgaatttcaacctaaagacgacccatctgtacagcaagttcttaatttaattttacattatgctgtccaggtggcccctattcttcttatcaaggaaattgttgctcattgggtggaccaagtaggtgatgagaagagttcgagtaaaagcgatgatggtatccatctagatttgaattatcaggatgaaaatggcaatactccattgcacttggctgctgctcaatctcggtcggatgtgatcagtttccttcttagccagaagtctatcaatgattgtatcaagaataaagctcatcagcagcctttggacatgtgcaaagatttgaatgtagcacaaatgattcaattgaaaagagatgactattttttggaaacagttcattctttgagagcagccatgaataaaagagacttttcgaaattggactctatttggaaaaacccaagaaacctaaatttactagatattaatggcatagatcctgaaaccggaacgacacttctgtatgaatattcgcaaaaaaaagacattgaaatgtgtcaatggctgctgaaacatggtgcagaagcaacagttaaagatgggaagggacggtcgccattggatttagtcaaaaatataaaactacccactaaaccgtcgaacaacgttacaccggaaattaagttaaagaatctacttgaaaagaatctgagagaacaagctattgttcacgaagatgtcgcatcaagtaagcctcctacgtataaggggtttttaaagaaatggacaaattttgcccatggctacaaattacgttggttcattttaagtgccgacggaaatctgtcatattacaaagaccaatcgcatgttgataggcctcgtggtactttaaaagtttcgacgtgccgtttacacatcgattcttcagaaaaactgaatttcgagttactaggtggcatcacaggcacaacaaggtggcgcttgaagggcaatcatcccattgaaacgactaggtgggtcaatgctatacaaagcgctattagattcgccaaagacaaggagatattaaacaaaaaaaaggcagtaccaccatcattggccttgaagaacaaatctccagccctgatatcgcattccaaaacacaaggatctcttcctgaagcttcgcaatactatcagcacacattacacaaggaagttattcagccctcctctgtgagtctttatcggagaccaagcaacaacctgtccgtcgtatccagcgaaatccaactaaacgataatttgactgaatctggcaagcgctttgttagtaaaatgattgaaaaccggctggatggtagcaaaacccccgttggagtacacacaggttcagctctgcaaagggtccgcagtagtaataccttgaaaagtaaccggagtatgcaaagtggctcaggtgtagctagtcctatagataaagtccctaacggtgcgaatttgagccagtctaacaccacaacaggatctactgcttccttgagtgataataactatattgataatttcgagggtgatgaggcaaattcagatgatgaagaggaagaccttggaataaattttgatcgtgatgaagaatacatcaaagcacagtatgggccatataaggagaaacttgatatgtatgaacaagcaatcagtatagagttgagttctttgattgaactaattgaacaagaggagccaagtcctgaggtttggctcacaataaagaagagcctcatcaacacatcaaccatttttggtaagttgaaggacttgacttataaaagagacaaaagattagtggatatggtttcaaagcaaggtgatgtcaataacgtttgggtgcaatctgtgaaagaattagaaatggagttgtccaacaaaacagaacgtctagcatctattgataaagaaagaagaggtttgaaaaagatactacacaagaaattgctggaatcacatgccactgccggcaacaaggaatccttagaaaatgacaaagaacaggaatcagatactacggcaagtactctcggtcaaattgcgaaatttatcagcgctacaaaggaagaagatgaagcatctgatgctgatgagttttatgatgccgcggaattggtggatgaagtaactgaattaacagaggctcatcctgaaatttcgaccgctgcagctcccaagcatgctcctcccccagttccaaatgaaacagataacgacagccagtatgtccaggacgaaaaaagcaaaatagagtcaaatgttgagaaaacaagccaaaaatttgaaaaacaaaataatctagttacagaagatgaaccaaaaactgatcaatcactgaaaaacttcaaagcggaggacaaagagagccaagtaaaggagaaaactaaagagatagcatcttcagttatcggtgaaaagaccatagttgctgtcactacagtgcaaaaaagaaaagaagaatatttactcaaagaaaggggtcctagtcttgggttatga

SEQ ID NO: 79498 - DNA, 471 bp, Saccharomyces pastorianus
atgaaagatggtattagaaaaagactatctatggataaggacgatagaccaaagattagtctttgggccgttctgaaatcgatggtgggcaaagatatgacaagaatgacgttaccagttactttcaatgagcctacatctcttttacaaagagtggcagaggatttggagtattccgaactattagaccaggctgcaacgtttgaagattcaacactgagaactctatatgttgcggcatttaccgcatcttcatacgcatctactacaaaaagagttgcgaaacccttcaacccattgttgggtgaaacatttgagtattctcgaccagataaacagtacagatttttcaccgagcaggtttcacatcaccctcccatatctgcaacatggactgagtcaccaagatgggacttttggggtgaatcatttgttgatactaaaagtcaatggcagatctttcaatgttaa

SEQ ID NO: 79499 - DNA, 750 bp, Saccharomyces pastorianus
atgttgcggcatttaccgcatcttcatacgcatctactacaaaaagagttgcgaaacccttcaacccattgttgggtgaaacatttgagtattctcgaccagataaacagtacagatttttcaccgagcaggtttcacatcaccctcccatatctgcaacatggactgagtcaccaagatgggacttttggggtgaatcatttgttgatactaaaagtcaatggcagatctttcaatgttaagcacttaggattatggcacattaagttgcgtccaaatgacaatgaaaaagaggaactgtatacttggaagaagcccaacaatactgttataggtattctcattggtaatccacaagttgataaccacggtgaagtgaacgttgtcaatcacacaaccggtgatcattgcaagttgtatttcaaagcaaggggatggaggtcatcaggagcatatgaaatcacaggcgaagtctacaacaagaaaaaacagaaggtgtggatcctaggtggacactggaatgaagctatttttgccaagaaagtagtaaaagatggcgatctctcgttggagaaaactagaaccgctgcatcagcagggaatgggcctacggatgacggaacgaagtttttaatatggaaggcaaacgaccgtcctgaggagccattcaatttaacgccttttgctatcacgctgaatgctccacaaccacatctattgccatggttacccccacagatacacgtttga

SEQ ID NO: 79500 - DNA, 657 bp, Saccharomyces pastorianus
atgaagtgtggggctcaaaccacaaagattgatatatggctccgtaggtgttattcttctaagtgcttttgggcagaagatttccaatgttccaaagtttacgatgatgcggattctttgctagagttatgtactatttttggttggaaagaattcagtaaatgcgcagcgttgcatggattgggtttcgaagctagtgggctcatttgggataaaccaaacggatattctaatggattgaaggaatttgtttatgatttgcttaataaagaatgtaccataggtacgttccctgagtacagtgttgcttttgaaacattcggatttctacaacaagaattacatgacaggatgtccattgaacctcaattacctgaccccaagacaaatatggatgctgttgatgcctatgagttgaaaaagtatcaagaagaaatttggtccgatcattattggtgcttccaggttttggaacaatgcttcgaaatggatcctcaaaagcgtagttcagcagaagatttactgaaaaccccgtttttcaatgaattgaatgaaaacacatatttactggatggcgagagtactgacgaagatgacgttgtcagctcaagcgaggcagatttgctcgataaggatgttctcctaatatctgaatag

SEQ ID NO: 79501 - DNA, 774 bp, Saccharomyces pastorianus
atgacaagcaaaacgaaaaatatcgatgatatacctccagaaatcaaagaagagatgatacagctctatcatgatctaccgggtatagaaaatgaatataaactcatagacaagatcggtgagggaacattttcgtcagtgtataaagccaaagatatcactgggaaaataacaaaaaaatttgcatcacatttttggaattatggttcgaactatgttgctttgaagaaaatatacgttacctcgtcaccgcaaagaatttataatgagctcaacctgctgtacataatgacgggatcttcgagagtagcccctctatgtgatgcaaaaagggtgcgagatcaagtcattgctgttttaccgtactatccccacgaggagttccgaactttctacagggatctaccaatcaagggaatcaagaagtacatttgggagctactaagagcattgaagtttgttcattcgaagggaattattcatagagacatcaaaccgacaaattttttatttaatttggaattggggcgtggagtgcttgttgattttggtctagccgaggctcaaatggattataaaagcatgatatctagtcaaaacgattacgacaattatgcaaatacaaaccatgatggtggatattcaatgaggaatcacgaacaattttgtccatgcattatgcgtaatcaatattgtgttaactcacataaccaaacacctcctatggtcgccatacaaaatggcaaggtcgtccacttaaacaatgtaaatggg

SEQ ID NO: 79502 - DNA, 723 bp, Saccharomyces pastorianus
atggaattcttcatcaaagatttgggtccccaaatttcatggagattagtcttcttttgtgagtatttgggtccagtcttggttcactcccttttttattatctatctaccattcccacagttgttgatagatggcacagtgctagctccgactataatccatttttaaacagggttgcgtattttttaattttaggacattatggaaagagattatttgaaaccttatttgttcaccaattctctttagctactatgccaattttcaacctgttcaaaaattgtttccattactgggttctaagcggtctcatttcattcggttactttggctacggcttcccctttgggaatgctaagttgttcaaatactattcatatttgaaattggatgacttaagtacattaattggtcttttcgtgctttcagaactatggaacttttattgccacattaaattgcgcctatggggtgactatcaaaagaagcatggtaacgctaagatccgtgtcccattgaatcaaggtattttcaatctttttgttgctcccaactatacttttgaagtttggtcttggatttggtttacttttgtgttcaagttcaatttatttgccgttttatttttgactgtttcaacagctcaaatgtacgcatgggctcaaaagaaaaacaaaaagtatcataccagaagagcattcttgattccatttgtattttga

SEQ ID NO: 79503 - DNA, 237 bp, Saccharomyces pastorianus
atgcttgatagagatttatcaaaacgaacgtttattgcatcgtgtggtcatgcattttgtggtaggtgtttcgccaggattgacaatgcaaaaaaaaaatctaagatgcccaaaaagaaactagctcaactaaagggttcggctcatccggataattatggccccaaattatgtcccgcagattcttgtaagaagcttattcgttcaagaggcaggttgaaggaggtttacttctag

SEQ ID NO: 79504 - DNA, 1596 bp, Saccharomyces pastorianus
atgcatagcgatactaacggtcgaacaaagagcaataatagcccatcagacaataatccaaatgagacagttatattaatagatagtgataaggaagaagacgcttctattcgcgaggctaaccttcctgtgaggttgtacccagacagacgggtagggagacgacgtgatgctttaaataggtttgtgaggtcagattcaaggagcaggaattctcaacggactcacataacagcaagctctgagcgccctgattttcaagctaataacaacgatatcactataatacgagaagttggacggttttttggagacgatggacctattgatccttctgcacattacgtcgatcttgatcaggagccaggttctgaaacgttagaaactccaagaacaatacaagtagataacacaaacgggtacttgaatgataatggtaataacaatgaaagtgatgatggcctgacaatagttgaagagagaacaacacgacccagagtgacactgaacctgccaggcggggagaggcttgaggtaactgcgacgacaacagacataccgataagaaggtcatttgaattccaagaagatctaggcgcatcacgcaggcagttactgagaaggagtgctacaagagcccgtaatttatttgtggaccggtctgatgaaaacgatgaagattggacagatgatacccataatttaccagaagctattcaaagggctcgtagggagagccgtatgcgaatgagcagacggattgcagaaagacaacgtagggtacaacagcaaagggtgtccagtgacgaaaatataagtacatctattaggttacaatcaatcagggaacgaatacaatcatatacgcctgatattcgtagtgcttttcatcgtgcagagtcactgcatgaattcaggtctattttacaaaatgttgctccaattactttgcaagaatgtgaagaagaactaatggcactcttcactgagttcagaaatcaactgctgcagaattgggccattgatagggtcagaaatactcaggaagaggccttgagacttcaccgagaagcattggaaagacaagaaagaacggcaggaagagttttccatcgtggcacattacgtgaatcaatcacaaactatcttaatttcaatggagaggatgggttcttaagtcgtttgtggagtggcccagcgttgagcgatgctgatgaggaacgacacactcaaaatatcattaatatgatccaagagagagaagaacgagagcgggatgtggtcatgaagaatctaatgaacaaaaccagagcccaacaggaagaattcgaagctagggcagccagcctacccgaaggttatagcgcgtcatttgatactacgccaaaaatgaaattagacattacgaaaaatggtaaagaagaaaccatcattgtgacagatgacgatttagcaaaaacactcgaggatattcctgtttgttgcttgtgtggcgcagaattgggggtcggaataccggatgattttactggtatcagtcaaaaggatcgtggtgtttcatttgaagggttagtgtcaaaatacaaattccactga

SEQ ID NO: 79505 - DNA, 717 bp, Saccharomyces pastorianus
atgagctcatcgtctcttgattcttcttctaagaatgatgagaggataagaagaaggagcagtagcagtattagcagtttcaaaagtggtaaatcatcgaacaataattacagttctggtacagcaaccaacaatgttaacaaaagaagaaaatcttcgataaacgaaaggccaagcaatttaagtttgggtccgtttggtcccataaacgaaccgtcaagccgcaaaatatttgcttatctgattgctatcctcaacgcttcttatcctgaccatgatttttcatcggttgagccaacagattttgtcaaaacatcattgaaaacttttatttccaaatttgaaaacaccttatattctcttggtagacaaccagaggaatgggtctgggaggtaattaattctcacatgactctttctgattgcgtcctttttcaatattcacctttaaactcttttttggaagatgagcctggctatctttggaatcttataggttttctttacaacaggaaaaggaaaagagtggcttacctttacttgatttgctcgcgtctaaattcgagtacaggcgaagtggaagatgccttggcaaaaaaacctcagggaaagcttataatagatgatggctcaaatgaatacgaaggagaatacgatttcacttatgatgagaatgtaatagatgataaatcagatcaagaagaatccctacagtag

SEQ ID NO: 79506 - DNA, 198 bp, Saccharomyces pastorianus
atgtctccttctaaaacctccaccaccacacctactggcaatgcgattgcatccagaggtttattcgcagcaacagagctggaggagttcgagaatgtttatcgccacttatatgcattaatcaaccttcattggtccgtattcggtcctcattatatcgaaatgttaggagataaagttaataaaaaaggaatataa

SEQ ID NO: 79507 - DNA, 150 bp, Saccharomyces pastorianus
atgttagctggtggactgacgccagaaaatgttggtgatgcgcttagattaaatggcgttattggtgttgatgtaagcggaggtgtggagacaaatggtgtaaaagactctaacaaaatagcaaatttcgtcaaaaatgctaagaaatag

SEQ ID NO: 79508 - DNA, 171 bp, Saccharomyces pastorianus
atgtctgttattaatttcacaggtagttctggtccattggtgaaagtttgcggcttgcagagcacagaggccgcagaatgtgctctagattccgatgctgacttgctgggtattatatgtgtgcccaatagaaagagaacaattgacccggttattgcaaggaaaatttaa

SEQ ID NO: 79509 - DNA, 1029 bp, Saccharomyces pastorianus
atgggaaaaaattttgatatttccaaaaaagacttgacccgcatcacagcggttgctgagcactatgttggagtcaataatggtggtatggatcaagcaacgtctgtttatggggaagaagatcatgctctatacgtagagtttaggccaaaactaaaggccacaccttttaagtttcctcaattgaaaaatcatgaaatcagtttcgtcatcgccaatactcttgtaaagtctaataaattcgaaactgctcctacaaattacaatttaagagtaatagaggtaacagttgctgccaacgccttggcgaccagatacagcgtggccttaccatctcacaaggacaattctaactcagaaagagggaacctaagagattttatggatgcttactacgccagatacgaaaaccaagcccaaccatggaatggagatatcggaactggtattgaacgtttactcaagatgctacaattggtagaagaatctttctcgaggaaaaagagcggattcactgtagatgaagcctctacggcgctaaactgttcacgtgaggagttcactagagattacctgacaacttttcccgtccgcttccaagtcctgaaactatatcaaagagctaaacacgtttactccgaatccttaagggtgcttaaggctttaaaaatgatgacaagtgccacttttcacacggacgaagatttctttacagattttggccgactaatgaatgagtcccaggcctcttgtgataaactttatgaatgttcgtgcatagaaaccaatcaaatatgctcgattgccctagcaaatggttctttcggctcccgtctcactggcgctggttggggcggttgcactatccaccttgttcctagtggcgctaatgggaacgtggaacaggtacgaaaagcactaatcgaaaaattctacaatgtaagatatccggatctcacagatgaagaactaaaagaagcaattatagtttcgaagcctgccttgggtacttgtttgtacgaacaataa

SEQ ID NO: 79510 - DNA, 114 bp, Saccharomyces pastorianus
atggccatagatccgtctgtgtcggaatggtcgaattactttaaatgcggactacatgtggcacattcatacttgaaaataattgctccggaaagatttaataatacaccttag

SEQ ID NO: 79511 - DNA, 330 bp, Saccharomyces pastorianus
atgaatacaaacgttccaatattcagttctccggtcagagatttaccaaggtctttcgaacaaaaacatttagcggttgtagatgcatttttccaaacataccatgtcaaacctgattttatcgctaggtctcctggcagagtaaatctgattggtgagcatatagattattgcgatttttcagttttgccattagccattgatgtggatatgctttgcgcagttaaaattttagacgaaaaaaatccatccattaccttaacaaatgcggaccctaaatttgctcagcgaaagtttgatctgcctttagatggttctacatggccatag

SEQ ID NO: 79512 - DNA, 3063 bp, Saccharomyces pastorianus
atggctcaagagaaatccaaatatacagaaagaacgtcttattatacagtgtcatattgggaacaagttaaactgtgtacccaacgtgggttccaaagaatttacggtaacaagagttatacagtcatcaatgtctgctctgcaataattcaatcttttattactggatcattattttacaataccccttcatccacttccggtgctttttcaagaggtggtgtgttgtattttgcgctactatattattctttgatgggactggcgaatatttcttttgaacataggccaatcttacaaaagcacaagggctattctttgtatcatccttcagctgaggcaattggctccactctggcatctttccccttcagaatgattggtttgacctgtttctttatcattttattcttcctatctgggttgcacagaacagcgggatcattttttaccatctatttgttcttaaccatgtgttcagaggcgatcaatggtttatttgagatggtttcttcagtatgtgacactctttctcaagctaactctatctcgggtattctgatgatgtctatctcaatgtactctacctatatgatccaattgccttcgatgcatccatggtttaaatggatatcgtacgtactacctatcaggtacgccttcgagtcgatgttaaatgccgaatttcacggtaggcatatggattgtgctaacactctagtacccagtggaggagactatgataatttatccgatgactacaaagtatgtgcttttgttggttcgaaaccaggtcagtcttatgtgcttggtgatgactaccttaaaaatcaatttcagtacgtttataagcacacgtggagaaactttggtatcttgtggtgctttttactgggttatgttgttttgaaagtgatattcacagaatataagaggcctgtgaaaggtggtggtgatgctcttatcttcaagaaaggatcaaaaagatttatcgcacatgcagatgaagaatctccagacaatgtcaatgatatagatgccaaagagcaattctccagtgaaagtagcggcgcaaatgatgaagtatttgatgatttagaagccaaaggtgttttcatttggaaggacgtatgctttactattccatatgaaggcggtacgagaatgcttttggataatgtttcaggttattgtattccaggtaccatgacggccttgatgggagagtcaggtgctggtaaaacaactttgttaaatactcttgctcaaagaaatgtcggtatcattactggtgatatgcttgtcaatggacgtcccattgatgcgagtttcgaaaggcgtacaggttatgtacaacaacaggatatacatatcgcagagttaactgttagggaatcgttgcagttttctgctcgtatgcgtcgccctcagcatttgcctgattctgaaaaaatggattatgtggaaaaaatcatcagagttttgggaatagaagagtatgcggaagcccttgttggtgaggttggttgtggtttaaacgtcgaacagagaaagaagctgtctattggtgttgaactagtcgccaaaccagacttattattattcctcgatgaacctacatcaggtttggattctcaatcttcatgggccattattcaattattaagaaagttatcaaaagctggccaatccattctttgtacgatccatcaaccttcagctactctgttcgaagagtttgatagattactacttttgaggaagggtggacaaactgtttatttcggagatattggtaagaactctgccaccattttgaactactttgaaaggaatggggcaagaaaatgtgattctagtgaaaatcctgctgaatatattttagaggctattggtgccggtgccacagcatccgtcaaagaagactggcacgaaaaatggttgaactctgtcgagtttgaacaaacaaaagaaaaagtacaggatttaataaatgatttatcgaaacaagaaactaaatccgaagttggagacaaaccttccaaatatgctacttcttatgcttaccagttcagatatgttttaatcagaacctctacttcattttggagaagtctgaattacatcatgtcaaagatgatgctaatgctggttggtggtctgtatattggtttcacatttttcaatgttggtaaaagttatgtcggcttacaaaatgcgatgttcgcggcatttatctctattatcttgtctgctcctgcaatgaaccaaatccaaggacgtgctattgcctccagagaactttttgaagttagggaatcccaatctaacatgtttcactggtcgctggtgttgatcactcagtacttgagcgaacttccctatcatttatttttttcgacaattttctttgtctcatcgtattttccattaagaatcttcttcgaagcgtcaagatctgcggtgtactttttgaattactgcattatgttccagttatactatgttggtcttggcttaatgatcctatatatgtcaccgaaccttccatccgctaatgttatcttaggtttgtgtctgtcatttatgctttctttctgtggtgttacacaacctgtctcattgatgcctggcttctggacattcatgtggaaggcttccccatacacatattttgttcagaatctggtcggaattatgctgcacaaaaaaccagtcgtatgcaaaaagaaagaactaaactacttcaacccaccaaacggctcaacgtgtggagagtacatgaaaccctttttggaaaaagctactggttacatcgaaaatcctgatgctacgtcagattgtgcatactgtatttacgaagttggagataattatttgacacatatcagctctaagtatagctacttgtggagaaattttggaatattttggatttacattttcttcaatatcattgctatggtttgtgtgtattacctcttccatgtaagacaatcttccttcctaagccccgtatctatactcaataaaattaaaaacataaggaaaaagaagcagtaa

SEQ ID NO: 79513 - DNA, 267 bp, Saccharomyces pastorianus
actttgccatcccacatcatctccacttctgatgtcaccagaattatcaactcttctgaaatccaatctgctatcagaccagctggccaagctactcaaaagcgtactcacgttttgaagaagaacccattgaagaacaagcaagttttgttgagattgaacccttacgccaaggtctttgctgctgaaaagctaggttccaagaaggctgaaaagactggtaccaagccagctgctgttttcaccgaaaccttgaagcatgactag

SEQ ID NO: 79514 - DNA, 819 bp, Saccharomyces pastorianus
atgtcccgtccacaagttactgttcactctttgactggtgaagctactgccaatgccttgccattgccagctgtcttctccgctcctatccgtcctgacattgtccacactgttttcacctctgtgaacaagaacaagagacaagcttacgctgtttctgaaaaggctggtcaccaaacctccgctgaatcctggggtaccggtcgtgccgtcgctcgtattccaagagttggtggtggtggtaccggtagatccggtcaaggtgccttcggtaacatgtgtcgtggtggtcgtatgtttgctccaactaagacctggagaaagtggaacgttaaggttaaccacaacgaaaagcgttacgccactgcttctgctattgctgctactgctgttgcctctttggtcttggccagaggtcacagagtcgaaaagattccagaaatcccattggttgtctccactgacttggaatctattcaaaagaccaaggaagctgttgctgctttgaaggctgttggtgctcactccgacttgttgaaggtcttgaagtccaagaaattgagagccggtaagggtaagtacagaaacagaagatggactcaaagaagaggtccattagttgtctacgctgaagacaacggtatcgtcaaggccttgagaaatgttccaggtgttgaaactgctaacgttgcttctttgaacttgttgcaattggctccaggtgctcacttaggtagatctgttatctggaccgaagctgctttcacaagttggaccaagtctggggttctgaaaccgttgctcctccaaggtcggtaa

SEQ ID NO: 79515 - DNA, 483 bp, Saccharomyces pastorianus
atgtacgatggagatgctaataaatcaaattctaaaaggaaaaaagctgctaatgttaaagtcaacttgatcgattttgcacgttgtgttactaaagaagatgcaatggaatgtatggataaatttcgtatacccccaaaatcgccaaatatagaagataaagggttcttacgaggtgtgaagagcttgaggttttatctgttattaatctggaattatctgacttctgatatgccgttaattttcgatgaagtagagatgaatgatatgattagcgaagaagcagattcgaatagtttcacctccgccaccggttcgaaaatcaacttcaacagtaagtgggattggttagatgaatttgacaaagaagacgaagaaatgtataatgatccaaatagtaaactaagacaaaaatggagaaaatacgagcttattttcgacgctgaaccaagatacaatgacgatgctcaagttagtgattga

SEQ ID NO: 79516 - DNA, 237 bp, Saccharomyces pastorianus
atggatacctctcacgaaattcatgataaaatacccgatacattaagagagcagcagcagcatttgcgccaaaaagagtcggaagggtgcataacaacattgaaagatcttaatgtacctgagacgaagaaactttcttccgtcttacatggcagaaaggcgagtacatatttaagaatttttagagatgatgaatgtttagccgataacaacaatgatgtagatagcgataagtga

SEQ ID NO: 79517 - DNA, 516 bp, Saccharomyces pastorianus
atgtcgcctaagtccacttatcaggagagcttacatggaatatcggaggacttaacgttaaagcctgtttcttctgcaacatactatcctcacaaaagtaaagcagattctggttatgaagaaaaggataaaatggaaaatgatattgatactattcagcctgccaccataaattgtgcctctggtatagcgacacttcctagttcatataaccgacatactttcaaagttaagacatattcaactttatcacaatccctaaggcaagaaaacgtcaacaatcgtagtaacgaaaaaaaacctcaacagtttgtgccacatagcgaatcaattaaagaaaaacccaatacgtttgaacaagataaagaaggcgagcaagcggacgaagaagaggatgaaggtgataatgaacatagggaatatcccctagcagttgaactaaaaccatttacgaatagagttggaggtcacactgcaatattcagattttcgaagagagcggttgtaaggctctag

SEQ ID NO: 79518 - DNA, 1158 bp, Saccharomyces pastorianus
atgccacgttatattggtgtcctgaatgttaggcaacattttcagtcaaaagatgactttttaagcgatttggatcaagaaaacaacggtaaaaatgataccagtaatgaaaacaaagacatagaagtcaatcataacaataacgacgatattgcgcttaatacagaacccactgggacccccttaacacacatacattccttccccttggaacattcgtcgagacaagtacttgaaaaagagcatcctgaaattgagcctgtccatccacacgtgaaaagatcactgtcaagttccaatcaaccttccttgttgcccgaggttgtattaaatgataacaggcatattataccggaatctctgtggtacaaatattccgattctccaaactcggcaccgaatgattcgtacttttcgtcttcctcttctcataactcatgttcgttcggtgagcgtggcaatacaaataaattaaaaagacgcgattctgggtccaccatgatcaatactgaattgaagaatctagtcataagggaagtatttgcaccgaaatgttttagaaggaaaagaaactctaatacgactacaatgggaaaccataatgcgcgtttgggttccagtccatcttttttaacacaaaaatcaagagcctcgtcccatgatgcatcgaatacgtctatgaagactcttggtgattcatcgtcacaagcgagtttacagatggatgactcgaaagtcaatccgaatttgcaggatcctttcttgaaaaaatcgcttcatgaaaaaatatctaatgctttggatggctcgcattcagtaatggatttgaagcaattccacaaaaacgaacaaataaaacataaaaactctttctgcaactctttatcacccattctcactgcaaccaattctagggatgatggtgaatttgccacctccccgaattatatcagcaacgcacaagatggtgtttttgatatggatgaagatacgggaaacgaaactataaacatggataaccacggctgccatcttgactctggtaaaaatatgattataaagtcattggggtataatgtttcaaatgactatagtcatcatgatattgaatcaattacgtttgaggagacgtcccacaccattgtttcaaattatctt

SEQ ID NO: 79519 - DNA, 849 bp, Saccharomyces pastorianus
atgaatgtcaatgcatttgccattacaggtggtaaaactttgaaagacgacctgaagaaaatgcaaaagcatggttgccaggccgttagcggaacaccaggaagagtattagacatgattaagagacaaatgttgcaaacaagaaatgttcaaatgttagttttagatgaggctgatgaattattgagtgagacactaggtttcaagcaacaaatatacgatatttttgcaaaattgcctaaaaattgccaagttgttgttgtcagcgcaacaatgaataaggacattttagaagtaaccagaaaatttatgaatgatccagttaaaatcctagtgaagagggatgaaatatcacttgaaggtatcaaacaatatgtcgttaatgttgacaaagaagagtggaaattcgatactctgtgtgatatatacgattctttgaccattacacaatgtgtgatattctgtaacaccaagaaaaaagtagattggttatctcagcggctaatccaatcaaactttgctgtagtctccatgcatggtgatatgaaacaagaagaaagagataaagtaatgaatgattttagaacaggtcattctcgtgtactgatatcgacggatgtttgggcgcgcggtattgatgtccaacaagtttctttagtcattaactatgacctaccagaaataatagaaaattacatccatcgtatcggtagaagtggtcgatttggtagaaagggtgtggctataaacttcattaccaaagctgatttagcaaaacttagagaaattgaaaaattctattctatcaaaataaatccgatgccagcaaattttgcagaattatcataa

SEQ ID NO: 79520 - DNA, 756 bp, Saccharomyces pastorianus
atgatgaataaagaacttatgtcaaaaactgctcaactatctgaattcgatgaggagttatacaaagttatcgatggtgaagatgaaaaatacctaattgctacctcagaacaacctatctccgcttaccacagcggtgaatggtttgaaaagccacaagagcaattgccaattcactatgtcggttactcctcttgtttccgtagagaagccggttctcacggtaaggatgcttggggtgtcttcagagttcatgctttcgaaaaaattgaacaattcgtcatcactgaacctgaaaaatcttgggaggagtttgaaaagatgatctcttactctgaggaattttataagtctttgaaattaccataccgtatcgttggtatcgtttccggtgaattaaacaatgctgccgctaaaaagtacgatttagaagcctggttcccataccaaaaggagtacaaagaactcgtctcttgctccaattgtactgattatcagtcaagaaacttagaaattagatgcggtataaagaaaatgggcgacagagaaaagaaatacgtacactgtttgaattccactttggctgctacccaaagagctttgtgctgtatcttggagaactaccaaacggaagatggtttggttgtaccagaagttttgaggaaatacattccaggtgaaccagaatttttaccattcgttaatgaattaccaaagaattccacctctagtaaagacaagaaaaagaagaattaa

SEQ ID NO: 79521 - DNA, 234 bp, Saccharomyces pastorianus
atgcaccgtaccattgtcatcagaagggcttacttgcattacattccaaagtacaacagatacgaaaagagacacaagaacgttccagttcacgtttccccagctttccgtgtccaagttggtgacatcgttaccgtcggccaatgtagaccaatctccaagactgttagattcaacgttgtcaaggtctctgctgctgctggtaaggctaacaaacaatttgctaaattttaa

SEQ ID NO: 79522 - DNA, 1545 bp, Saccharomyces pastorianus
atgtctcatgaagatgaagacactgatatggattggtatttgaaaacatcgggttcaaaagatttacgtaaagtggatgatatcgaaccaaattctgttgctgtagcagctgttgctgccgcatacaacagctcaatgagagaaaaagataagaggagctgtcataaaaaatcttctaatagtagatcagagaggaagaagcaccgtaaaagaaaaagctctagagaaagaaaagccaagataaaaatggtcctagatccgcagctgactacactggacgatggcataacgacaacagcatttttacctgatgatctcattgctgaaacagcttttgataagtatgttgatactgaaaaggcatacctagctaaacatccaagtaaatcgttagaagttaatgaggatgataaagaaaacaactttaataacaatagcagcacgctggttagaatttataccgatttagaggggataccaaatgacggcagctacataaagcgcactccaaagataccagaaaaggatgtgaaatcagacgacttgatattggcaccagaagaaaacaatggagataccgcattactgcgatccgatattgtgaaagcgtcagtaattgacggtgctatcacaaaatccatcggtaagaagttcactcccagcgaggaaaatgctttggaccaattcatcgaagaatacatgaaaataagaggcttggatagacgccaaatgtgcgagagaatttggtctacagacggagtcattagagatgggttttgggcaaatatcagcaaagttttaccttatagaacaaggtcctcaatatataaacatataagaagaaaatatcatattttcgaacagcgtgggaagtggacgccagaggaagatcaagaattggcaagattatgtttagaaaaagagggtcattggaccgaagtaggcaaattgttaggcagaatgcctgaagattgtagggaccgttggagaaactatatgaagtgtggttcaaagcgaggttctaaaagatggtcgaaagaagaagaagaattgttgactactgtagtaaatgaaatgattgaagaggcacaccaatatcaagggatgaaggcattggaggctgccaacaaaaatgatagatacaatcaaatgtattctaggggtccaaagggaaagagaattagcgataatcctaccttcaaagatatgatcaattggactgtcgtcagtgaacgcatgagcggaactagatcccgtatacagtgccgctataagtggaataaattagtaacagatgaagcagccagaagtatgttgagcattcctgtttctgaaaggaagtggctgctagaacgattgaaacagctacctaaaacgtcctattcaaatatcgactggaacagtatagctacctacaagcccggatatcctcgaactggtcttgaactgagattatgttacgagcagatgagagaaaagattcatgactttaaaggaaggtcaacagctgaaataattgattcattgttggaacaaatcaattaa

SEQ ID NO: 79523 - DNA, 501 bp, Saccharomyces pastorianus
atggtagggggttctcatgattgcgaaaatggcagaagcgaggacaaggaaaaagatgaaggaaatgaaacatatcaaggtcataggaaatcggttgttgttggcgataaaacttttgtggccagtagttctctgctcgctaccattgaggttattaaggagctaatggttctttccataaaccttccctcgatatacttatcaaatttcgagaagttgtgctatgacgcactacaatactacaacagtagcgccatggcatctgtcacacaacctggaaacccacttttaaaaacgggtagaaacttatctatcatgggagagtcattggactgtctcgcagaatttgtgattattgttcagagattttatcaaaggctttccaactctaacagggattttgagccattcgatgcgagtcattatacaaccctgttggggcaattccaggcctcatcgaataaaatatacatggccaatgccccacctccgcctgtataa

SEQ ID NO: 79524 - DNA, 2256 bp, Saccharomyces pastorianus
atgcccactaaaaattcaaagtcgatcgcagctgctccgaaaccaattttgaagaagagaaccgtcacagaaattatagaggacaacgctttatggaaactgaatgaggcaagaaaacacatgacagaaatgaaacatgcttcggtaataatggatcccaatggcaacaaaaacgtccatgacgatttcgatgctctggccgctcaagttaacgcccagtactaccattatcccaaagaatcgaacagtagcgttagtttgaagagtcaacactctgacaaaaaagataattctactataccgaatcctgtaggagaaaattcaaatggtggcggtgacaagggagaagaagacctgcatttaaagtcagcgcttcatgttcaaaacaataggtcaacggcacaatcaaacaaaagcatactagaaaatagtaccaatgatcgtaaggctaacttggatcaaaacctaaattctcctgataataataggttcccctcctcaacatcttcctccaatagagataatgaaaacaattccatgggattatcatcaatattaacctcaaacccaagtgaaaaatctaacaaacctactaaaaatagacatatacattttaatgacagggtggaacaatgtatggcactacgatatccagcttcacaatcggaggatgatgaaagcgatgatgaaaataaacaatatgttgatgttaataacaatgcgaacgttacaacaataaacaacaataggactccattgctagccactcagcataaatctattcctatcaactccgcaactgaacatttgaacaaaaatactagcgacgatgatacatcctcacaatcatcatcttcatcacattctgatgatgaagaacacggcggcctttacataaatgcaagattttccaggaggtctgactctggagttcattcaccaataacagataattcctctgtggcttcatctactacttcaagagctcatgtacgtcccataataaagttgcttcctgataccactttgaattatggatcagacgaagaatctgataatggcgaatttaatgggtatggtaatgctgtgtcacataacgtcaatacctccagaggctatgattacatatacgattataactcggtttacactggtgatacttccagttttttaccagtagattcatgtgacattgtagatgttcctgaaggaatggacttacaaacagccattgcagatgataatgcatcaaactatgaatttaacaatgcggtagaatccaaggaaaaacatgttccacaactacacaaagcttcagcaaataatacaacacgtcaacatggatcacatatgttattatatgacgacgacaattacagctcttcatcagatagcgaacagcaatttattgaagactcacaatacaatagtagcgacgacgaagaggaagaagatgacgatgaccaagaagtagacgataaccacgatgaaggactttcactgaggagaacattgtcacttgggaaatcaggatctaccaattctttgtacgatctagcacaaccatcactctcttcggcaactcctcaacaaaaaaatcctactaattttacagggggtaaaactgatgtagacaaagatgcacaactggctgtcaggccgtatccgttgaagcgcaattcctcttcagggaacttcatattcaattcagatagtgaagaagagagtagcagcgaggaggaacaaagaccattacccgctaacagtcagctggttaatcgaagcatattgaaaggcagtgtgacaccagcaaacatatcatctcagaagaaaaaagcccttccaaagcagccaaaagcgtccgatagttcacaaagctttagaattgtaaataatactccttcaccagccgaagtgggggcgagtgatgttgccatagagggttatttctctcctagaaatgaatctatcaagtctgttgtttccgggggaaatatgatggaccatcaagatcactcagaaatggacactttggcaaaaggatttgaaaactgccatataaataatgctagtaggctaaaggacaagaaagttgatagcgtgcaaaccactagaaaagaagcgtctttgacggattcgagtaatgaaaggttacacaaagtggtgcagaatgcaagaggtatggcaagcaagtacttgcactcttggaaaaagagtgacgtcaagccacaagaaaatggaaatgacagcagttag

SEQ ID NO: 79525 - DNA, 645 bp, Saccharomyces pastorianus
atgtcaacaaatctagcaaattacttcgccggtaagaaagatattgaaaacgagcatgtaaatagaaatgcgagccatgaaagtaatagcaaaagtgatgtcaaaattagtggtaacgataacgacaacgacgaagatatggggccttcagtatcgatggctgttcaagcgaaaaatgatgatgatttccataaatcaactttcaaccttaaaagaacaagatcaatgggccttcttgatgaatatattgaccctaccaagaaattgctaggaaggtcagacgacctatatgataacgacaatgaatattatgacaactcatctaataattcttcaagcaattcttcagatgatgattatgatgacgactatcaggaacactcaacctccgtttctccaccgccggcggataatgatagctacttaattccacaagatgataatgacgtagtggtagagccagaaagacatgttgactatctgtcacatgaatggaaagaatcagaaatttctaattcttggaaatatatcatcctaaagaaaaagaaaagagatgttgatctagtaaatgctgctaggttagaaaatgcctcatggagaacatgggcaaaagcaagaaacaacttgaaaaacagtgtcacctga

SEQ ID NO: 79526 - DNA, 894 bp, Saccharomyces pastorianus
atgttttttactggctcaaatgataaaactgtaaaaatatgggacacaaacaggtttgaagcggttcaagatataaacctggggtataaaataaatcaaattgataataacgttgtcgacgacagttctttgcttgtagtggcaagtgaagactactatccaagattaattgacctgagaaccatgaattcaggggtaactgcgcttggaatgggaaatcaaacacgaatgcaatcagaaattttatgctgcaaatttaaccccgtcagggaacagattattgcttgtggtgacatggagggtggggtaaaattatgggatctaagaatgaggaacagactgtattcagaattgaaaagaaataaaaataggttcaagactataaataacgatgataatgacgatcaaagcgatgtctatttcagctctaaccaatcaaaagcccatctgagatgttgcagtgacattgtttggaatagtgagggttcagagctatgttcagtcggcatggatggaaaactgaatgtttggaggccatttacggaaattctgcaaccagaaggtctagctagttattcccagttgggaacacaagacctgagccgtatcaaatacaaaaaaagagtatctcgaaggttgctttggtttgacaagtttttactgtgtattactgacaatggtgaagtagaaatatacaatacggaggaaaaaaaactttggaacaagctcgaatacccaatggttaatcaggtaaaaaaaaatcaggcttcgcattgtcagtttagttccatgattgtgcaaacaaatataatgaattcagttggcctcaaattgttctttggaactaacaacaacaccgttagcgacggtggatccatctttgaatgttcataa

SEQ ID NO: 79527 - DNA, 537 bp, Saccharomyces pastorianus
atggatccatttttagagttcagagtaggcaatatctcattaaatgaattttatagaagaactattcaaagcgaatttgagaggatccttgaagatcccctatcaaatatgaaaaactacagatttagtaaacaatcaaactatagtacaaaagaaaaaacaccgttaagtataggtgttaactgtcttgatattgatgatactggtcaagtgttattaggaggtggagatgatgggtcactttccatttggggtttagatgaatcattgcaccgcaatgatgaaggtgaacaggaattgatcaataaaaggctaaactatatcaagcgacagcctcaccaatcagatgatgagcctgctcaaataatgggttataaaaataaaagaacacgaataaacgacaacaacactatgagactggtgcacagttttcaaacacagagaaaccaatatcgaatgtctagacagtctagtgctgcagttcccgttcaaagatcaacatatcaaataaaacggatctcctatcgggttaagtga

SEQ ID NO: 79528 - DNA, 225 bp, Saccharomyces pastorianus
atgaactctttgtctactttggctcatcacggtatcatttttgtcccattgggttacaagaatgttttcgctgaattgaccaatatggatgaagttcacggtggttcaccatggggtgcgggtaccattgcaggcagtgacggttcaagatctccttccgccttggaattacaagtacacgaaattcaaggcaagactttctacgaaaccgttgcaaagttttga

SEQ ID NO: 79529 - DNA, 120 bp, Saccharomyces pastorianus
atgccaagagtagctatcatcatttacacactatatggtcacgttgctgccaccgcagaggcagaaaagaagggaattgaagccgctggaggctctgcagacatttatcaagtcgagtaa

SEQ ID NO: 79530 - DNA, 363 bp, Saccharomyces pastorianus
catccagacactgacagcccagtcaaggaatttttcagaagtatttggggaaaccagtttttgttctggtcaatcatttttggatttgtgtcagccttccccgtcgtctatattccggttattaatgataaagtgtttttgcataaaccaattggtgctgaatggggtctcgccattgcattcacaattgcattctgggtaggtgctgaactttacaagtgtggaaagaggcgctatttcaaaactcagagagctcacaattcggaaaacgatttggagcgaagcagtaaacacgatccatttgaaacgtatagcacatccacaacccttcaaagcgaaattaatatcagtgtcaagcattaa

SEQ ID NO: 79531 - DNA, 1098 bp, Saccharomyces pastorianus
atggttgcaggattcattattttatcagtcgtcatcaattgtgggggagccggtgtggacggctatattggcggcaaatattggcgcgaccctggttcatttgcagaaggcagcggtgccactcgtttcaaagggatatgttatattctagtatctgcatatttctccttcggtggtattgaattatttgttctttccatcaatgagcagtctaaccctagaaaatccactcctgtagccgcgaagagaagtgtatatcgtattttgatcatttatttgctgacaatgattctaattgggttcaatgttcctcacaataacgatcaattgatgggttccggtggctccgcaacgcacgcttcaccatatgtcttggcagcctctattcacaaggttagggtcatcccccatatcattaatgctgttattttgatatcagtcatctctgttgcgaactctgccctttatgccgcaccgagattaatgtgttccttggctcaacagggctatgctccaaaatttttgaactatattgatagggagggaagacctttaagggccttggtagtgtgctctcttgttggtgtcgttggcttcgtcgcctgttctccacaggaagagcaagcatttacatggttggcagccattgcaggtttgagtgaacttttcacatggtcaggcattatgctttcacacattcgattcagaaaagcgatgaaagtccaaggaagatcacttgatgaagtcggctataaggccaataccggtatatggggttcatactatggggtttttttcaatatgcttgtctttatggcccaattttgggtcgcactatctccaataggaaatggcggaaagtgtgatgctcaggcattcttcgagagttatctggctgccccgctatggatattcatgtatgttggatacatggtttacaaaagagatttcacctttttaaacccactggacaagatcgacttggactttcatagaagagtttacgaccctgaaataatgaggcaggaggacgaagaaaataaagaaaggctaaagaactcttcaatattcgtcagagtctacaaattttggtgttag

SEQ ID NO: 79532 - DNA, 171 bp, Saccharomyces pastorianus
atgtatggttctatagaggtaatatcaaagaaagttaaacagatgattgaggcttttggaggtgggaagtcccgctacattgttaatttcggtcacggtacccaccctttcatggatccagacgtcatcaagtttttcttggaggagtgccacagaattggttcgaagtaa

SEQ ID NO: 79533 - DNA, 558 bp, Saccharomyces pastorianus
atgagtaagaacatgaagtcattaagtagactaatggttgatagaaagttgggagtaaagcagacaaatggaaataacaaaaattatacagccactatagcaactgctgctgaaacatcaaaggaaaatagacacagattagattttaatgctttgaaaaaagacgaagccccctcgaaagagacgggcaaagatagtgctgtacacttagaaactaatagaaagccccagaatttccctaaggtagctaccaaatcagtctccgcagactccaaagttcataatgacatcaagataacaaccacagaatctccaacagcatcgaagaaatcaacttccacaaacgtcaccttacattttaacgcacagacagcacagacagcacagccggtgaagaaagaaacggtaaaaaattccggatactgtgaaaattgtcgtgtaaaatacgaatctttagaacaacacatagtttctgagaagcatttgtctttcgctgaaaacgatttaaattttgaggctattgactcgttaattgaaaatctcagatttcaaatatag

SEQ ID NO: 79534 - DNA, 1296 bp, Saccharomyces pastorianus
atggtttctccaacgaaaatgataataaggtctccgttaaaggaaacagataccaacttgaaacataataatggaattgccgcatcaactacagcagcgggccacttgaatgtgttttctaacgacaataattgcaacaaaaacaataccactgaatcctttccgaagaaaagatcccttgagcgcctcgagctccaacagcagcagcatttgcatgaaaagaaaagggccagaatagaaagggccaggtctattgaaggcgctgtccaagtcagcaaaggtacgggtctgaaaaatgtcgagccaagggttacgcctaaggaattgctggaatggcaaacaaattggaaaaagataatgaaaagagattctcgcatttactttgacattactgatgatgtagagatgaatacatataataagtccaagatggacaaacgcagagatttattgaaaagagggtttcttacattgggtgcgcaaataactcaattttttgacactactgtcacaatagttatcacaagaaggtctgttgagaacatatatttactaaaagataccgacattttatcgagagctaaaaaaaactacatgaaagtttggagttacgaaaaggctgccagatttctgaaaaatcttgatgttgatttggatcatttgagcaagactaaatctgcttctttagctacgcccacattgtccaatcttctacacaatgaaaaattgtatggaccaacggatagagaccccagaactaaaagagacgatattcactactttaaatatcctcatgtatacctttatgacctatggcaaacttgggcccccataataactttggaatggaaacctcaagaactaacaaacttagacgaactaccttacccaatattgaaaataggttcattcggaagatgcccttttataggggataggaattatgacgaaagttcttataagcgcgtagtaaagagatactcgagagacaaagcaaacaaaaaatatgcactgcaacttcgtgctctatttcaatatcatgcagacaccttactgaatacgtcatcagttaatgatcaaacgaaaaacctaatattcatacctcacacatgcaacgattctaccaagagcttcaaaaaatggatgcaagaaaaggcaaaaaattttgagaagaccgagttaaagaagacggatgatagcgcagttcaagatgttcgtaatgaacatgctgaccaaaccgatgaaaaaaatagtatattattaaatgaaactgaaaccaaagagcctccgttgaaa

SEQ ID NO: 79535 - DNA, 1029 bp, Saccharomyces pastorianus
atggttgaaatacaatatgtctgtggcggctcaaactctggaccatcgactattcaatgggtgagagaaacaaaaatttgtgtttatgaagcccaagttaccatacctgaattgtgcaatttagaattactagccaaaaatgaagaccaaaagaacgcctcacctatactttgcaggatgcccgcaaaatcaaaaattgatagtaactctattgatttaatcaccaaatatgaaccgatttttttaggttctggaatatactttctaaggccctttaacaccgacgaaagagacaaattaatggttactgacaatgccatgtcaaattgggatgagattacggaaacatattaccagaaatttggaaatgccataaacaaaatgcttagtttgagattagtatcgttacctaatggacatattctccagcctggtgactcatgtgtttggttggcggaagtggttgatatgaaagatcggtttcaaaccactttatcgttgaacatacttaattcacagagagcagagatatttttcaacaagacgtttacatttaatgaagataatggaaacttcctatcatacaaaattggggatcatggtgagtcaactgaacttggtcaaataacccactcaaacaaagcagatataaatactgcagaaattcggtcagatgaatacttaattaacactgataatgagctattcttgaggatttctaaggagatagcagaagtgaaagaattattaaacgaaatcgtaagtccacatgaaatggaagtaatatttgaaaatatgagaaatcaaccgaataatgattttgaactggcgttgatggacaagttgaaatcctcattaaatgatgataacaaagttgagcagataaacaacgcaaggatggatgatgatgaaagcactagtcatacaaccagagacatcggggaagcgggatcacaaacgacagggaatactgaatcggaggtaacaaacgtagcagctagtgttttcatcgaacatgatgagctttaa

SEQ ID NO: 79536 - DNA, 183 bp, Saccharomyces pastorianus
atgcaagctaaaattatatatgctctgagcgcaatttctgcgttgattccgttaggatcatcactattagcacctatagaggaccccatagtatcgaataagtacctcatatcttacatcgatgaggacgactggagtgataggatattacaaaatcagtctgtcatgactcgggatatatag

SEQ ID NO: 79537 - DNA, 549 bp, Saccharomyces pastorianus
atggggggactagactgccgatatctaatttgcaatataaaaaataggaattacgatatattgagcctaaccactatttcaactccacatagagggtcagaaatggccgattacgtagtcgacctttttgaaaatctaaacgccttgagagttagccaaaagatattgccaatatgtttctaccaactcacgactgcgtatatgaaatacttcaatttggttacgccaaatagtccaaaagtctcttatttttcatatggatgctcctttgtgcctaagtggtacaatgtcttttgtacgccctggaaaattgtttatgaaaggtctaaaggttgccccaacgatggccttgtaaccataaatagtagtaaatggggtgaatacagggggactttgaaggacatggatcatctggacgtcatcaattggaaaaataagttacaggatgattggagtaaattttttcataccactactgtcggagagaaggttgacatcctgaatttttacttgaagataaccgatgacttggcaagaaaaggattttaa

SEQ ID NO: 79538 - DNA, 378 bp, Saccharomyces pastorianus
atgaaaaatgataataaagctaatgatataataatagactccgtcaaagttcctgattcgtacaagcccccaaaaaatcctattgtattttgccatggtttatcaggatttgacaaattaattctaatcccttctgtattccatctgacaaacctaatttccaattcaatagtacgtaatatggcagaaaatttcatgcaggatgacgaagataagagtgataacaagtacacaaatttgttggagattgaatattggattggcgttaaaaaatttcttcaatctaagggatgtactgttatcaccactaaggtaccaggttttggtagcatcgaggaaagagcaatggcttggatgctcagttacagaaagaagtaa

SEQ ID NO: 79539 - DNA, 333 bp, Saccharomyces pastorianus
atgggtccttcagactcaccctacgctggtggcgttttctttttgtctattcactttccaactgattatccattcaagccaccgaaggtaaactttacgaccaaaatttatcatccgaatattaattcgagtggtaatatctgccttgatattttaaaggaccagtggtcaccggcgctaaccctttcaaaagttttgttgtctatttgctctcttttaacagatgctaatcccgacgatcctttggtccctgaaattgctcaaatctacaagacagataaggctaagtatgaagccaccgctaaggagtggactaaaaaatatgctgtttga

SEQ ID NO: 79540 - DNA, 1335 bp, Saccharomyces pastorianus
atggaaactcttttcaaaatcacacactcctctaactttaacacctcaatccaagcattagttttgattaatcaagtcaccgtcaaggcaaagttgaacagtgatcgatattatagaacattatacgaaagtttatttgaccccagactggtgaactcttctaagcagggtatttacttgaatttactatacaaatcattaaaacaagatgcactcaatgttgaacgagtagaagcctttgtcaagagaattcttcaagtttgttctcattggttgaacgtcggcgccattactggttttttcttcttattaatccagttggctaaaacagttccacaaataaaaaatcttctaaccaacacgccagttgattacgagtatgaatctgatgcagaagaggagcaagggaacaaggacataaaaaggaaggaatatgacggccgcaagcgtgatccaaagttcgccaatgctgaaaaatcttctttatgggaaatcaacaacttcatcaatcattttcatcctactgtgaaaacatatgcaaacgcctatgtgacaggagaaacagagcaaatagctaaaccagacctgggtctatttactctatcacacttccttgacagatttgtctacagaagtgccaagcagaccaatacagcaagaggtacatctattatgcaacctctgtttagtggctcacgagttaatgactctgtcttagttaaggcatctgatattatgcatgaccagggtcccgtgaacactgaagactggctaactaaaaaggtcgaagatatcaaacctgaagataaattcttttatcaatatttcactaccaagaaaaccgctgatggaaaaggaaagaaatctaacaaagcatctaatttcgatagtgatgacgaaatggatgaaaatgaaatttggagtgctttggttaaatcgagaccagatgttgaagatgatagcgacgacagtgaacttgacttcgctgaagatgatttcagcgattcaactagtgacgatgaacctaagctggacgcaattgatgatgaagatgctaaaagtgaaggcagccaagaaagcgatcaagaagaaggcctcgatgaggatattttttacagtttcgatggagaacaagacaatagtgataaaaaacgttccttcgctgaaagtagtgaagaggacgagagcagcgaagaagaaaaagaagaagaagaaaataaagaggtatccgcaaaaagagcaaagaagaagcagagaaagaatatgctcaaaagtctaccggtatttgcatctgccgacgattatgctcagtatttagatcaagattcagactag

SEQ ID NO: 79541 - DNA, 1710 bp, Saccharomyces pastorianus
  modified_base (1692)..(1692): a, c, g, t, unknown, or other
atgagtgagaacaacggcaatccgctggatttgtcttcactaagaaataagatttcgtcaaaattgcgagacaataacagcaaaaaggcgaagaaagcccacaaaggcaaggacgtgaaggccagtagtaattcaaagaaggtaaatgaggacatacgtcgtgaagcactagcattgggtgccagcgaagaagatctaaaattgattcaaggattaagcgatgatgatgacgctaagagcgaacaggaatttgatgccgtcgctgacgaggatgctggcgacaagggattcaagaacgatcttcaaaatttcatgaagaatgtaggatttgaccaacacaaactcgaagatgtagacgatgacgatatagaagaagaatccactagctccaaagaatctaaaatacccgctcaagagaaggaacatgcacaatcaaacattgcatcatcgacaatagagaaaacctcccaagagtcaatcgataatggcagtgaaaaagaagaaaacacagtagaagaggctaatcttagttcagaccaagagccagaatcagaatctgcagagaaagaaaagaaagaggagaaagatggaggtttaattactcaaactactattatctcatctgacaaacttattattccttacgataaaccatggtatgaaattccattggatcctcaagttggacaaaatgatgatgttgaagaattatccaaggaacagattgagaaactttttgaaagaggtaagcaaacgctagaagctgacaaccaaacttactatgaggagtttacaaaggactcatcgcaggccaagttcatgtctcaaatcctatcggacggtaccctcaacgataaaatatctgccgtaactttactcattcaagattcgccattgcataacactaagtctttagaaactctggtttcatattgtggcaaaaaatcgagaaactctgctttacagagtttaaacgctttgaaggatttattcttaaatggtcttttgcccaacagaaagctgaggtatttcaaaaatcaacctggcttatctatgatgctaaacaagagaactcttgcaattttctatttcgaagattatttaaagaaactgttctttcgtgttttagaagtcttggaagtgctttcccacgatccgattattcacgttagattacaaatattaaatcatgtatttgatttattgaccaaccaaccagagcaggaatttaatttattgagattaggtgtaaataaaattggtgatattgattccaaagtttcttcgaaggcgtcatatttactactgaagttggaacaagctcatccgaatatgaaatctattgtcattgatgctatcgttgatatcgcattgagaccgaatgcggattatcataccacttactattctgttattactttaaaccaaaccatcttaaaaagatcagaagactctgttgctaataaattagtaaaaacatacttcactttgtttgaaaaattcttgattaatactgataaagacaataccaatggcgttgttaagagtaactcaaagtcgtatgaggagaaaagaaagaagaactttaaaaagggtaaacacggtggtaaatctgtaaaaatcgaaaaaacggaaaatgaagttttagatgaaaagaactcaaaattattcagacctgcaggcatgcaagcntgcactgccgtcgtttac

SEQ ID NO: 79542 - DNA, 498 bp, Saccharomyces pastorianus
atgttactaacattcgataaattttttggaatatccaattccactaaatatcacttcaaacagggtaaaggtatttcttcttctgctattccatactctagaaatgctccagcttggttcaagttgtcctctgaatctgtcattgaacaaattgtcaagtacgccagaaagggtttgactccatctcaaattggtgtcttgttgagagatgctcacggtgttacccaagctcgtgtcatcactggtaacaagatcatgagaatcttgaagtccaacggtttggctccagaaatcccagaagatttgtactacttgattaagaaggctgtctctgttagaaagcacttggaaagaaacagaaaggacaaagacgctaagttcagattgattttgatcgaatctagaattcacagattggctagatactacagaactgttgctgtcttaccaccaaactggaagtacgaatccgccactgcctccgctttggtcaactag

SEQ ID NO: 79543 - DNA, 225 bp, Saccharomyces pastorianus
atgtatctggaccaccattatagatttgaccttttcgttggtgttttatatgcaatgacaagtttcatcatcataaactggtttgttttacaaccaaaagttttaaaaaaatggattcatataaggttaggcgacaaagtggatacaagaaacgaagctcgcacttttggcatgagagtattttgtggcaccaagatggaatggttttttgatccgcttgcatag

SEQ ID NO: 79544 - DNA, 594 bp, Saccharomyces pastorianus
atgataagtccttatgaaaatcaactaattgaactttattctgaatacgaccgacaaagccttctgccttttctgcaaaagcacaataactataatgtagagagtgccatcgaagtctgttcatcgaaacttggtttatataatgaactgatctatttgtgggggaaaatcggtgaaacgaagaaagcattgtctttgattattgacgagttaaaaaacccgcaattagctatagattttgttaaaaactggggtgattcagaactttgggaattcatgattaactatagtcttgacaaacctaattttactaaagccattttaacatgttctgatgaaaccagcgaaatttacctaaaagtgaccagaggtatgtccgatgatctgcaaattgacaacctgcaggatattattaaacatatcgttcaagaaaattcattaagcttggaagttagagataatattttggttatcattaatgatgaaacgaaaaaatttgccaatgaattcctgaaaataagaagtcaaggtaaattgtttcaagtagacgaaagcgatagtgaaattaatgacgacttaaatggtgttttataa

SEQ ID NO: 79545 - DNA, 1836 bp, Saccharomyces pastorianus
  modified_base (1810)..(1810): a, c, g, t, unknown, or other
atgactacggataatcatcagaatgattctgttttggatcaacaatcaggcgaacgaacaattgatgagagtaattccatctctgacgagaataatgttgataataagagggaagacgttaatgtaacttcaccaacaaaaagtgttagttgcatatcacaagcggaaaatggagtagcttctcgaacagatgagagtacaataacaggaagtgcgacggatgcagaaacaggtgatgatgatgatgacgatgatgaagatgaggatgacgaagatgaggatgacgaagatgagccccccttattgaagtacacacgaattagtcaactcccgaagaacttttttcaacgagactcgatctcttcatgtttatttggtgatactttttttgcatttggtacacactcaggcattctacacttaactacatgcgcattcgaacccattaaaaccatcaaatgccatagatcttcgatactttgtattaacactgacggaaaatattttgctacgggatctattgacgggacagtgattatcggatcgatggatgatccacaaaacattacacaatacgatttcaaaagacctataaactctgtagcgttgcactcaaattttcaagcatccagaatgtttgtttctggtggaatggctggcgacgtcgtactatctcagagaaattggctaggaaatagaatcgacatcgttttaaacaagaagaaaaagaaaaaaacaagaaaagatgacctatcctctgatatgaagggccctatcatgggaatttatactatgggtgaccttatattatggatggatgatgatggaataacattttgcgatgttcctacaagatcacagcttttgaatattccattcccctccagaatttttaacgtacaggatgtaaggccagatctatttagaccccatgttcattttttagaaagtgatcgtgtcgttatcggatggggatctaatatttggctatttaaagtttcctttaccaaggattcaaattcgatcaaatccggtgactctaattctcaaagtaataatatgagtcattttaaccctacgacaaacatcggatctctcttgtctagtgctgcatcgagttttagagggacacctgataagaaagttgaattagaatgccattttactgtgtcaatgttgattacagggcttgcatcgtttaaggatgatcagttattatgcctaggttttgatatagatattgaagaggaagcaaccatagatgaagatatgaaggaggggaagaattttagcaagcggccagaaaacttattagccaaagggaatgctccagaattaaaaattgttgatctttttaatggtgatgaaatctataatgatgaagttatcatgaaaaactatgaaaaattgtctataaatgattatcacctcggtaaacatatagataaaacaacaccagaatactatttgataagttccaacgatgccatcagggttcaagagttatcattgaaggatcatttcgattggtttatggaaagaaagcaatattacaaagcttggaaaatcggtaaatatgtaattggatcagaagagaggtttagtataggcttgaaattcctcaactctttagtaactaaaaaagattggggtacattagtggaccacttaaatattattttcgaagaaactttaaactcattggattccaactcatatgatgtcactcaaaacgtgctgaaagaatgggcagatataatagagattttgattacatcaggaaatattgtagaaattgcgcttgattccncaagaaacctgcctgggatcctctag

SEQ ID NO: 79546 - DNA, 1533 bp, Saccharomyces pastorianus
  modified_base (379)..(442): a, c, g, t, unknown, or other
atgatacatttgaatgagaatgttagtatggcatttaagaaaaacgaagtcttagagagcgttttgaatagattatgtgatgaatactactgtgttaaaaaatgggaatatgaaatgttgttagatttaaacattgaaaacaaaaacacaaacttcttgagtacagaagaattagtggaaagtgctattgtggagccttgtgaacctgatttcgatactgcgccaaaaggtaatgaggtccatgatgataattttgatgtatcagtttttgccaatgaagatgataataatcaaaatcatttaagcatgtcacaagctagccacaaccccgattacaacagcaatcacagcaacaatgctattgaaaatactaataatnnnnnnnnnnnnnnnnnnnnnnnnnnnnnnnnnnnnnnnnnnnnnnnnnnnnnnnnnnnnnnnngcgtgaagtatttgcaacagaatactgttgataatagtactaaaacaggtaaccctggacagccaaatatttctagtatggaatcgcaaaggaactcttcgactacagatttagttgttgacggtaattatgacgtcaattttaacggccttttgaatgattcatataatacaatgaaacagccgggcccattagattataatgtcagtacattaatcgataaacctaatttattcttaagtcctgatttggatttatctactgttggcgttgatatgcaactaccatcatcagaatattttagcgaagtattttcttcagctattagaaacaacgaaaaagctgcctcagatcagaacaaatcaactgatgaacttccttcaagcacggccatggcaaattcaaactcgataacgactgcccttctagagtcaagaaatcaagcacagccgtttgatgtcccacatatgaatgggttgctgagcgacacatcaaaaagcggacattctgttaattcctcaaatgctatatctcaaaattctctgaataactttcaacataattcggcgtccgtcgcggaagcttcgtctccttcaattacaccatctcctgtggcaataaactcaacaggcgctccagcgagatctattatatctgcacccatagactcaaattcctctgcgtcatcgccatcagctttagaacatcttgaaggtgctgtttccggtatgtcaccctcttccaccacaatattaagtaacttacaaacaaatataaatatcgccaaatcattgagtaccattatgaaacatgcagaatcaaacgaaatatcactgacgaaagaaacaataaatgaacttaatttcaattatttgacacttttaaaaaggattaaaaagactagaaaacaattaaatagcaaaagcattaaaataaacagtaagaatgcacaagaccatttagaaacccttctatctggggctgcagctgcagctgcaacttccgccaataacttggaccttccgactggtggttcaaacctcccagactctaataacttacacttacctggtaacacaggttttttttag

SEQ ID NO: 79547 - DNA, 1062 bp, Saccharomyces pastorianus
atgctttccattcagcaaagatataatatttgtctaatggcggagaggcacccaaagtggacgcaacttgaattggcaaaatgggcttatgagacgttccagctgccaaaaattccatcccaaggcaccatatcgcgtttgttggcaaggaaatcaacttatatgaattgtaaagagcatgaaaaagatgcgaatagattaaggaagccaaataatcttttggttcggaaaattttacaagaatggatttctcaaagtttgtggaatggaatccctataacgtcacctattattcaagacactgcacaagctgtttggcacagaattcctgcggagcatcgcgagggaaatggttcttttagttataaatggatttcgaattttttatcaaaaatggatgtcaatatttctgttttagacgaagagttacccaaaaccccaaaagtctggacatttgaagagagggatgtattgaaggcttatttctccaaaattcctccaaaggatttattcactttagatgaagcgtttctctcctacaacctaccgttggattatgctcaatatgaagcaagtagcattcaaaggcgtatagaggtggcaactgtcatgctgtgctccaatttagatggctctgaaaagttaaaacctgttgtcgtgggcaaatatgatagttacaaatcattcaggaattatttccccaatgaaccgaatgatcctgtgtcacaatcaatgttgggtactaagatggctaagaaatttgatatctcataccatagtaacaggaaagcatggctaacgagcaatcttttccacaactggttagtcaggtgggataagaggttggttgctgtgaataggaagatttggattgttttggatgattcttgctgtcatcgaataattaatttgcgccttcaaaatataaatcttgtatacacttcctcaaattcaaagtttttgccatttaactggggtgtctgggatgaattcaaacacgatacagaatacaacagtatcaggcgctcattgacttgcaaaatagaatttcgaagaatatcc

SEQ ID NO: 79548 - DNA, 174 bp, Saccharomyces pastorianus
atgtgtctgaccgcctggaacacgtatggatttcgttgttgcgatagatgggagcccagtagtggacaatctgacggtcaagatactaataattggttcgctcttccttctgttccgggctttgaaaatctttcaaggctggctaatatccaatcgtttttccagagacaataa

SEQ ID NO: 79549 - DNA, 2457 bp, Saccharomyces pastorianus
atgttcagtagccttgaccaggaatttcaaaatgttaatttatttgtttctttgaaaataaaggaaatttccactcgtattctttctgtggaatcatcaataatcgatttttcaaagggcttaaacaaaacttccagaaaccgtttcaaccttcgtaaactgaaaatcatcaacgctcatgtagacgattgtaactttgaactacaactactgtcaaggtttttgataatacaaaggattgccttgagaaagttattcaaaaaattactaaatgaatttcctcaagacagtgaaaatccattgactgcaagtgagtatgttacgtcgatcagaaactctgaaagtttacgaaatggacacgaaggcatatcatttatgaagcttgatttagatccatatcttttagaagtttcgctaattgttgatgttttacatgatttggaaaataaacttgaagatgcaactgagccagcagtggagcaaagatccctaaaccgctccgatgaatctgcccatacaagttcaagtccagaagccaacaattcttccttgccagcatctccaaggtcaattccgctactttcaaacaagaaaacttcaaaaatgattgattcttcgctagaattcgatactgccctcatagatcaagcagagaatctaggaaggtttttattatcgtccgaggacatagagggactgaagttcatgctattgaatattggttttaggataattgacgatagcatcatatccacttcaaaggagattttagacactacagataatattaattctgcgggcaacaaatctataagatcagcaaagtcattcaatgacttacaacataccttatccctatctaaacagaagaacatattaccctctgctgtacaatccaatgagaagtacgtttctattagtatactagatactgtcgggaacgaaggcagtcctttactacttactgatgataatataaatcagcacccaaacatgatagtcagctctactgctgaggatacttgtatagtaatgtgccacgtgggcggcttaagaaatcatgttgtcacaaatgatctgcttctaagggatgtaaagaatattctttcggccatgaggagtggcaacgacacaaaaaatattagcgctctcataaactcactggatccatcgccaatcagtaagatcgctttggagtggattcagtctcatcgattaaaaaccattgaaccaaagctagattttaaaagaacaagattcatatcagcagacaatggagatatatacttgatagctttggatgaatctatcactattggaaatgtatctacattaccctttccaattttagaaattaaaaagcttagtcgatccagtggtctttcacaaacggctattaatgaagacaataagtttaaacagttaatgaaatcagttgttacaaatgagtttcaatgcagcttaataccaccagacttaaccacatggaaaatatgtttagaattagtacactcaaatgaattgcaaaatgatttatttcaacttttactaagagatcaatataaattaaattccgatgattcgctatcacctgatgaatttttccagctgggcaaggatcgtctagaggaagagtttgacctgactgggccgataaacaactcacaaggtagtgttgacagcggcagaagagttcgaattaacaaaaaatcaaagcaatcggataatgaaactaaaaagaaacctattaggtattggaatgaatttgatgaacaagaagaggataatttagacaatgctttttacattgatactaatggaagcaggagtacaacagataacgaagaatccttacttttgagaaattctccgcctgattatgggtttattttgtttagccggaatttcatcaaccgcacatatgatttttgtgagaagttacgaaacttgattcgccatgacaagaaaacatcgccagatttgtttcaaaactctaagcatccgcattgttcatcaactaactatggttctgttgcgtcatttggttcacaatcaacttcagcgtcatatgatgacgttcaaaggtacttacagtatcaacagcaagacatagaggactcacaatctatctacgaatataggcatgacgaagttgttacatttttatacttgtctgcactgctaacatcttgcattatggcaagtgtatgtctgggaatcgttttatccttgtttcgcgggcaaagtaataatgagatagatttagaaattcaaaatattctcatagccattattatcatttccttactggtttcccttattttgatctgtgcgtgcctgttgttgttatttagtcggttcactttggcgccaatctggcattatgttggttgcttcacaatgtttttctcagttactggaacagtgtgctatggtatgattgaaattttcttttaa

SEQ ID NO: 79550 - DNA, 207 bp, Saccharomyces pastorianus
atgaaatttgaagatcgcatattgaataaatcaatccctgaatggaaattctacaatattaactatgagaagttaaaagtagccataaaaaaagtaacggcttatgattatgacaatccaaatgattcgggcatggagaagttgttgaatcaatgttcagtagccttgaccaggaatttcaaaatgttaatttatttgtttctttga

SEQ ID NO: 79551 - DNA, 714 bp, Saccharomyces pastorianus
atgttcttctgttctataagtttcgtccaatcgtgttattatccaccaatcagtatggcgagatccaaaatagtaatgattgtagctgctattattgcggctgatgttggcatggaagttggctttatattatggctgaggcccctttacgagaagggtgttaaatggcccgatctgatttttggtatttctgcatctgttttgttagctgtcggactgcttccaccttactttgaactagccaaaaggaaaggtcgtgttattggcatcaactttgccttcttattcatcgattcattaggtgcttggctatctatcatcagtgttatcctaggtaatatggatattatgggtattatattatactcaatagttgctggaatggagttaggaattttcgcgtctcatttcatatggtggtgtaggtttagattcctagctaaaggcaatacttttgacgaagaaagtggccaagctcaaaaggaagaacccgatgaaaaaatcgaacaagatattagcaagagtgaccaaaatgttactaactataacctggataactgttcaatccccgacgatgcttcgagctttgcagacgattttaatatacacgatagtactgatggggggacgttatcaagagcccaaacattgcatgctgtccatggagttgtggttagaacagatcctgatcgttattcgaggctaagtgtgtaa

SEQ ID NO: 79552 - DNA, 681 bp, Saccharomyces pastorianus
atgatgggtgaaaacggtaccggtaagaccactttgatcaaattactagctggtgctttgaagccagatgaaggacaagatattccaaaattgaatgtttctatgaaaccacaaaaaattgcaccaaagttcccaggtactgtcagacaattgtttttcaagaaaattagaggacaattcctaaatccacagtttcagactgatgtcgttaaacctttaaggattgacgatattattgatcaagaagtccaacatttgtctggtggtgaattacaaagagtcgccatcgtcttggcattgggtatcccagcagacatatacttgattgatgagccatctgcctacttagattccgaacaacgtattatctgttctaaagttatcagaagattcatcttacataataagaaaactgcgtttattgtcgagcacgatttcatcatggctacttatcttgctgataaggtcattgtttttgaaggtattccttccaagaatgctcacgcaagagcccctgaatctttgttgactggttgtaacagatttttgaagaatttgaatgtcaccttcagaagggatccaaactccttcagaccaagaattaataagctagattcccaaatggataaagaacaaaaatcatcaggaaactactttttcttggataacaccggtatttaa

SEQ ID NO: 79553 - DNA, 273 bp, Saccharomyces pastorianus
atggaagcaccgaaagtacgttttttaaccaagatatatcatcccaatattgataggttgggccgtatatgtcttgatgtgcttaaaactaattggtcacccgctttacagatcagaaccgtcctgctgtccattcaagcactgttggctagccctaatcctaatgatccgctagctaatgacgtcgctgaagattggataaagaatgagcaaggtgccaaagctaaggctcgcgaatggacgaaattgtatgcaaagaagaaacccgagtga

SEQ ID NO: 79554 - DNA, 2676 bp, Saccharomyces pastorianus
atggaattcaaaaaatgtactattaacggtgtgtcttatggacgtgcctatacggagccactagcaggcctgaggaagagacaaggtgttgatgtcgaatcggaaggtcgtcgcgaaaaggaagagatagcaaaagatagggaaacaatgatcgacgaattaagatcaatgagtgataatacacagttttgtccggaggatttaacttttgtatctaaggaaattgtggaagacttgaaaggatccagtggcgaccatcaacaaaagtgctgtgaacactttttgctggcgctcgcattatgtcattctgtccttgtggagccaaataaagatgatcctaaaaaactggacatcaaggcccaatcacctgatgagtctgccttagtttccaccgccagacaattagggtacagtttcgttggtagttcaaaaagtggattgatagtagagatccagggtgttcaaaaggagttccaagttctgaacgtacttgaattcaattcgtcgagaaaaaggatgagttgcattatcaagatccctggctctacaccaaacgatgaacctaaagcactgttaatatgtaaaggtgcggattccgttatctattcaagattagatcgcactcaaaacgacgctactttgttggaaaagacggccctccatttggaagaatatgccacagaaggtttaagaacattatgtttggctcaaagagagctcacgtggtccgagtatgaacgttgggttaagacttatgatgtggccgctgcatccgttactaatagggaggaagagttggacaaagttactgacgttattgaacgtgagcttattttgcttggtggtacggccattgaggatcgtttacaagatggtgttcctgattcgattgccctcttggccgaggccggtattaagttatgggtcctaacgggtgataaagtggaaactgccattaacattggtttttcctgcaatgttttgaacaatgatatggaattattggttgtgaaggcttccggcgaagatgtagaagaatttggtagtgaccctattcaagtggttaacaatttggtgacaaaatacttaagggaaaaatttggcatgagtggatccgaggaggagttaaaagaagctaaaagagagcatggtttgccacagggaaattttgctgtcattatcgatggcgatgcgctaaaagttgctttgaatggtgaagaaatgagacgcaagttcttgctactgtgtaagaattgtaaagctgttttgtgttgcagagtttctccagcacaaaaggctgcagtggtcaagttggtaaaaaagaccttagacgttatgaccttggccattggtgatggttcgaatgatgtagccatgattcaatcggcggacgttggtgttggtatcgcgggtgaagaaggcagacaagctgtcatgtgttctgattatgccatcgggcagttcagatatgtgacaagactggtattggtgcatggtaaatggtgttataagagactggcagagatgatcccacagtttttctacaagaacgttatttttacgctatccctgttctggtatggtatttacaataatttcgatgggtcgtatttgtttgagtatacgtacttgacattctacaatcttgcattcacatccgtacctgttattttactagcagtactcgaccaagatgtttccgacaccgtttcgatgctggtgccacagttgtaccgtgtgggtatcctaagaaaagaatggaaccaaaccaaatttctttggtacatgttggatggtgtataccaatctgtgatatgcttctttttcccctatttggcgtaccataaaaacatggttgtaactgaaaatggccttggactagaccaccgttactttgtcggtgtcttcgttacagcaattgcagtcacttcatgtaacttttacgtcttcatggaacagtatagatgggactggttctgtggcctattcatatgtctatcactggccgtgttttacggctggacgggtatatggacaagctcgtcgtcaagtaacgaattttacaagggtgcggcgcgtgtattcgcacaacctgcctattgggcagtacttttcgttggcgtgctgttctgcctactgccaagattcaccattgactgtatcagaaagatattctatccgaaagatatagagatcgttagagaaatgtggttacgcggtgattttgacctctacccacaaggctacgaccctacggaccctagcaggcccagaataaacgaaatacgtccccttacagatttcaaagagcccatttcactggacactcattttgatggcgtcagccactcacaagagaccatagtcacagaggaaataccaatgagtatactcaatggtgagcaaggctcgcgcaaggggtaccgtgtctctaccactctggaacgccgtgaccagctcagccccgttacaacaacgaacaacttgcctagaagatcaatggccagtgcccgcggaaataagctcagaacttcgctggatcgcacaagagaagagatgcttgccaaccaccaactggacacaagatactccgtggaaagagcacgtgcctcgctggatctgccgggtatcaatcatgcagagacgctgctcagccagcgcagcagggaccgttaa

SEQ ID NO: 79555 - DNA, 1779 bp, Saccharomyces pastorianus
atgtcaagtccctccaaacccacttctcccttcgtggatgatattgagcatgaatcgggatcagcatctaatggtctgtcgtccatgtcaccatttgacgatagttttcaatttgaaaaacccagtagtgcgcatggaaatattgaagtagcgaaaaccggcggttctgttttgaagcgacaatctaagccaatgaaagatattagcacacccgatctctcaaaagttacttttgatggaatcgatgattatagtaacgataatgatattaatgatgatgatgaactcaatggtaaaaaaaccgagatacatgaacacgaaaatgaggtggatgatgacctccattcgttccaggcaacacctatgcctaatactggaggctttgaggatgttgagttggataacaatgaaggtagcaacaatgattcccaggcagatcataagttgaaaagagtacgttttggtacaagaagaaataagtcaggtaggatagatataaataggtcaaaaacattgaaatgggccaagaagaacttccacaatgctattgatgaattcagtacaaaagaagacagtctcgaaaattcagccttgcaaaataggtctgatgagttgagaacagtttactataatttacccttgccggaggacatgcttgacgaggacggcttaccgttggcagtttacccgcgtaataaaatcaggactacgaagtatactccattaacattttttcccaagaacattcttttccaatttcataattttgccaatatttactttttaatactgttgattctaggtgcttttcaaatatttggtgtgacaaatccaggttttgcatccgttcccctaattgtcatcgtaattatcactgctattaaggatggtatcgaagattccagaaggactgtattggatttagaagttaataatacaagaacacatatcttaagcggggtgaagaatgaaaatgttgctgttgataacgtttccttatggaggcgtttcaagaaagcgaatacaagggcattgattaaaatttttgagtatttttcagaaaacctcactgctgctggtagagaaaagaagttacagaaaaaaagggaagaattacgaaggaagaggaactcgagaagctctgggctacgtgggtctctggattcaattggtagttacagaatgtctgccgactttggtcgtccctctttggattatgagaacctgaatcaaacaatgtcacaggctaacaggtataacgatggtgaaaatttagttgatcgaacgctacagccaaaccctgaatgtaggtttgccaaggattactggaaaaatgttaaagttggtgatattgttcgtgttcacaataacgatgaaattcctgctgatatgatcttattatcgacatcagatgttgatggcgcttgttatgtggaaaccaaaaatttggatggtgaaacaaatctaaaggtccgtcaatcattaaaatgtagcaagattattaagagttcaagagatattaccaggacgaagttttgggttgaaagtgaaggcccacatgccaacttgtattcttatcaaggtaatttcaaatggcaagatacacaaaatggaaacatcagaaatgagcctgtaaatatcaataacttattattgagaggttgtaccttgagaaacactaagtgggccatgggtatggttatttttactggtgacgataccaagattatgattaacgctggtgtcactcaatgcaaaaatccaaattcagaagattga

SEQ ID NO: 79556 - DNA, 150 bp, Saccharomyces pastorianus
atgcctgcaggtcctggtgacgataccaagattatgataaacgctggtgtcactccaaccaaaaaatccagaatttcaagagagttgattttctgtgattttgaattttgtactattgtttatcctatgtttcactgctggtattgttaa

SEQ ID NO: 79557 - DNA, 753 bp, Saccharomyces pastorianus
atgcctgttattgaaattaacgatcaagagcaatttacttacctaactaccactgcggccggcgacaagttaatcgtgctttatttccataccagttgggcagaaccatgcaaagcattaaagcaggtttttgaggccattagtaatgagccttccaattccaacgtctctttcttatccattgatgcggacgaaaactcggaaatttcagaactttttgaaatctcagctgttccatattttatcataattcacaaagggacaatcttaaaagaattatccggcgcggatccaaaggagtttgtgtctttattagaagactgcaagaactcagtcaattccggatcatcacaaactcatactatggaaaatgcaaacgtaaatgaggggagtcataacgatgaagacgatgacgacgaagaagaggaagaagaaactgaggagcaaataaacgctagattgactaaattggtcaatgccgcgccggtaatgttatttatgaaggggagcccctctgaacctaaatgcgggttttcgagacaacttgtgggtatcttgagagaacatcaagtaagatttggcttctttgatatattaagagacgaatctgttagacaaaacttgaaaaagttttctgaatggccaactttccctcaactttatataaatggggagtttcaaggcggtttagacattatcaaggaatccttggaggaagaccctgattttttgcagcatgctctccaatcttaa

SEQ ID NO: 79558 - DNA, 444 bp, Saccharomyces pastorianus
atgaagggtgactaccaccgttatttagctgaattttccagcggagatgcaagagaaaaggcaaccaactcctctttggaggcttataaaaccgcttccgaaattgccacaactgaattgcctccaactcacccaattcgtttaggtctagctttgaatttctccgtcttctattacgaaattcaaaactctcctgacaaggcttgccacttggccaaacaagcctttgatgatgctattgctgagttagatactttatctgaagaatcatacaaggatagcactttgatcatgcaattattaagggacaacttgaccttatggacctctgatatttctgaatctggtcaagaagatcaacaacaacaacaacagcaacagcaacagcaacaacagcaacaacaagctccagctgaacaaactcaaggtgaaccaaccaaataa

SEQ ID NO: 79559 - DNA, 189 bp, Saccharomyces pastorianus
atgtcccaaactcgtgaagattctgtttacctagctaaattagctgaacaagccgaacgttatgaagaaatggtcgaaaacatgaaggccgttgcttcatcaggtcaagagttatctgtcgaagaacggaatctattgtcggttgcttacaagacgtcatcggtgctcgccgtgcttcatggagaatag

SEQ ID NO: 79560 - DNA, 1212 bp, Saccharomyces pastorianus
atgaggacaatatcacttccacccatgcctattcttcccattataaagaacttttcaaaagatgttggtaatggtaggtacgagacgagtacctttctaggtttaatcaatcctaacaaagttgttgaagttgcaaatgtgcacgataatgatactgtaatcataaggaggggattcaccttaaattcaggagaatgttctaggcagagtactgttgacagtatacaatctgttctaactacgataagctcaattctttccttaaaacgagaaaaacctgataatttggcaataatcttacagattgattttacgaaattgaaggaagaagacagtttaattgttatttataacagcctaaaagctttaaccattaaatttgcgcgtttgcagttttgtttcgttgatcgaaataattatgttctggactatggatcggtattacacaagatagattcactagattccatctcaaatctcaaatcaaagagttcctcgacacaattttcacctatttggctgaaaaatactctatatcccgaaaatattcatgaacatttgggtattgttgctgtatcaaatagtaatatggaagcaaaaaaatccgtactatttcaagattacagatgctttacaagttttggaagaagaaggcccaatgaattgaagattaaggtgggctatttgaacgttgactacagtgataaaattgatgaactagtcgaggccagctcctggacttttgttttagaaactctttgctacagtttcggtctaagttttgatgaagatgatgacgatgacgaagaggataatgatgattcgaccgataatgaacttgataatagttcaggattactgtcggatgctgaatctacaaccactattcatattgactctccatttgataatgaaaatgctaccgcaaatatggtgaatgacagaaaccttctcactgagggtgaacatagcaatatagaaaacttagaaactgtcgcttcttcagtacagccagctctgattcctaatattagattttcacttcattctgaggaggagggtactaatgaaaatgaaaatgaaaatgatatgccagtattattacttagtgatatggataaaggaatcgatggcataaccagacgcagttcattctcgagtcttatagagagcggtaataacaactgtcccctccatatggattatatatag

SEQ ID NO: 79561 - DNA, 1614 bp, Saccharomyces pastorianus
atgatggaaactcctacagacaatatagtttccccttttcacaattttggtagctcgacacaatatagtggtaccttgtcgagaacgcccaaccaaataatagagctagagaagcccagcactctatctccattgtcaagaggaaaaaaatggacggaaaagttagccaggttccaaagaagtagtgctaaaaagaaaagattctcaccttctcctatttcctcctctacattttcgttctcacccaaatctagggtcacttcttcaaactcttctggcaatgaagacggtaatctaatgaatacaccttctacggtttccactgattatttaccacaacaccctcacagaacatcgtctttgccaagacctaattccaatctctttcacgcaagtaatagtaacctatcccgagcaaatgagcctccaagggccgaaaatttatcagataatataccacccaaggtcgctccatttggctatccaatacaaagaacctctattaaaaaatcctttttgaatgcttcttgtacgttatgtgacgagcctatttctaacagaagaaaggaagagaaaattatagagcttgcatgtggccacttaagtcaccaagaatgtcttattatctcttttggcaccacttcaaaggcagacgttcgtgcgctatttcctttttgtaccaaatgtaaaaaagatactaacaaagccgttcaatgcattccagaaaatgatgaactaaaggatattctaatttctgattttttgattcataagattcctgattctgagttatcaatcacacctcagtcccgctttcctccttattcaccactcttgcctccttttggtttatcctatacacctgttgaaagacaaacgatatattctcaagctccaagtctaaacccaaatctcatattggctgcaccccccaaggaaagaaaccaaattccacaaaaaaaatcaaactatacatttttacattcacccctggggcacagaagaattccgtccggagcaaactctatcttagcagacacctctgtagcgttatcagctaatgattctatttctgctgtttccaattcggtaagagcaaaggatgacgaaaccaaaataacgttgccgctgttaaggtcatattttattcaaattcttttgaacaatttccaggaagaattgcaggattggagaatagacggggactatggattactaaggttggtagacaaattgatgatttccaaagatggtcagagatatatacaatgctggtgtttcttatttggagacgcatttgtaatagcagaagtggataacgatgttgatgttttggaaactagactaaagaatttagaagtatttacacctattgccaacttgagaatgactacactcgaagcttcagtactcaaatgcaccttaaataaacaacattgcgccgatttatcagatctttacattgttcagaatataaattctgacgaaagcacaactgtacagaaatggatatctggtatattgaatcaggattttgtattcaatgaggacaatatcacttccacccatgcctattcttcccattataaagaacttttcaaaagatgttggtaa

SEQ ID NO: 79562 - DNA, 768 bp, Saccharomyces pastorianus
atgctaaatggagaagaggaaacaaaaattggtgagaatacattgcgctggatcgtagaacatgggcgtgcagatgagcaaacctttaatgcaaatggaatatcattaagtaggccgttaattcaaaagggacctttatatcaaaagccgcacaagcattctgttttctcgaagtactacgtcgttttgatatcaggttttattgtactgttccactgctttcatagatcaaccacaggttttgctaaggaagttttggagtatgctcattatgtaaccattccgattgacgattgctacctatactctgggaccacaacagaactagaccttctgcagagagatcgtacttttgacgaaataaactatggatcccacgctctcccacgagtttatggggacggatggcgatctgtagaagacgagagttcgcgatgctttacgctttggtttggaacaaggcgtgccctttctagcaatcgcttacagaagaaagggaatgaaaagcaatatacgcaagattatggtagacaagataataatattgacccaccttctgctccggaagctgacttgaataacactaatgttccaagtaacacagataagatccatttcactaaaaagttaggtgtgagcggcaagtcaatggttttcatggcaagatcaagacaggaaagagatctttgggtaatgtctatttactatgaacttgaaagactaagaagaactgcgtccacttcaaattcacggaatcaagctatgtaa

SEQ ID NO: 79563 - DNA, 2940 bp, Saccharomyces pastorianus
atggattctatcgttaatgttgttgaagacgatgttaagtacgcgcagagagtgactagcttcagctcaccacaaaatgcaaatgtcaaggtcttcaccattccccggcattccttcacagcgtttagactgtcgtatgtttcacctacagagctttcagcatgttcacaggtgactttgctaggtggtattccaaaacaatggtacgctgatcaaaataatcaagtctggaaacttctaactaaaatttcacttcggaaggttaggaagcaatctgacatgctaagaagatatggctatggaacaatttacaaaaagcgtgtagggaagatcccaactgcattgtacttaagaaagcactttacatggtcctatgaagataatacatcaattcacaacggtcatcgtcttaaagaagcggaaatggagatgaggagaactaggtcaagtcctgcgcagaaaagtgaatataaattaagtctacccagaaggtgtaggagttcttccgatcaaaatttcatgcgacaagagcttttgaaagaaaaaaaatcagagctttctagcaacaatagtttgcctctcatcgatacggcgcaagccgtggatatccacccagttttacatgaagaagatcaagaaaatacaaataaaaggaataaatcactcctttcgaatttgaaacgaaaagatctaggggaatcaaaaagcatatccagaaaagattattcgcattttgatagaataccgagcccctcttcagccagaagtgttggagaaacagactttaattataatagagaaccttctgaagatactttgagatatcccgacagtataattgaagtaacaaatcggacaagccccgccccaaatagtattctaagtagatcaggacaatttgttaactcgaatgacctaagtgatggcttttcaacatctaatactatcaataacgtgggattaaatgcaaatgaaaagattttttttaatgctctgcaaagtatggaaaaggaaaacttgatgctgtggaaaacatcccagaaatatgggacttatctcgatgaaagacgtaaaagtgcggatgcctttcaaaaaagagaaagaggttcatgcgtggacattggtaagttgcattcgagtcatcttccgtttattaatatcctacctccatggcctaccgaactgacggaggaagagagaattatacacgataggctagcctctaaacattctcatcatataagaaaacatgttcacaatgctcgaaacaaaactagctgcaaaatcaaagatagtgttggaactttcttaggtatgacaaattcactaacaaataaagcaactgtcaagaaacgcaccggtcagatccttaaaaaagaaaaaatgctagtgatggtaaaagaagctatacaaaataaagtaccacttcccaacttctctgaaaacgagtgctttgatacaagggtcagtgaacggtggaaagaatatattgttattgcaagatccacgggaagattcgatcccccaatacttttacagttctatcgtcatcgtcatatcccagaaatcgaagatatcagttccatagctacaaagtatcaccgcaacccgttggatttttttctttcaagaaattgtattgtaaaattctacagctctctagacaaaactatatccatacaaaagcctgataagcggttaggtgggtttatagacgagagtattgaaaagaaggacgaattaaaacactattcccccattaaaatttttattttaagatgcagcagtattcgctcgtctggtagatggtacaaatttctactagaatctttggaccgacaactatttacacctgccatcaacttgaaaattccattaactgagatctcgataaaaataaacttgaatgaaattatattccaaaagctaatagatttagggaagcaggaaaaagatagattaaaaatatgttttcttcaaagaggttataaaattttccagcatcccattttacgatatttcacagttgctattttggagaaattaaaattggcgcattatgactatctgattaggaaatgggatacagaaaatcctgtactaggatgtgccctgaaaagatatgatagattggagtggatcccatgtgatgaagattctctggtaactggaatttttgcattttgtcaatctcacctaatccagtacaggccaattgcgaatcgtttaagggaaacaaaatctttagaaggaaaatgtctgaaagaaccaacacctattgaaggttttttaataagattgactgacaagtatggctctgcgaggacaaattttggtaaatatagtatttcaacagcttacttcttcacgtgtgagaatttgcttttttcgatgaaagcatatagagcaaacccaccattgcctatagattcgatgattgacgacactagcacagaaatagaaaaagaagaaatttggaaacagtggaagaaaattccagaggtttacgagcaacaaccttatcccttagacgcaaatgatcacatcgagtggatgaactgtcaaacgacccaaagtgaatatgattccagagatttctatgctttccattgttttcatagaaggattgatcaaatactaaaaacggacaatgtgattgacctaactgaggtgaaagatatatatcaaggaacaaggactgattacgaagcagacaaaataaaatatggggtttacaaggaagctagtgaaatcttttggcatagaaactacgagattgatgatgtttcacggtccgtaataaatatagaaacctcaaatggactcctcttgaagctgcttgctacatcagcaacagttgctgaagagtgggtcataaagctgaaacaaatgatatcctattggaaaacaagcaaagggaagatacggagaggcttttaa

SEQ ID NO: 79564 - DNA, 381 bp, Saccharomyces pastorianus
atgccaatattttttgacgaagaatacaactctaaaaattgtgaagtagatgaaaccccggtaataaatcttgtcaaaaatattgtagagtcacttccgatcgacttgagaaggccactgagagaaaatatcattatagtaaacattgaagaggcgtatgaaacagcaataaggaatttattcaagttaaaaatggatacgtccaaaatccagtttcctaaaaattactggcaggctggttctgcatgcgcgaaaatacttctgcactataaggggagcaacattgtaggaatagaaagagacgagttttataacaatcctcatattgctcctgattggtttgattattacttcagaactggagtgaagcgcttacaataa

SEQ ID NO: 79565 - DNA, 204 bp, Saccharomyces pastorianus
atgtcgaataatattgtgatagtttatttgggagctaacagaatcgaaattggaagaagtgctgatgcgtgtccacaagaaattatcgcctggaaaacaggtagtattaatgaaaaaaatagggaagaattgaataaaatatttgaacattacttccaaatttgcaacatcttgggaaatcgagaagtacaagtgttatactag

SEQ ID NO: 79566 - DNA, 1647 bp, Saccharomyces pastorianus
atgttattcaattaccattctttagaggtattcttagataattatttgaaattggttgcagcaaatactgatgaaatggttcctcataatcttcttaagaagtccatttatcatagtttcttttcactagcaatttcatccacaaataacttatcgccctatgaaacttttaatcaccctattctttccttgattgctttagatatatcaaatggcgaagtttatgaggatgcaagagaccttttagtcaatttcaagaatcttaatcataatactgaaaactttcctatcttcatgaatacaaatgaaatgcttccagttttcttactctgctacaatgacgattcccaagaagaattcgaaaaatgccaggcgttagctaagaaactaaagaagcagttgtttattgagagtatcctgctagcactctggaaggattcttttatttacgacgaaaattcagtcatacagttacaccaaccagtaatgtcatcgcttgaagaaattctcttcttccttcaagctccaactcaaacaacactctctctggctttgataaactcgatctatgatatgcttgattatttggtttatgatttaatgataccattcatgaaaagaaaagtgtcattttgggaagagacaattttacagccaagaaagtcgctatttaatggtgcaaagtttttcaaaaaatttatgaataaaaatcctgtcaatggtaatcaccaacataattctctaacgagagacagccagggaaatgaatacttcgcatcgtcatcttctgagtttttgatgagaaagttagcagattggtctatgatgctatccgacttcaaaactgcttattccacatacgaatcgcttatggatgacctagatgcatttccaaagtacctggcatcatgcatcgaatggtgcgcggtatcactattgatgggtgcgcagagcatagtcaccgtgaaaatgatcaaaaacgatataaatcctcttatcgaaagggcattagccacatacgaaaactgctcacaaatacaacgtggtaaaggcaaagaatcaaactctttggatgttacagagccagtgcgttcgtatgagacacgttgtatgattttggcatctgaattatttttatctttaagcgatacgtggacatctaccccatacgctatccaatatttagaaacaattctagacgagtgcaagttgggaccttgttcacagataatggtttgggaaaggcttagtgactgctataatttgagagttgaccctagaatcaaacatagagttggagcaatgaagaaggacgcaaaagacaccgaagatctccgaggtgagcataagtatagcacagatcatttcacagacgaggacatattatcggaagggttaacaagaagacgcaaggcagctttttttaggttaatagcagctaagaagtgggcagagcaaaaacaatggagacaggtttcttggtgcttaaaagatattgaaagtacctattcagagatcgaatttttgcatggtaacggtttaattttaagcaagctaaaaaatcaactcaatttaaaggacgtggattctgcaccacggccctccgaaaagaatcttacaagaacaagtgttagctttattggatga

SEQ ID NO: 79567 - DNA, 156 bp, Saccharomyces pastorianus
atgactacaacagaaaaagagcccatcaaattcgaaattcatatcgtcaaggttcgtattgttggtttagccggtgtgcattttaagaaaatttctgggaacacttggttgtataaagagctggcttctagtatattaaaagaactaaagttataa

SEQ ID NO: 79568 - DNA, 2820 bp, Saccharomyces pastorianus
atggatgattatcacgtaaatactgccttctcaatgggcagaggtaaccagcaggatgatggcaatagtgaaagcaacagcatgcatacacaaccaagcactagggcgcccgctacgctgagaatgatgggaaaaagtccacagcagcagcagcagcagaacacaccgctaatgcccccggcggatatcaaatacaccaataatggtaactcacatcaagcagggcaaaaggagagacaagtagaacttgaaggtaaatcgagagagaatgcaccaaagccaaatactaccagccagagtcgagtttcgtcttctcagggcatgcctaagcagtttcatcgaaaatcgttaggagattgggagtttgttgaaacagttggtgcaggttctatgggtaaagtgaagctggcaaaacatcgttacactaatgaggtttgtgcagtaaaaattgtaaaccgtgctacaaaggctttcctacataaagaacaaatgctgccaccacccaaaaatgaacaagatgttttggagagacagaagaaattagagaaggaaatatctagggacaaaagaactattcgagaagcgtccttgggacaaatcttatatcatccacacatatgtagactttttgagatgtgcacgttgtcaaatcatttctatatgttgtttgaatatgtttcaggtggtcagctattagactatatcatccaacatgggtcaatacgagaacaccaagcgagaaagtttgctaggggtatcgcgagcgccttaatatatttgcattctaacaacatcgtccatagagatttgaagatagaaaatataatgatttcagattccagtgaaatcaagataattgattttggactttcaaatctttatgattctaggaagcagcttcatacattctgtggctctctatattttgccgctcccgagctgttaaaagcgaatccttatacaggacctgaagtagatgtctggtcatttggtgtagttttatttgttttggtatgcggtaaagtgccatttgacgacgaaaattcgagcgttttacatgaaaagatcaagcaaggtaaggttgaatatccccaacatttatccatcgaagtaatatcactgttatccaaaatgttggtagtagatccgaaaagaagagccacacttaaacaggttgtggagcaccactggatggtaagagggttcaatggtccccctccttcttacttaccgaaaagagttcccctaactatcgaaatgcttgatataaatgtcttaaaagaaatgtaccgtttagaatttattgacgatgtagaggaaacaagaagtgttttggtcagtataatcacagatcctacttacgttcttctctctagacaatactggactttagcggccaaaatgaacgcagaatccagtgataacggaaacgcgccaaacataacagagagttttgaagacccaactcgggcatatcatccaatgatttccatatattacttgacttctgagatgcttgataggaaacatgcgaaaattcggaatcaacaacagcgacagagccacgaaaatatagaaaagctttctgaaataccggaaagtgtgaagcaaagggacgtagaggtcaatacaaccgctatgaaatcagagccagaagccacgttggcgacaaaagatacctctgtgccattcactccaaagaatagcgatggcacagagccccccttacatgtcttaattccaccgaggttagcaatgccagaacaagcgcatacgtcaccaacgagtagaaaaagttctgataatcaacgccgtgaaatggaatatgctctctctccaactcctcagggaaatgactatcaacaatttagggtaccttcaactactggcgatccctcagaaaaggcgaagtttgggaatatatttagaaaattatcacagcgccgtaaaaagaccattgaacagacatctgttaatagtaataatagtatcaataaacctgtgcaaaagacgcattctcgcgctgtttcagactttgtccctggttttgctaaaccgagttatgattcaaattataccatgaatgagcctgtcaagacaaacgatagcagaggtggcaataaaggtgactttccagcattgcctgcggatgcagaaaatatggtagagaagcaaagggagaagcaaattgaagaagatataatgaaattgcatgatattaataaacagaataatgaagttgcaaaaggaagcgggcgggaagcttacgctgcacagaagtttgaaggaagcgacgacgacgagaatcatcccttaccacctctcaatgttgcaaaaggtcgaaaactacatccaagcgcaagagctaaatcagttggtcatgctcgtcgtgaatcactcaaatatatgagacccccagtgccttcatctgcctatcctcagcaagagcttatagatactgggttcttagaatcaagtgacgataacaaatccgatagtttgggaaatgttacttcacagacgaatgatagcgtcagcgtgcattctgtgaacgcacacataaactcgccatctgtggagaaggaattaacagatgaagagatattgcaggaagcttctagagctccagccggttctatgccatccatcgatttcccccgttctttatttttgaagggtttcttttctgttcagacaacttcatcgaagcctttgccaattgttagatacaagattatgtttgtactgaggaaaatgaatatagacgtcaaggaggtaaagggtggtatagtaagtatgcaaaggttctcttccaaataa

SEQ ID NO: 79569 - DNA, 996 bp, Saccharomyces pastorianus
atgacttttaaaggtagcatttctcgtgttgtgaataatgttttaacacctgtgacatcagatttattgcctaactccgctgcccctggccaattgacagtagcacaaattaacaagatgtatacatctatgggaggtatcgagcctaaggaactgtttgttgttggaaagccaattggccactctagatcgccaattttacataacactggctatgaaattttaggtttacctcacaagttcgataaatttgaaactggatccgcacaattggtgaaagaaaaacttttggacggaaacaagaactttggcggtgctgcagtcacaattcctctgaaattagatataatgcagtacatggatgaattgactgatgctgctaaagttattggtgctgtaaacacagttataccattgggtaacaagaagtttaagggtgataataccgactggttaggtatccgtaatgccttaattaacaatggcgttcccgaatatgttggtcataccgctggtttggttatcggtgcaggtggcacttctagagccgccctttacgccttgcacagtttaggttgcaaaaagatcttcataatcaacaggacaacttcgaaattgaagccattaatagagtcacttccatctgaattcaacattattggaatagagtccactaaatctatagaagagattaaggaacacgttggcgttgctgtcagctgtgtaccagccgacaaaccattagatgacgaacttttaagtaagctggagagattccttgtgaaaggtgcccatgctgcttttgtaccaaccttattggaagccgcatacaaaccaagcgttactcccgttatgacaatttcacaagacaaatatcaatggcacgttgtccctggatcacaaatgttagtacaccaaggtgtagctcagtttgaaaagtggacaggattcaaggcccctttcaaggccatttttgatgccgttacgaaagagtag

SEQ ID NO: 79570 - DNA, 3642 bp, Saccharomyces pastorianus
atggtgcagttagccaaagtcccaattctaggaaatgatattatccacgttgggtataacattcatgaccatttggttgaaaccataattaaacattgtccttcttcgacatacgttatttgcaatgatacgaacttgagtaaagttccatactaccagcaattagtcctggaattcaaggcttctttgccagaaggctctcgtttacttacttatgttgttaaaccaggtgagacaagtaaaagtagagaaaccaaagcgcagctagaagattatcttttagtggaaggatgtactcgtgatacggttatggtagcgatcggtggtggtgttattggtgacatgattgggttcgttgcatctacatttatgagaggtgttcgtgttgtccaagtaccaacatccttattggcaatggtcgattcctccattggtggtaaaactgctattgacactcctctaggtaaaaactttattggtgcattttggcaaccaaaatttgtccttgtagatattaaatggctagaaacgttagccaagagagagtttatcaatgggatggcagaagttatcaagactgcttgtatttggaacgctgacgaatttactagattagaatcaaacgcttcgttgttcttaaatgttgttaatggggcaaaaaatgtcaaggttaccaatcaattgacaaacgagattgacgagatatcgaatacagatattgaagctatgttggatcatacatataagttagttcttgagagtattaaggtcaaagcggaagttgtctcttcggatgaacgtgaatccagtctaagaaaccttttgaacttcggacattctattggtcatgcttatgaagctatactaaccccacaagcattacatggtgaatgtgtgtccattggtatggttaaagaggcggaattatcccgttatttcggtattctctcccctacccaagttgcacgtctatccaagattttggttgcctacgggttgcctgtttcgcctgatgagaaatggtttaaagagctaaccttacataagaaaacaccattggatatcttattgaagaaaatgagtattgacaagaaaaacgagggttccaaaaagaaggtggtcattttagaaagtattggtaagtgctatggtgactccgctcaatttgttagcgatgaagacctgagatttattctaacagatgaaaccctcgtttaccccttcaaggacatccctgctgatcaacagaaagttgttatcccccctggttctaagtccatctccaatcgtgctttaattcttgctgccctcggtgaaggtcaatgtaaaatcaagaacttattacattctgatgatactaaacatatgttaaccgctgttcatgaattgaaaggtgctacgatatcatgggaagataatggtgagacggtagtggtggaaggacatggtggttccacattgtcagcttgtgctgaccccttatatctaggtaatgcaggtactgcatctagatttttgacttccttggctgccttggtcaattctactccaagccaaaagtatatcgttttaactggtaacgcaagaatgcaacaaagaccaattgctcctttggtcgattctttgcgtgctaatggtactaaaattgagtacttgaataatgaaggttccctgccaatcaaagtttatactgattcggtattcaaaggtggtagaattgaattagctgctacagtttcttctcagtacgtatcctctatcttgatgtgtgccccatacgctgaagaacctgtaactttggctcttgttggtggtaagccaatctctaaattgtacgtcgatatgacaataaaaatgatggaaaaattcggtatcaatgttgaaacttctactacagaaccttacacttattatattccaaagggacattatattaacccatcagaatacgtcattgaaagtgatgcctcaagtgctacatacccattggccttcgccgcaatgactggtactaccgtaacggttccaaacattggttttgagtcgttacaaggtgatgccagatttgcaagagatgtcttgaaacctatgggttgtaaaataactcaaacggcaacttcaactactgtttcgggtcctcctgtaggtactttaaagccattaaaacatgttgatatggagccaatgactgatgcgttcttaactgcatgtgttgttgccgctatttcgcacgacagtgatccaaattctgcaaatacaaccaccattgaaggtattgcaaaccagcgtgtcaaagagtgtaacagaattttggccatggctacagagctcgccaaatttggcgtcaaaactacagaattaccagatggtattcaagtccatggtttaaactcgataaaagatttgaaggttccttccgactcttctggacctgtcggtgtatgcacatatgatgatcatcgtgtggccatgagtttctcgcttcttgcaggaatggtaaattctcaaaatgaacgtgacgaagttgctaatcctgtaagaatacttgaaagacattgtactggtaaaacctggcctggctggtgggatgtgttacattccgaactaggtgccaaattagatggtgcagaacctttagagtgcacatccaaaaagaactcaaagaaaagcgttgtcattattggcatgagagcagctggcaaaactactataagtaaatggtgcgcatccgctctgggttacaaattagttgacctagacgagctgtttgagcaacagcataacaatcaaagtgttaaacaatttgttgtggagaacggttgggagaagttccgtgaggaagaaacaagaattttcaaggaagttattcaaaattacggcgatgatggatatgttttctcaacaggtggcggtattgttgaaagcgctgagtctagaaaagccttaaaagattttgcctcatcaggtggatacgttttacacttacatagggatattgaggagacaattgtctttttacaaagtgatccttcaagacctgcctatgtggaagaaattcgtgaagtttggaacagaagggaggggtggtataaagaatgctcaaatttctctttctttgctcctcattgctccgcagaagctgagttccaagctctaagaagatcgtttagtaagtacattgcaaccattacaggtgtcagagaaatagaaattccaagcggaagatctgcctttgtgtgtttaacctttgatgacttaactgaacaaactgagaatttgactccaatctgttatggttgtgaggctgtagaggtcagagtagaccatttggctaattactctgctgatttcgtgagtaaacagttatctatattgcgtaaagccactgacagtattcctatcatttttactgtgcgaaccatgaagcaaggtggcaactttcctgatgaagagttcaaaaccttgagagagctacacgatattgccttgaagaatggtgttgaattccttgacttagaactaactttacctactgatatccaatatgaggttattaacaaaaggggcaacaccaagatcattggttcccatcatgacttccaaggattatactcctgggacgacgctgaatgggaaaacaga

SEQ ID NO: 79571 - DNA, 1938 bp, Saccharomyces pastorianus
atgagtaagagacaagaaatactttccaatttagcaacaattggtcaaaagtatactgactcaaatctttactgcctggagccatgtatacgatttgttttaggtgagaaggttagcctggaggacatcgaagaagggcaagaacccttattaaattttgatattgcagatcacatagattttgaagaattatcgtcactggatagttcatattccgattctcaaaacccggaaaacctttcttcgcaatcagatacagagtcatacaaggaagcactggtattcccagatacttcgaatcaaggtttggattttggaagaaatttagctcttgatacgacacctgttccaaatgggtgtggatcttgttggactgcaacaggtgaactcttctgcttctttgcaaatgagaaaaaacccgagaaaaagcaaaatgcaataattaaactctctcaaaaagaagcaggggtagagaagcatccttttaaaattgagcctcaagttttatatgataaggaagttgacagcagtgtaatcaccgctgctgatgaattgaaagctcgccctaagcggtacgtggacaccttggggctgggaggcggtactaatggggattcaagaacatactttgacgacgagacatcttccgacgattcatttgatagtgtcgcggacgattgggacgatatattgagaaatgatataatagtgagaacaaaaattccaatactaagaggtaattttaaagctttcagctcagtacattcggaatccgggaaaacagtagaatctaccaaaaaaaataagaatttagtgatttccaaaaatttcagcagtttattaagcgaccgcaaagaactagcattagaatacttatttatggatgccacaccggaaggatttgctagaaataacgctttggtggcagaaaagtttgaccttgatgaaattagtcattgttggcaaatattatgtgatatgttgatagaccaaagtgattacgatccttatactactatatggaataaccatcccatggggataaagtggttcataaaggaagcgattgtctactttgagaggcaacaaaatttacagatgctggccatgttatgctgtgtcatattaagcgccaggagaaaaaagattccagccggatattatgggcaagaattagagaatatggaaggaaccattgtgtttaatgacaacgaaagtcaaaacacatcattttggaaaggatctgatgctttttccaccaggtctaggagtagcactgttacaccaaatttttatggtaatcatttgagaggaaaaaacattcatggaggagacaactcctcaataaggtccgacgaccaccacgctaggttaaggacgcacaacactcttaatggtagtagtaaatttacggagccggcccaaaagcagggcagccgtgccatttcatccagcccttttcatagtagaatgcctgacatcaaagtcgagcttttacatgacgatattatagaagcttatgaacaagaagacctcttacatttagaggtatcagacataccaaagttccaaacttatatttatcaatattcaaagttactttttagatggggactgcctttagaaagggtcaaaattctaaaagttagtactgatttcagaagttcttatagttcccaaggcatcccccctaacaataacaagaaaagtccttacaatggtgtacttacgcactggatcgagaacaacgagtttggagaagaaaaattcctagcccgaaattgtaattactgtgatttaagagtgacaagaagtagcttcatatgtggaaattgtcaacatgttttacactcttcatgcgcgaggttatggtgggagattggtgatgagtgcccatctggatgtgggtgcaattgtccggaaatgttcgatgcctaa

SEQ ID NO: 79572 - DNA, 1431 bp, Saccharomyces pastorianus
atgtgcagtagtataaatgaaggtccgtataattcgcccacttttggaaaatcattatcgttgaaagtagatggtgggttcaatgccgtatctatcaatccctctggtagggatattgttttggccagtcggcaaggtctttatattatcgacctggatgatccgtttacacctccaaggtggttgcatcatattacgccctggcaagttgctgatgtacaatggtcgccacatcccgcaaaaccatattggatagtctcgacatcgaatcaaaaggcaatcatatggaacttagcaaaaccttcatcaaatgccattgagtttgtacttcatgggcactcaagagcaattacagatataaacttcaatccgcaacatccggatgttttagctacctgttcagtcgatacgtatgtacatgcttgggatatgagaagtccacatagaccattttattcgacaagttcatggagatctgctgcttctcaagtgaagtggaattacaaggatcctaacgtcttggcatcttcacatggaaatgatatatttgtgtgggatttgagaaaaggctccactcccctttgttctttgaaaggccatgtaagctccgtaaatagcatagattttaaccggttcaaatattctgaaattatgtcgagttcgaacgatgggacggtgaagttttgggattattcaaaaagtacgacagaatcaaagagaactgtaacaacaaattttccaatctggagaggacgttaccttccttttggagaaggttattgtattatgccaatggttggaggcaataacgcagtttatctggttaatctatgcgacgatgatgacagtgaacaaaataagaagacgaaactccagccaatatatgcatttaaagggcatagtgaccgagtaattgactttctttggagatcaagacatacgtgcgatggggattacgacgatcgtgaatttcaattggttacttggtccaaagactgcgatttaaaactatggccaatttctgatagtatttatgggaaagttaactttgacagaggcaagagacttgaggagaaactaccagattatgattattgctcatacaataaggaacctgaaaatagggaaaatgttcaaaagaatgagtttaggcgtttacgagaaaactttgtgacaacttctggattgaagaaaaacaagacaaaccacataacatggctctcaggaattagaatgaatagcgcaacttcacaagaggatttattcaatgagacaaaaatccaaaatttaggagaggaagtaagcgccattggtcacaagttcccaaaagtcgtttttgaaaagatatccgtgtccacaagggaattgtgcctgacgctaatggcccctggtcagaggaaaatcctgatgattatatattcttacgaataa

SEQ ID NO: 79573 - DNA, 579 bp, Saccharomyces pastorianus
atgcccggtgctgttgattttaaacatgtcaacaaaagaccggcctcgggtgcagagatatccagattcaaagccttagaaaacaccaactatgcagttgacttgggcagagccaaaggattttctttggttggtatcgaaggatctgatattgtagatggtaacaaattactgaccttagggttagtgtggcaattgatgcgtagaaatatttcgataaccatgaagacattatcctcaagtggtagagacatgagtgattctcaaatattaaagtgggcccaagaccaggtaactaaaggtggtaaaaactctaccattagatcatttaaggaccaagctttatcaaacgcccacttcttattggatgttctgaatggtatcgcgccgggctatgttgattatgatctagtcacccctggtaacactgaggaagaaaggtacgcaaacgcaagattggctatttctattgctagaaagttgggtgctttgatttggttggtgccagaagatatcaacgaagttcgtgcaagattaattattacttttatcgcttcgttaatgactttgaacaaatga

SEQ ID NO: 79574 - DNA, 144 bp, Saccharomyces pastorianus
gtcgttgttaatgttcattccgaggacattattgaaggtagagagcatttgatcctgggtttgatttggcaaattattaggagaggtttgttaagtaaaattgatattaagctgcatcctgagttatacctgtctacttggtag

SEQ ID NO: 79575 - DNA, 72 bp, Saccharomyces pastorianus
atgctgatagctattaaagccatagcatttaacggaactaaggaatactacaagggatatgaatatctgtag

SEQ ID NO: 79576 - DNA, 774 bp, Saccharomyces pastorianus
atgggggtacagttcggaaaggatgaggattcttcggatcctgaacccaacgactcacacttttcgaacgaaatggtgacgtctgcagagtctagcctgagaagcgatgctgtaactaagaggagaaaaagttattcggtacgcgataacatttctaacctcgagcaaaagatgtggaacgattgttctctcgttaagtcagatgagaattctaatcttctacctcagctaattaatttacagaacgcatatcaaattaacagaaataatgagactatggcaaaagtatccttatcagcacctttttataagacaactgatgatataaatttagtcattgaattagatccgataacgacgcctttacttaaagtgacttcgttgactgtatccttagaatcgtttgaaattataaatccaaaatataagactgaaggaaaaggaatagggagcaaaccaaaaggaaactcggtgtatgagaaacattttatttgtttcgatgagtgcaagtccgtatcggtgaaattacttcctccaagatcgcctacaaaccagattaccggacaattcaagacagatgtttttcaacataagtggatgataggactaaaatttgtaataattgcaaagacagaaagtatcactttggatcaattttatgaggataaaaagggcatcctattccattcaaaagagaatttagaaggtgaagagtttacatgttacgttcccattccaatactgtgtacatccgaagatttcatgggatggtaa

SEQ ID NO: 79577 - DNA, 1392 bp, Saccharomyces pastorianus
atgttaaaaagattaagcggggaatcgattattgcatttttgtttaactacgtggattctgtagaaaactctgcaatggaggagttttatggggatttcctgctatttttcagagaagtagcaaccaattataacctttattctgatgtttcgttgtctatattaaaacttgttgcccttatttctggaaaagtaagtaaaacgcagtttggagaacaaaaacgagttaggagggagatatctgatgtgtttttcaaatacctacctaatgcatttataaactttacgaacttatatcgtggccaccctgattcatttaaagatttagaatttgtagtatggcgtgttcaatatatcgtcaacgatcaaattggaggagacaagtttaatacaacgttagcgacaattgtaaatcaatgcctaaccccttatatcaaacccaaaagtgaaaaaactattccaggttatgtcttagaattggccgcggtcgtatcccatttaggttcaaaagttaaaagttggaggcttttaattgcggaattgttccaaaatgacaaaaaactttcggtaattggcagcgatcaaacttgggaaaagattatttacgaatggtccatttatccagaaaataagtcaaaaatcttgaacgatttactattagaaattggctccaagcgttcaagtgtgactccgactttaatcacgtttaacttaggaagcgattctgaagtcgagtacaagtgccaaaaccttttgaaaatatcgtacttgttgatggtatcgccaaatgacgcatatttgttgcacttttcctctttaataagttgcattttccactatttggtgtccaaagatatcaagctcaagggaagctgctggatcttactaagggttttacttttaagattttcagagtcccatttcaatgactactggtctatgatcagttactgtttacaaactaatttgcaagaattttatgaatcacttcaaatacagtcagaagtcgatccacaaacaatattgcaagtatgtaaaactttggatttgctactcttactcaacatggaaggcttcacctctacgaatgagtggatctttgttattgatacaataaattgcgtatataaaacgaactcattcgtcgcgctggtagatgaaatcgcagaattcaaagattacgaaataaccaaaactgatgatcttgaattaccgacaactttaaaagatggtctcccattattacgaggcattcacaaaatcgagagacacacgcaactaagaagcttcttccagaatttgagttatctacattatgagaaagtttacggactagggtcagttgatttatatggttgtggtgaagatctcaaaaaagatattctgtcatga

SEQ ID NO: 79578 - DNA, 510 bp, Saccharomyces pastorianus
  modified_base (489)..(489): a, c, g, t, unknown, or other
atgctcacatatgagttccaaatgcttgcttatgttttgaaaacaaacaatggacgcactaggaaagttttttccactgagcttacctcaataaaatcttcgaccatatggaagaatgaagacgtttccacatataaaagtttgctgttggttacattgatgagatttctaaatataaagagcaatacacatgcgaaaagtatcaggagtgctctgattcttttggatatcttactcgatggaactgagcaaaatttcaaggacattgtcatatttttgctgcaaatgtcgtctaaatatattgcagaagaaggaattgagcccgagttaatagcagtttccttgttagatattgtatcgaaggttctcagactatcacacgatagtggtattaaactagacatttttgatgacaatgctgcccatttaaaatatatcgatttccttgtaccagcgtttcaaatatgggatcctctagagtgcctgcanggcatgcagctgcactgccgt

SEQ ID NO: 79579 - DNA, 1539 bp, Saccharomyces pastorianus
atgactgcaaataaaggcagaagactgggcggactcacgtggttgactagaaagtttccgtcgttgaatgctgtacctcatctagtaaataaaataaaaatggaagcggaagagaacccaagtgaaactgaaaccaacgattctcatctagacaggaaaaaaagaaaagaagaagctttcaaggtcttattgcctgctgccaaagatttagtaacccctgaaccaggtctacttatccgatgccttgtcggttgtttagaagatgaaaatgatattcttattaaaaggagcgttttggaccttttattacagaggttgaggctagactctcctgttttgaatgttcttattacttctgaggataaaaagttattgataatgagttgttgtagaactactttgagcaaggatatgtctttgaacagaagaatatggaactggcttctcggtcctactgctgggggcatgctaaacaataacggcgggaactccatggaatatactacctcggttaagtcagcaaacgaggaaagtaatgtatattttacaaaatatggattaagcgcccttttagaaggtttaagcgaccttctttcagaagaagaatccgtgttaactgcattcaggataagtatggcagtaatggatagatgggaaattggctcacttgtaattcctgaattgttcatcccacttctctattcctcggaaaaattcaaacaaaacgaacaaataatgaaaacggcacgtactttctttgacaatactgaaacaaatattatatggggaaagctatttcaagaacttgaagacatcaaaaacctaaaaattttggatttcgtattaacaaattttaatattggaaacgacgaagagattatcgtacgccaccttcctttgatattattaactttactggcccttccatctaatgataaagatttcgacaatatttataagctccaaaaattttctttgtacaacaaattgttaaactatatccccgagagagcccttctccctctcagtcactcaaaactaaagcacgatgatgaagtaagctgcgaagaacttttggccaaaatacgtgggttttataccaatgtttctaatccatctagcattttagagaaagaaaatatagctgagcgtttgccaccctttacaacagaagatctaacttttttaatagcagacctgattcagaagaagcttctttcaagtttatgggacttggaaaatatcaatgaaagctccaaattatttatagctattttcgaaaagatacctgagtctgaagaacttaaaggacgatctcacataagctggtcggataaaaaaataactcagagcatatttgaggctattcccaggctttgtgaatctaataatgatgcaaaatcagaagaaatcgttggaattgtggaaatttttggtaactacttatattcacgcatggaattcattgaatcgatgaaattattgaaagtagtcatgatggccgtatggataatctttaaaagatccacgccatcaaat

SEQ ID NO: 79580 - DNA, 492 bp, Saccharomyces pastorianus
atgtccttaccactaaagccccttacaattgactcaaataataaacaactagactccaaacagaagaagtttcgtgctaatgtcgagcgagcattagaaagatttgactctgtaacagaatgggcggactatattgctagtttgggaacactattaaaggcgttgcaaagctggtcacctaaatttcagaatgtaaggtactatgttccttctccatatcaagtaagtcgaagattgacatcctcattatcgccggcgttaccagcaggtgttcatcagaaaactttagaagtatatacgtatatctttgaacatattggccttgaaactctggctacagaatgtaacatttggatcccgggaattttacctttgatgacttatgcctctatgtctgttaggtcacatttgatagagctttacgataactatatccttctgttgcctcaaacaacgttaagactgctcatcggggatcctctagagtcgacc

SEQ ID NO: 79581 - DNA, 594 bp, Saccharomyces pastorianus
atgttgaataatataagttcgagcaaatcggcaatattcaaacaaacagagcctgccatacccatatcggaaaatatatctaccaaaacaccagcaccggtagcttatagatccaacagacctacaataactggaggttctgctatgaatgcaagtgctttgaatacaccagcaacaactaaattaccaccctatgaaatggatactcagagagttatgtcaaagcgtaaattaagagagttagtgaagactgtcggaattgatgagggtgacggtgaaactgtcattgatggtgatgttgaggaattactattggatcttgccgacgattttgttactaatgttacagctttttcttgtagattggcaaaacacagaaaatcggacaatttggaggcaagagacattcagttacatttggagagaaattggaatattaggattcctggttattccgcagacgaaataagaagtacaagaaaatggaatccctctcaaaattataaccagaaattgcagagtatcacatcagataaggtagcagctgcaaaaaacaatggaaacaatgttgcaagcttgaatacaaaaaaataa

SEQ ID NO: 79582 - DNA, 456 bp, Saccharomyces pastorianus
atgtcttccaatccagaaaattctggtgttaatgcgaataataatacgggcactggtaacgctgatgcgatcacaggagctcagcaaaatatggtactgcaaccgagacagttgcaagaaatggccgctaagttcaggacattactgactgaagcaagaaatgtaggtgaaactactcctaggggcaaggaattgatgttccaagccgcaaagatcaaacaggtatatgatgcccttacactgaataggagaagacaacaggctgcgcaagcctacaataatacttcaaatccaaattcaagcaacccagcttctattcctactgaaaatgtccctaattcatcacagcaacaacaacaacaacaacaacaacaacaacaacagacaagaaacaacagtaacaaatttagcaatatgataaaacaggctcaccccggaagagaaccaagaatatga

SEQ ID NO: 79583 - DNA, 75 bp, Saccharomyces pastorianus
atattcgaacgtctcgtggaaagccttgaccgttgcgtcgttactcgtctctattcaaccctgtggtcctattag

SEQ ID NO: 79584 - DNA, 3087 bp, Saccharomyces pastorianus
  modified_base (30)..(30): a, c, g, t, unknown, or other
atgaaacaaatgagtgattcaccagatatngactacatgcaagaaaaggctgcccgcaatgaaatggtgttgttgaggaacgaggagaaggaagcattgcaaaagaaaatagaatatccctctttaacatttttaatcgaaaaggctgctggaatgaacaaaatacttgttgaccaaatcgagtatgatgaaactataagaaaatgcaatcatcccactcggatggagctagaggaatcctgtcatcacttgaacttggttttgctcgaccaaaacgagtactcaactctaagagaacctttggaaaatcgaaatgttgaagacttaattaacaccttgagcaaactaaactacattgcaattcctaatactatctaccaagatttaattggaaagtatgagaatccaaactttgattatctaaaggattctttgaacaaaatggattacgtcgcaatctctagacaagattatgaattgatggttgctaaatacgaaaagccacaactggattatttgaaaatttcttcagagaaaatcgaccacactgtagtgcctctgtctgagtacaatttgatggttacaaactatagaaatcccagcttgagctacttaaaagagaaagccgttttgaataatcatattttaataaaagaagatgactatagaaaaattttagcagtatcagaacatccgacagtgatccacctctccgaaaaggcatctttattaaataaagtcttggtagacaaggatgattttgcgaccatgtcacgctcgattgagaaaccaactatcgatttcttatccactaaggcgctatcaatggggaaaatactagttaatgaatctacgcataaaagaaacgagaaactattatctgaaccagattctgaatttttgacaatgaaagccaaggagcaagggctaattatcatttcagaaaaggaatattctgaactgcgggatcaaatagatcgtcctagcctagatgttttgaaagaaaaggccgccatttttgatagcatcatagtagaaaacatagaataccaacaactggtaaacactacaagtccctgccctcccattacttatgaagatttgaaagtatatgcccaccaattcggtatggaattatgcctccaaaaacccaacaaactttctggagctgagcgtgcagagcgcattgatgaacaatcaataaatacgaccagcagtaactcgaccacaacatcgagcatgtttacagatgcactagatgataatatcgaagagcttaatcgtgtcgaattgcagaataatgaagattatactgacataatctcgaaatcatccacagtgaaagatgctaccattttcattcccgcctatgaaaacatcaagaattctgctgaaaaattaggctacaaattagttccgttcgaaaaatcaaatatcaatctgaaaaacattgaagctccattattttcgaaggacaacgatgacactagcgttgccagtagcatagatcttgatcacttatctagaaaagcagaaaaatatggtatgaccctcatttctgatcaggaatttgaagaatatcatatactaaaagataacgcggttaatctgaatggtggcatggaagaaatgaataatcccttgtcagaaaatcaaaacttagcagcaaaaaccacaaacacagcgcaagaaggtgccttccaaaacaccgttccccacaatgatatggacaacgaagaagtcgaatatgggccggatgatccaacattcacagtaaggcaactcaagaaacccgctggcgatcgtaatttgattttgactagtagggagaaaacactgttatcaagagatgataatataatgagtcaaaatgaggcggtttatggtgacgatatatctgatagctttgtagatgaaagccaagaaatcaaaaatgatgtagacattattaaaactcaagctatgaaatatggtatgttgtgtattcctgaaagtaattttgtgggtgcatcatatgcaagtgctcaagatatgagcgatatagttgtgctttccgcgtcctattaccataatctaatgtcacctgaagacatgaaatggaactgtgtaagtaatgaagaattacaagcggaagttaaaaagcgtgggctccagattgcactaacaacaaaggaagataagaaaggtcaagccacggcatccaaacatgagtatgtgtcgcataagctaaacaataaaacatctactgcgtccacaaagtctggagcaaaaaagggacttgcagaagctgcagcaacaactgcttatgaagattccgaaagtcatccacaaatagaagagcagtctcatcgtactaatcatcataagcaccataaacgtcaacagagtctgaattctaattcaacctcaaaaaccacacgttcatcgaggaatacgccagcatctagacgagatatagtagcatcatttatgtcacgtgcaggatctgccagtaggacggcatctttacaaactttagcatcattgaacgaaccaagcataatacccgcgttaacccaaaccgtcattggggaatatttgtttaagtattatccacgcttgggaccttttggattcgaatcacgtcatgaaagattcttctgggttcatccatataccttaactttgtactggtccgcttctaatcccatcctagagaatcctgccaataccaaaacaaaaggtgttgccattctaggagtagaaagtgtcacagacccaaacccatatccaacaggattgtatcacaaaagtattgttgttaccacagaaactaggactattaagtttacttgtcctacaaggcaaagacacaatatttggtataattccttacgttatttacttcaaaggaacatgcaagggataagtttagaggacatcgctgatgatccaacagataatatgtattcaggaaagattttcccattgcccggcgaaaatacaaagagctccagtaaaagacttagcgcatcgagaaggtccgtatctacaaggtctctaagacatagagtaccacaaagccgatcatttggcaatttacgatag

SEQ ID NO: 79585 - DNA, 147 bp, Saccharomyces pastorianus
  modified_base (112)..(112): a, c, g, t, unknown, or other
atgaaggctcatcatgggaagctaaccggtaagcaaatgtttgaacaaggcgtggtgggcacaggcgacgagtatatggaagaggatgacgcgagtgtagatgacgtagccnagggacttgccaagaccgaaatagcaaatcaataa

SEQ ID NO: 79586 - DNA, 198 bp, Saccharomyces pastorianus
atggccaacgccggtccatactcctacggttctcaattcttcatcaccaccgttccatgcccatggttggacggtaagcatgttgtctttggtgaagttgttgacggttacgacatcgttaagaaggttgagtccttgggttctccttccggtgccaccaaggctagaattgttgttgccaagtccggtgaattataa

SEQ ID NO: 79587 - DNA, 456 bp, Saccharomyces pastorianus
atggaatgggagaccaagaaaatcttggctccattagcagaagacaagacacacgtcaaattattgactccagaagaaatcaaagtctctgctcaatgtaacagagtcgctgtttccgatgggcacaccgaatgtatctctttgaggttcaagaacagacctgctccatccgtcgagcaagtcaagacatgcctaaaagaatacgtctgcgacgcctacaaattaggctgtcattctgctccaaagcaaactattcatgttttggaacaaccagacagacctcaaccaaggttggacaggaacagagacagcggttacggtgtttccgttggtagaatcagagaagacccattgttagatttcaaaatggttgtcctttcccacaacaccattattggtgccgctggttctggtgtcttgattgccgaaatcttactagcaagaaacttgatttaa

SEQ ID NO: 79588 - DNA, 585 bp, Saccharomyces pastorianus
atggctggaaagaaaattgctggtgttttgggtgctactggttccgttggtcaacgtttcattctgttgttggcaaatcaccctcatttcgaactgaaagttcttggtgcctcttctagatcagctggcaagaaatacgttgacgctgtgaactggaagcaaaccgatttgctaccggaatctgctaccgatattattgtttccgaatgtaaatctgaattctttaaagagtgtgacatcgtcttttccggattggatgctgactatgctggcgctatcgaaaaggaattcatggaagctggtatcgccattgtttccaatgccaaaaattatagaagagaacaagatgtgccattgattgttcctgttgtcaatcctgagcatttggatattgtagctcaaaagcttgacaccgccaaggctcaaggtaagccaagaccagggttcattatctgtatttccaattgttccactgcaggtttggttgcaccattgaagcctttgattgacaaattcggtcctattgatgctttgaccactactactttgcaagcaatctcaggtgctggtttctccccaggtgta

SEQ ID NO: 79589 - DNA, 309 bp, Saccharomyces pastorianus
ggggatcttgcactaaagcaaattataacttttccatataatgttatctcattatccgcccataatgatgaattccaagtcaccctagataataaggaatcatctggtgtgcaaaaaaattttgccaaatttattgaatataacttaaatgagaatagttttgtcgtgaataatgaaaaatcaaacgaatttgacagtgccatcatacaatcagtacaaggggattctaacctggtgaccaagaaagaagaaatttacccgttatacaatgtttcctcgttaagaaaacatggagaacattactcgtga

SEQ ID NO: 79590 - DNA, 939 bp, Saccharomyces pastorianus
atgagcgtcattcatcctttgcagaatttactcacctctcgtgatggctcattagttttcgccatcattaagaattgtatcttaagcttcaaatatcaatcgccaaatcattgggaatttgctggaaaatggtctgatgatttcgacaaaattcaagaatcgagaaacaccactgctaaggagcaacaaggacaatccagcgagaacgaaaacgagaacaaaaaattgaaaagtaataaaggcgattccattaaaaggacagcagccaaggtaccatctccaggtattggcgccccaccgatatattcgtacataagaaatctgagattaacttcggatgaatcaagactaattgtgtgcgcagattctgacaagtccctcctagttttcgatgtcgacaaaacttccaaaaatgtcttaaagttgagaaaaaggttctgcttctcaaagagaccgaatgctatttctatagccgaagatgatactacagtcataatagctgacaaatttggtgatgtatattctattgatattaattctatcccggaagaaaagtttactcaagaacctatcctcggtcatgtctctatgttgactgatgtacacttgattaaagactctgacggtcatcaattcataattacaagtgatagagatgagcatattaaaatttcgcattatccccaatgtttcattgtggacaaatggctctttggtcataagcattttgtttcttccatatgctgtggcaaagactatttattattaagtgcaggtggtgacgataaaatcttcgcttgggattggaaaactggtaagaacttgtctaccttcgattatagtagtttgattaaaccttatttgaatgatcagcatttagcaccaacaagatttcagaatgaactcatgatctcattgaatttgcagttggtaaaatta

SEQ ID NO: 79591 - DNA, 4626 bp, Saccharomyces pastorianus
atggataagttgaatgacgatgaggaaagactaatggacgctcaacagcctgattctatcgccataactaaccaagatctagctgttaaagatgcgttcttagtgtttagagtcatggcgaaaatatgtgctaaacctttggaaacagaactcgacatgaggtcacatgccgtcaggtcaaagcttttatctcttcacatcatttactctattatcaaagatcatattgacgtattcctttcccacaacatttttctaccaggaaaggagcgtgtgtgctttatcgattcaattagacaatatttacgtcttgttttatcaaggaatgctgcctcgcctctagctccagttttcgaggttactttagaaattatgtggctattgattgctaatttgagagcagatttcgtgaaggaaattccagtttttttaacagaaatctacttccccatttcagaattaaccacttccacctctcaacaaaagagatattttttaagtgttattcaacgaatttgtaacgacccaagaactttagttgaattttacttgaattatgattgtaaccctggaatgccaaatgtaatggaaataactgttgattatttgacaagattggctttaactagggtggaaattactcagactcaaagatcatactacgatgaacaaatatcaaaatccctgtccacctacaatttctcacaattgccccttttgacttcttccaacttgtcttctagtcctgatgttggtcaagtcaatttactttttccacttgattttgctctcaaaatggtgtcgctaaattgcattgtgtcagttttgcgttccttaagctcatgggctcacaaagctttaaatccaaacacacacactgctaataaggtattactaaacacaacatcttcagctcgtcaagaatctagatcatctttgagtaacgacgtaaggtcttctattatgacaagtaatgatgacttcaaaccaacatatgaagacgaagaaagcagatcattgagcagtcaaaacattgacgcagacgaccccacacaatttgaaaatttgaaactaaggaaaactgctttatcggaatgtattgctattttcaacaataaacccaagaaagctattccagtacttattaaaaaaggatttttgaaagatgattctccaatttccattgccaagtggttattagaaacagaaggcctcgacatggccgctgttggggattatctaggcgaaggagacgacaagaacatcgctataatgcacgcatttgttgatgagtttgacttcactggtatgtccattgttgacgcattaaggtcatttttacaaagtttcagattgcctggagaaggtcaaaaaattgacagattcatgctgaaatttgcggaaagatttgtggaccaaaaccccggagtcttttcaaaggcggatactgcatatgtgctttcgtattctttgatcatgttgaatactgatttacattcgtcacaaatcaaaaataaaatgtctttacaagagtttttagaaaacaacgaaggtattgacaacggaagagatttaccaagagacttcttggaaggtttgttcaacgaaattgctaacaatgaaatcaagttaatttctgaacagcatcaggcaatgctttcaggtgataccaatcttgtccaacaacagcaatctgctttcaacttctttaattctcgtgatttgacaagagaggcatataatcaagtctcaaaagaaatttcatctaaaacggaattagtctttaagaatttaaacaaaaataaaggaggcccagacgtctattatgctgcttcccacgttgagcatgttaaatcaatcttcgagacactatggatgtcctttttagcagctctaacccccccatttaaggattatgatgacattgacacaaccaataagtgtttagaaggcttgaaaatatcaattaaaattgcttctacttttagaatcaatgatgctagaacctcctttgtaggtgcgttagtccaattttgtaaccttcaaaaccttgaagaaatcaaagttaaaaatgtcaatgcaatggtaattcttcttgaagtcgcgttatcagaaggaaattacttggagggatcgtggaaggacattttgctggtcgtgtctcaaatggaaagactacaattgatatccaaaggtatcgacagagatacggttccagatgttgcacaagctcgtgttgcaaaccctagagtttcttacgaatcatcaagatccaataatacatctttctttgatgtttggggcaagaaggcaactcccacagaattggctcaagaaaaacaccataatcaaaccttatcacccgaaatctctaaattcatttcctccagtgaattagtcgttttgatggacaatatatttaccaaaagttccgagttatcaggtaatgctatcgttgattttatcaaagctttaaccgctgtatctttagaagaaattgaatcatctgaaaatgcttccacaccaagaatgttttccttgcaaaaaatggtcgatgtatgttactacaatatggatcgtatcaaactagaatggacgccgctttgggctgttatgggaaaagctttcaacaagattgctacaaactctaacttagcagtagtatttttcgctatcgattccctgcgtcaattgtctatgagatttttagatattgaggaattatcaggttttgaatttcaacatgattttttaaaaccttttgaatacacggttcaaaatagtggcaacactgaagctcaagaaatgattattgagtgttttaggaacttcatattgacaaaatcggaaagtatcaaatctggctggaagcctattcttgaatccttacaatatacggctcgctcaagcactgaatccattgtattaaagacgcaattgctggttagcaatgatattgtgaccaatcacttcgaaaacgtattctctcaagaagatgccttttctgagttagttggtgtcttcagagaaatcaccaaaaataagagattccaaaagctatctctacatgctttggagtctctaagaaagatgactcagaacgtcgcagacatctgtttttacaatgaaaataagactgaagaagaaaaaaaacataacgatgctttacttcgtgggaaagacatattccaggatgtgtggttccctatgttattctgcttcaatgatacgatcatgacagctgaagacttagaagttagatcacgtgcattaaactatatgttcgatgccctagtggcatatggtggtaaattcaatgatgatttctgggaaaagatttgtaagaagttactatttcctattttcggtgtattatccaaacattgggaagtcaaccaattcaatagtcatgatgatttaagtgtttggctttcgaccacgttaattcaagccttaaggaacttgattgccctttttacgcattactttgaatcgttgaacagaatgctcgatggatttttgggtctgctggtatcctgtatttgtcaagaaaatgacactattgctagaattgggagatcctgcctgcaacaattgatattgcaaaacgtatctaaattcaatgagtaccattggaatcaaataggtgacgtattcgataaattgtttgatttaaccactgctaatgaattgttcgattatgatccgttacagcaaggaagaaaatcatctgtatctcatcaccaaacaactgatgataccagccaacactcagatgatgatagcaacgacagaagggagaacgattctaatatcagtgagacggtcgaaagagcgcatcaagaagaatccagcgaagacgttggtggtgacatggttgaaacactcaatgggcaaactaagcttaataatggcaattccgttccgacggtaaaggacgaattgaatccaaagcccgctagtctaagtatccccaagaaaactaagcacatgaaacgaaacgaaagtaacgaagatatacgtaggagaataaacatcaagaattctattgttgtcaaatgtgttttacagcttttgatgatagagctgctcaacgaattattcgagaacgaagattttgcccactgtatcccttacaaggaagccattagaattacaagattgttggagaaatcgtacgaattttctcgtgactttaatgaagattatgggttaagaacaagactagtagaggctcgtgtagttgataaaataccaaacctgttgaaacaagaaacgagtgctgctgcagttctccttgacattatgtttcagttgtatctgaacgatgatgagaagaaggctgatttaataactcgtctgatcaccatttgcatccaggtcgtagagggttatgtttctttggatgatagaaccatggaacgtagtatcaatgcctggcgttcagtgatagttgaaatattacaaggttactacgaatttgatgatgaagactttagactatactgtcctgctatgtatgctctggtgattcaaatattagataagagcgttccaacggagttgagacatgctataaaacaatttctaagcagagttggtgaattatacctttctactgattaa

SEQ ID NO: 79592 - DNA, 1113 bp, Saccharomyces pastorianus
atgtctgaacagaattcagtagtaaatgctgaaaaaggggatggcgaaatatcttcaaatgtagagactgcttcttcagtcaatccgtctgtgaaaccacagaatgctattaaagaagaagctaaagagacaaatggtgaagatcaaaaatgcaaagggccagaaaacgctggcagtacggcagaaacaaaagaaacaagtaacgacgctaccaacggaatgaaaacgcccgaagaaacggaagatacaaatgacaaacgccatgacgatgaaggtgaagatggagatgaagatgaagatgaagatgaagatgaagacaatggggacgaggatgatgaggacgtggatagcagtagttccgaaaccagttccgaagacggggaagattctgaatcagtctcaggggaaagtactgagagtagctctggagaagatgaagaatctgatgaaagcgatggaaatacatcaaacagctcctctggtgatgaaagcgggtcagaagaagaagaagaagaagaagaagaagaagaagaagaagaggaaaatgctggcgaaccagctatcgctcatcaagatagtgttcccaccaacgattctactgccccaaggtctacccatacgaggaacatatcaccatcttcaaatggttcgaacacaaactcaaccataattttagtgaaaactacgttggagacaattttaaatgataaggacattaaaaagaattcgaatgctcagaaggctatcgaaaggacattacaaaaatttaaggaatttgatccgcaaaccacgaataacccacattacgtggattcaatactagtattcgaagcactaagggcaagctgtcgtaccaaatcctccaaagttcaaagtttggctttagattgcctgtcaaaattgttttcttttagatcgctagacgagaccctgttagtgaatccacccgattctttagcctctaatgatcaacgacaagatgctgccgatggaataacgccgcctccaaaacaaaaaattatagacgctgcaattgatactatttcagactgttttcaaggtgaaggcactgatgaccgtgtggaactacaaatcgttagagctttatctagt

SEQ ID NO: 79593 - DNA, 534 bp, Saccharomyces pastorianus
atgaatttgcctaaggatgagaacaatcctaactcagatgaccccgattgggtcaccggtagagaagacgacgaaataagcgcagagttaagagaattgcaaggcactttaaaacaagtgaccaagaaaaaccaaaagaggaaagcccaattgattccactagtggaaagacaactagcatggcaggaatactcatctattttagaagatttagacaaacaaatcgaccaggcttatgtcaaacgtattcgcgtacccaagaaaagaaagaagcatcatacagcagcttcaaataatgtgagcacaggaaccacgtctcaaatagcacaacaaaaggctgcaaactcaagtttaaaatcgcttctggataagaggcaaaggtggattaataagattggtccattgtttgataaacctgaaattatgaagagaatccccaatgaaagcgtattcaaggacatggaccaggaagaagatgaggatgaagccgatgtatttgcacaaaacactaataaggacgtggaactaaattaa

SEQ ID NO: 79594 - DNA, 1515 bp, Saccharomyces pastorianus
  modified_base (1494)..(1494): a, c, g, t, unknown, or other
atgcctagacatggaagaagaggaaaactgccaaaaggcgagaaacttcctaaaaaggagggaggcgacaatactccgtcaaagcttttatcgtcaatgcttaaaactttagatttgaccttcgagcgtgatatcggaatgctcaatggcaaaagtgttaggtccatacccaataaaaaaactttacttgaattgcaaagtcaattggatagtctcaatgaaatactgggtacaattgcccgaggtgatcaagagaccattgaagcgcttcggaaaataagagacagtaaaaatgagaagcaagcaaacgatgaaaagcaggaaacttcaaatgcagacgggcagcacgaaagttctactgctactgaagaaacgaatataattgataaaggggtacaaagcccaccaaaacctcctccttctaatgaaatctccggcacaattgagaacgatgtagaaagcatcaaacaagcggctgataatatggctaaagaagaaattaatgaagacaaagatttacaagttcatagagatcaacccagagaaaagaggccgttcgattctgaaactgaaaatagggccactgaaaatgaaaacacacagaggccagacaataagaagcaaaaaattgacgttgacaaaatggaaaacgatccaactgttaaaaatccaaaatcagaatttgtagtatcgcaaacgttaccacgagcagcagcagcactcggcttattcaatgaagagggactagaaagtacaggagaagacttcctaaaaaaaaaatacaatgtagctagttatccaacaaatgatttgaaagatctgttaccaggtgaattaccggatatggacttttcgcatcctaaaccaaccaaccaaattcaattcaatacctttctagcatttgtggaaaattttttcaaagatcttagtgatgacaacttaaagtttttgaagatgaaatatattatacccgatagcttgcaatttgacaaaacttatgaccctgaggtaaacccgtttattataccgaaactaggccctttgtacacagatgtttggttcaaagatgaaaacgacaaaaattctgcctataaaaaaccttcaccatattcaaacgatgcatctactatactaccaaaaaaaagtgccaacgaacttgatgataatgctttggaatcggacagtatatcgtgtgggcccttattatctaggctattgagtgctgtattaaaagatgacaatgacaaatcagaattgcaatcttctaaaataatacgggatggcggactaccgagaaccggaggggaagacgatatacaatcgtttagaaacaacaacaatgatagtgtagacatgacattatctcaggagaacgggcccagtgttcaaacacctgacagtgacattgatgaggaagcatctttccaaacaaaactggcagaaaataaaggcagtaatggcggtactacaagtacgttaccccaacaaattggngtggataacaaatggaattaa

SEQ ID NO: 79595 - DNA, 138 bp, Saccharomyces pastorianus
gcatgctgcaggtcgtttgaatctcaaggttttgaaaaggacaagattgtcgaagtgttgagacgattaggcgtcaagtccttagaccccaatgacaacaacacagccaaccgtatcatcgaggaattgttgaagtga

SEQ ID NO: 79596 - DNA, 516 bp, Saccharomyces pastorianus
atgtctagggctaagagaattatgaaagaaatccaagctgtgaaggatgatcctgcagctcacattactcttgaatttgtgagtgaatctgatatccaccatttaaaaggcacatttttgggcccacctggaacaccttacgagggtggcaaatttgtcgtggatatcgaagtacctatggagtatccattcaaaccaccaaagatgcagttcgacacaaaagtataccatccaaatatatcatcagtgacaggtgccatttgtttagatattcttaagaatgcatggtcgccagtgataacactaaagtctgcattgatttcgctacaggcgctactacaatctccagagcctaacgatcctcaagatgcagaagtagcacaacactatttacgggatagagaatcttttaataagactgctgcactatggacgagattataccacacaggaacttcctatgatcaaaaaggcaatgtagaggagtctgatttatatgggatgaccacgatctga

SEQ ID NO: 79597 - DNA, 1392 bp, Saccharomyces pastorianus
atgcctaccattttatacaacaccaattccagtttaattaccaagtaccgaaggccaaatgcctcaaatcaatataaaggctttctgtcaaaaaaaggacatacacgactgaattctaaatcgagtggagatatttgggagaaagattgtagtcatacgaaaaattctggtaatgatgtttcgtttgagagtgaatttgaaaaagattcggttgagtatctaagggatttatgtttctctatatacccaaattcattacatcagaaaatcagaagcatagaagctttgccagacctacaggtaaatacctttattgccttaattttccaaaatttcgttaagtcttggtatggtatcaaaatacccactgatgattccaagtttttaaccgaactatataacttagttcaagatttaataacatatttgaagagttccaaaatcaattaccatgcccttttactcgattatattccctgcttgctttcgtctcacttgaaagcattaaatgactcatctcaaaataacgatttagtttatgaacagtactgtaagctaactttgtatgattcgaaacgatatccaatgctattcactgaaatcatacaaagtaaaatgagcaccaaatctctactacagagaagctttttggatagctttttaaatgaacttgtgttcgggcatatttttaattcaatagcggaaccatattatcttctggagggcttgaataaaatttgcataagaataaagctaaattctgcaggaaataccagaaacgaggtgactcatggaaagcctaaatgcgatccctggttgtttgtttccaatgtaaagcacaaaatattgcaaatgaccaggcttttagcttattcaacttcaacagaagcagcaaatatgaacactgccgaaattcaagaaacagcatttctacaaagatatatttttacttttttcaccgatgattttttcaaattatctatgaggaagccattcctattctcaatatgcagaacgcttcagcattggatctctaaatcaaatgcgttaaacagggtcatgtatagaacatttgacaatattgttcaaactaaaattaccagccctgtgacaattggcaacttattctcattattacgacattctttgtttcctaatgacaatatgatggggccaccaagagtattaccagtgggtgatgcttttctagagttcagagaagagtgtatttccaatttatgggatgtttgtatgacttataaacttgatcatatcctcgctatcaaaaggtctgacatagcggatcttattatctgcatatcgaagaatagggattgcaataaactgctaatttatagaattattgactgtgttattgcgcagttgccgtag

SEQ ID NO: 79598 - DNA, 3960 bp, Saccharomyces pastorianus
atgacacaagcgaatttagcggaacaatatttgaatgatcttaaaaatattttagatattgttggatttgaccaaaactctgctgaaattggaaatatcgagtactggctccagttgccaaataaaaaattcgttttaactacaaactgcttaaccaaattacaaatgacaattaaaaatattaccgataacccacagctatcgaactcaatcgaaataacatggcttttgagattgcttgatgtgatggtttgtaatataaagttcagtaaaagctctttaaagatgggtttagatgattctatgttacgatatattgctttgctttctacaattgtactattcaatatttttttactgggtaagaatgacagcaacttacatcgggaatcatacatcatggaaccggtgaattttttaagcgacttgatagaatctctaaaaatattaacaattgaatatggttctttgaagatagaatttgacactttccaggaggccctagaattgctaccgaaatacatacgtaacggcccttttctggatgataatgtcacggcaaagcttgtgtacatctttagcgacttgctgatgaataatgacattgaagcaactacgaatatccaatttcaaagtttttgggataatgtgaagagaatcagctctgatattttagtttcattattcggtagttttgatcaacagagaggatttattatagaagaactactatctcatatcgaaaagcttcccacaaagagaatacaaaaaaaactaagaaaagttggtaaccaaaacatttatataactgattttacctttactttaatgtcaatgttagagaatattaattgctactccttctgtaatcagatgaaggatattgcaccagagaatattgatctattaaagaacgaatacaaaaagcaagaagaatttctttttaacattgttgagcatataaatgacacaatactggaaaggtttttcaagaacccgtccgctttaaggtatgtaattgacaactttgtccaagatctattattgctaatttcctcccctcagtggcctgtaacagaaaaaatactaagctctttgttaaagagacttctaagtgtatacagcccatccatgcaagtttctgcaaacattgaaacaatatgtttacaacttatagggaatattggttctacaatttttgatattaaatgctcaactagagaccatgaagataacaacttgattaaaatgattaattaccccgaaactttgccgcatttttttaaatcatttgaagaatgcattgcatataatgaaacgatcaaatgccgtcgttctgcaacaagattcctttggaatttaaggctcggtacgatcttgagattagaagagtatacaaaggatgccaaagaacaaactataaccgttgacaatgaattgaaaaaaatattggagcagataaaagatggtggacttggacccgaattagagaacagagaagcagattttagtacgattaaattggattatttttctattttgcacgcctttgaactactgaatctatacgatccatacttgaagttgatattatcacttctagccaaggataaaatcaaactgagatcgactgctattaaatgtctctcgatgttggcttcaaaagacaaagtgatactttcaaacccaatggttaaagaaactattcaccggcgtgtaaacgactcgtctgcatctgtcaaggatgccattctagatttggtcagtattaattcttcatacttcgaattttatcaacaaattaacaacaactataacgatgatagcataatggtaagaaaacatgtgttaagaattaatgaaaaaatgtacgacgagacgaacgacatcgtcacgaaggtatacgtaatagcaagaatcctaatgaaaatagaagacgaggaggacaatataattgatatggctaggctgattttattaaatagatggatattaaaggtacatgaagtattggaccagcccgaaaagttgaaagaaatttcttcttcagtcctactagtaatgtcccgtgtggctataatgaatgagaaatgctcccaacttttcgacttgtttctcaacttttatctcctaaacaaagaagcgcattcaaaagaagcatacgataaaatcactcacgttctaaccattcttaccgactttttggtacaaaaaattgtcgagctcaactcagatgacacaaatgaaaagaattcgattgttgataaacaaaattttttaaaccttttggcgaagtttgctgattctactgtgtcatttttgactaaagaccacattacagcattgtatccttatatggtatcggacgaaaaatctgacttccactattatatcttgcaagtctttagatgcacttttgaaaaattggccaactttaaacagaaatttttgtatgacttagagacgacccttttgagtaggctaccaaagatgaatgtaagagagatagatgaagctatgcctcttatctggtctgttgccactcatcgtcatgatactgctagagtagctaaagcatgttcatcctgtctttcccatttacatccatatataaataaggcaaataacgaggaagctgccattgtagttgacggaaaattgcaaaggctgatatatttatccaccggttttgccaggttctgctttcctaaaccctccaatgataaaattgcatttttacaagaaggtgaaaccctgtatgaacatattaccaaatgcctacttgtactatctaaagacaaaattacacacgtaataagaagggttgctgtgaaaaatctcactaaattatgtggaaatcatccaaaactattcaattcaagacacgttctacatttactggacaaagaatttcagagcgatcagctagatattaaactagtaattctagaaagtttatatgatctttttctactggaagaaaggaagtcagtgagaaacactggcgttaatagcactttgtcttcgaactccattttgaaaaagaaattactgaaaacgaatagggtagagtttgcaaatgatggagtatgttcagcgttggctactagatttttagacaatattctccaactatgtctcctacgtgatctaaagaattctctcgtagctattcgattattaaagttgattttgaaatttggttacacaaatccctctcattcaattccaactgtaattgctttatttgcctctactagccagtatattcgtcatgtcgcctatgagttgttagaagatctttttgagaaatacgaaacgctagtattcagtagtttatctcgaggggttacaaaagctatacattattctattcatacagatgagaagtattattacaagcacgatcattttttgtctttacttgaaaaattatgtggaactggaaaaaaaaatggcccaaagttctttaaagttctgaagagaatcatgcaatcctatttagatgatatcaccgatttaacatcaacaaatagtagtgttcaaaagtccattttcgttctctgcactaacatttcgaatatcacatttgtttctcagtacgatttggtgtccctactcaaaaccattgatttaactacagatagattaaaagaggttatcatggatgaaataggtgacaatgtttcatcgctatccgtatcagaagaaaagctcagtggaataattttaatacagttaagcttacaggatttgggtacttatctactgcacttatacgggttaagggatgatgtgcttttattagatattgtagaagaatcagaattgaagaacaaacaactccctgcaaagaagccggatatcagtaagttttccgcacagttggagaatattgaacagtattcatcaaatggcaagcttcttacatattttagaaaacacgtgaaggatacgtaa

SEQ ID NO: 79599 - DNA, 168 bp, Saccharomyces pastorianus
gatgtgcttttattagatattgtagaagaatcagaattgaagtacgtacaactccctgcgaagaagccggatatcagtaagttttccgcacagttggagaatattgaacagtattcatcaaatggcaagcttcttacatattttagaaaacacgtgaaggatacgtaa

SEQ ID NO: 79600 - DNA, 264 bp, Saccharomyces pastorianus
attttggttaataaactgaatattaaagtacttccgtttgtagttggatacaagaatggcctagaaaaagttcgctacgtaggatttagtaaactgggaaatgaccctaatgggtttgatattaggaggttagagcaatctttagcccattcaggtgttatagaagacacattcgaaataagaaagcattcatctgtgaatacggaacgcttcgcttctacaaatcatgatagaagtgaaagtgatagtgatttagatatataa

SEQ ID NO: 79601 - DNA, 261 bp, Saccharomyces pastorianus
atggaagataaattagacagatactacacaaatgtgctttcaaatgctgaaaaggataaacacacaactgtcgatagcgatgacaaaagtagtggcgaggaaaatttagatgaactacttaatgaattggatagagaattagacgaggatcatgaatttttgagtgcttatcggtcggagaggctaccacaaatatcagatcatttaaaacaggtcaagaagaatgttgaggatgacggatacggtagattgcagtgcatt

SEQ ID NO: 79602 - DNA, 1605 bp, Saccharomyces pastorianus
atgttcaaaacgaacgaatccatcacaactatcccatcaacgtcaatcaacaatcttattggtcaggaatccaacctacgcaagcagccttcgggaactgcactgcatttacaatcgcatctgcatccacattcccgttcacagtcctattctagttctaatatgtccagatcgccttctcccttcccctacggaaagacaccatcaaacgacgaactagtgtatgacgagttaaacaaccaaatcaacgaggtgcaagaccgtgctaagaatgaggaaattgtcctgtacaacaataataattatgacgattatacaaaagaacgaggggaacaagagcaggatagaacatcatacgcagatgaatacggttttaattacgatgatgaagaaggtggaaatgaagacaactatgatgatgatgatgacgatgatgacgatgatgacgatgacgatgagagtgacgatgaaggtttgagcttttacgctccaagcattttgtcccgctctggttcgagcacagacgtgttatcctccggaatagattctatggcaaaaaattcgaaggaaacaaggggtaggtttaggtccttgagtttaatggaccctgctctgcaaaagccgttcaaccagaaatttccaaacagccaacaacccgattctgcaggggcttcatcacctaaaagatcgaactcttcaaaccattttactaacgtctacgtgcacgatggcgactttgacgggacagacactatcaacaacaaaaagaacctatcgtctgcaacgcttattaaaaggaaatctttgatgaacagaaacttggctccttctattagtaatggattgatacctccggaatttatttcccgaatatctacgccctctacaagcgcaagtagttcaaactcctcgttgaatgacatgtctacagtatcaaacgcattttccaaattattaaatgacacaagtaagaagcaaaaattcttgaattcaccaattccacagcatacacaacaggcatctccattactaatgagaaataattcaaacagtaacttgctatttgagaagaatttgatcaacaagtcatttgaagaactgagaagacaaccatcagttaacctttttagcaccttgatgaatggtaacatggaaaagaatggtttggcactaaacttcaagtccagaacgcctacagatgcgttgatggcgaatagcattaaaaatagtaacaattccagtcacaggttactaaatctcgaggaagaagaccaaatcatgtctggatctatccccaaagaacgcgaggacgataacgattcgactaatagcacaatagtaccgaatcacccagacaatgataactataatgataatgataacgacaataatactggtataaattccaataatttcaatctaaatctctatgatgacaatgatagtgcaggctttacagatgtaacaactgaaggagtgaaatactcaaactcgaattctacagtcaccaaacccgtttataaaaaagccgtcaccctggatttatacggcgaagatgatatggataacatgggaggatgggtattaggaggtaatgcccggtaa

SEQ ID NO: 79603 - DNA, 234 bp, Saccharomyces pastorianus
atgcaagaccagactgtcttggattccatagttattgtcacgaatagcacgggggtaaaagcactgctgactttgttgtcagaccaccctctcaccagccttatctcccaggaatcaataaaagcgctacatgaatattcagatgctgttaacgaagataagggcgacgaccagagcaacacaagtttgaaaagaaactcttcgtcgttgttgaattttcaaactcggttttaa

SEQ ID NO: 79604 - DNA, 192 bp, Saccharomyces pastorianus
atgaatgctactaatgtcaacgctaatacggccaccggaaaaattagatttgttcaagtgttatcttctgaaaaggacggtattctagaattggccgatctcgcagaggaaacactgaaaatattcagagcaaacaagtttgaactaggccttgtccctgatatacctccaccacctgcattggttgcatag

SEQ ID NO: 79605 - DNA, 474 bp, Saccharomyces pastorianus
  modified_base (449)..(449): a, c, g, t, unknown, or other
atgtcagctttcggtaacccattcacgtcgggtgctaagcctaatctttctaatacaagtggtatcaaccctttcacaaataatgctgctagtaccaataacatgggaggaagtgcatttggaagacctagttttggaacagcaaacacaatgacaggaggaaccaccacttcagcatttggaatgccccagtttggtaccaatacaggcaatactggcaatacgtcaattagcgcttttgggaacaccagtaatgcggctaaaccgtcagcatttggagcaccagcatttggctctagcgcccccatcaatgttaatccgccttctactacgtcagcatttggagcaccgtcatttggatcaacaggttttggtgctatggcggcgacaagtaatccttttggtaaaagtcctggctcaatgggctctgcattgggtcaatccagctntttggagcgaacaaaactgctatcc

SEQ ID NO: 79606 - DNA, 342 bp, Saccharomyces pastorianus
atgtcaatcaaattaaaacctcttgatttgatgtttctgaagaacacaaacagtgatgactatatggatatatccgagactaaaggtggcccaatacattgtgaaacaaggaccccgttgatctatagaaaaaatttcaaccatttcaacccggacttgaataaaaggccgccaagagaacccatagaattcgacttaaatggaaatacgaactcaaccccgactatagcaaaggctttcggtaaaaatagtttattactaaggaaggacagaggtggtttgccatacaagcatgtccccatagtgaaaagaaataaatatcctccaagaccagtacactaa

SEQ ID NO: 79607 - DNA, 408 bp, Saccharomyces pastorianus
atgaaaactaaattaaaaccttctcctttgctcaataacgatgacaaaaattcttctccatcgcctactgcatctacctcttcaatgaagaaattgaagtcgggtttattcaataaaaatgaagttaagtcttctacagaatctctacctacttcttccaagaaaaaactatcattttctaaatatctgaacaaggatgacgcagatatggccaagcttgggactaaacggtcaatagatgtggatttcaaagtcaaccccgaagcatccacggtggcttctaatattatatcttcgtcaacgtcaggatcgtcaaccacaacggtagcgactcctgcttcttcagaagaacccttaaaaaaaaaaccaaaatatccgtgcaagactctaatgtacaatcgattttga

SEQ ID NO: 79608 - DNA, 657 bp, Saccharomyces pastorianus
atgtcagcacctgttcctcaattagtaaatatttctcatgccttgcaagcttccactatccagcaaattcgtttggatatggtagattttaataaagattgcaaattatcttccattcaactggcaagaattgacaagtatatcgattctttgcaagcggctttgaatcagtttaccaaagataacttgtacatagaacggaaggaaaagaacgtgactgaagcagatatacagctgtattctggcttaaaatcaatgtatctagattatttgaaccagctaattaaactaaagcatgagaaacaacaccactctacaccgcccatcgctaatgatgtctcactggacttcttcgttaaccaattgcctaagttttctgccgaggaaaggaaaaattacattgacaatttaatcctgaataaaaatagccataatcgattatctaaaatggatggtctggtagatgcagtcatcaatttatgcgtcttggatacttccgttgctgaaaatgtacgatcctatatgaaattattagatacattgggtttccaaaagggttcgaatagtactggtacaaggccaacctcaaaaagaaattggctagttcgaaagcaagataaaggattcagaaaaagaaaaggagaaggagaaggataa

SEQ ID NO: 79609 - DNA, 141 bp, Saccharomyces pastorianus
atggaatgtgaaaagttaatagtatctacaagtgatccaactttgatcagtataagcgccaaattgaacagtctcaaagcttcgatggcgaaccatcaagcaaatttggtagctagcaaacagttaagtacatataagtaa

SEQ ID NO: 79610 - DNA, 1467 bp, Saccharomyces pastorianus
atgactatagttaacaagacttacaatatccagttattaatggtatttgtgttttttggatgtctgtccattttctttttatcgttaaaagatttgttcacagaggatggaaatcaaaagaagggaggccaggaggatgaatattgtcgtatgtttgacataaagtacatgatttcctatttatggctgacaaggttcaccattttattgacaggcataatggctattgtagtacattttttatcgtttaatgaaattacttcttccatcaaaactgatttgttaagtttacttttcgtcgtagtggcagaatatgtttccagtttctctaacaaacaacctgattcgcactcccataatcatgcacatcaccattcccatctaaccgattcattgcctctcgaaaatgaaagtatgttcaaacaaatggcattgaataaggacaccaggtccattttttcgtttttattgttgaataccgctttcatgtttgtacaacttttatattcctttcgttccaaatcattgggcttattatctgattcgttgcatatggccttagattgcacatctttgctcttaggtctaattgctggtgtattgaccaagaaaccagcaagtgataaattccctttcggtctaaattatcttggtaccgtggcaggtttcaccaatggtgttctgttactcggcatagtgtgcggtatcttcgtggaggcaattgagagaattttcaaccccattcatcttcatgcaacaaatgagttgttggttgttgctacgttaggcttattagtgaaccttgtaggtttgtttgccttcgaccatggtgcacatgatcatggtggtactgataatgaaaacatgaaggggatttttttacatatattggcagatacattaggttctgttggcgttgttatttcgacgttattaatcaagttaacacactggccaatttttgatccgatcgcctctttattaattggttccttgattttacttagcgctctgcccctgctaaaatctacttccgcaaatattttactaagactggatgacaagaagcataatctagtaaagagtgcgctaaaccagatttcaacgacgccaggaatcacaggttatacaactcctagattttggcccacagagtcaggcagttccgggcattcacatgcacacacgcattctcatgcagaggatcatagccatgagcatcatcatgatcagaaaaatggttcacaagaacacccgagcttggtgggctatattcatgtacagtatgtagacggcgagaattcgacaattatcaagaaaagagttgaaaaaatattcgaaaatgtgtcgattaaagcgtgggtacaagttgagcctcaaaattccacttgttggtgccgggctacttctatgaacacaatttcagctaacccgaattctttaccgctacagcctatagcaaattga

SEQ ID NO: 79611 - DNA, 1290 bp, Saccharomyces pastorianus
atggttcttcaatattcacaaagttatctagagtttattaatgccttggcatacttgataaatgatattgtgaaaaaaaaaccaagtccttcttttagtataacagaacatattcctaaaaggacatactggttcggagaagacttaatggtgaagggtttatcattcgttaactttcaactatctgattttgacgattatgaaaaaattcttgaaatggatcatagtctcgatagattaattggcaatccgccattatgcgacaaattatcggcatcatctgaaatgctgttaaggttgcaggctgttgtgaatataagttcgcaattattgcagaacaacaactgcggagtagaatggtcagataataaatcacgttatatctttaataagaaaattggatttaaggagaccgttaaaaataatatgaagacatcgaagcaatccaatgaaaaggccaagttacaaagaaaaaacaaaccttcgaccactaatggctcaatatccatggcggatttggagagacaaatgagaagtagctctttggattctttttctccaactatgggttatagtggttcgtctgtacctatggccccagatacgttcaatgttaagcccagcggtacaataacggggaacaaagtaaatgtagaactgttaaaaatcgaactaagcggtcaaaacgccgatggcgctattacgaatatatctcctggttacagtaacgcagcgatctcttcttcaaattcgacagatgaatcatccttcgatttgaacaacatcctatcttcaatgcaacaaaaacacgcggaaaaatcatttgccaaatccatgcaaggggtgaatgaacaaattccagcgaatgacgtctgccatcaagcccagaggccaatgcaaggtggtctgtattcatcacagcaaccttcatcgatgtcttcattaaactccgcgtatcagaatgcctcgatgcctccatctgcctccatggtatcctatccctatccttttttgaaccagcaggggcaaggggtctttccgccttataatgcacaaaatttacaatggcagagcgaagcttactcattaaagtcaatgaattttgcaaatccaacgtggctaggtgaccagcaccagacatctgcgccgtcgtcagcatatgcgcaagcgcaacggcaaatgtttcaacaacatatgcagcaagatgtggggaagtacatgcaatttccttttgacgcccaaagcaacactgacagcatgaggggaagcagtcggaataatatgttttaa

SEQ ID NO: 79612 - DNA, 1317 bp, Saccharomyces pastorianus
atggaaccatcgaatacccaaaaagaagatcttcctaccgcttttaatggtataaaaagtcaattaaacagcatattaaaatcgaatcaattatttcaagattatgcgctattaaatgggttcttggcatttgttcattccaaattgaatgccgcaatccttacatctatagaatcacaatgtgggaaatcctttgcggctgatcttgattcttttgatcagagcagtatctcttcgattttagatttttcttgggaaagcgttcactatccaatattcaaatggtttcagatgtggaggaattatattctttttgagaaggagaataaaaaacagcagaccaaatttatcgactttagaaagatgaattcgaagatgttaaaattcttcaaaacggtgcaaaacttctatgtcaacgttatcaacacggtttataagaaatatgatatatctgtacttttgccgaaaaggattatccaagacttaaagttaagtgacatcgaaaataccactaatgttggagacagtcttgcggtgaagacatttaacagtagtagcccactcgcacatctcatcccaacgcttttccatcgctgtctcttattcttaggaacagcgtatcgttataaaactctcctcgaagaaatttccaataaatacagcatatccaattttaaaaaatctctggacttctttcgtttagcttcgttggtgttaccaagtgctggtgagacgtattcgcaagcaggagcgatattccttcaaacaggaaatttggggattgcagtattcaattttgtcaaaggtatgatgacgaagatgccaagccctgtttcaatcaaaaattttggggcattaatggtggacaataaaagttcattaaatcgtagcttgcatactactatcatgaacacttacttacaagaatctaaaggacccaggacacctgctaaagagatactagaattttattttctgggcctttttgggtctgtttggtcacctaccagttggagagatgatacaaaacctaaccaattaaataacggtatcaagttaaggcatttggaaaatgcactctacgagacgatgtcagcaagatacctgaataatattaagaccatctttcacaatttgatcattacaattggtgggttccatctattattaaaaaggcgttccgatgtaagtgcaaaaaccttgaaggatttacgtagcaatgaattggattacctaaattttgcattcaagtatattgctcacattttaaatgatatcgttaaggaatcatggagcgaaaatcctgaggttcagaaa

SEQ ID NO: 79613 - DNA, 555 bp, Saccharomyces pastorianus
atgaaagatttaaattggcttgaagaaggtcagaaaattaaattcggtccattgaagaagaagacttttttgacacagctgaaaaaagatgtggaattgcttgctaaattgaatacaatggactattccttgttaattggcattcatgacatcaataaagctaaagaagacgacttacaattggcggataccgcatctattgaggagcaaccacagactcaaggacccataagaaccggtaccggaacggtagtacgacatttttttagagagtttgaaggtggaattcgagcatctgatcaattcaacaatgatgtggatttgatttattacgtggggataatcgatttcttgactaattactcagttatgaagaaattagaaacgttttggagaagtctacgccatgataccaagttggtgagtgccatacctccaagagactacgccaataggttttacgaattcatagaagattctgtagatcctctgccccagaaaaaaactcaatcgtcgtatagagacgaccctaaccagaaaaattataaagactga

SEQ ID NO: 79614 - DNA, 1749 bp, Saccharomyces pastorianus
atgtcagtcttgcgatcacaacctccttcagttgtaccgctacatctgacaacatccaccagtcgcaaaacagaacaggaaccatcgctattgcactctgcaataattgagcgacatcaagacctttcggtgccgaattcgaattcgaatccggattcgaaccatcgaataaaaaaggatcgcaataatcacactagctaccattcttcatcgaattcggagtcaaacatggaaagtcctcgcttgtcagatggtgagtcttccactccgacctctattgaagagtcaaacccaacaataaataattcgaggctggtgaagagaaactactcaatatcaattgatcctttgcgtaacaacagcaataataatacggatgatgatcatccaaacaccataacttctccccgaccaaatagcactagtaacaaggaaatgcagaaatatagttttcccgaaggtaaggagtcgaagaaaataacaacaccctcgttaaactcgaataattgtttggatttggacaattccagtcttgttcacacagattcgtatatacaagacttaaatgacgatcatattttactaaacaagcgtgtttcgaggcgatcttccagaatatcggcagtaacagcaacttccacgacaattaagcaaagaagaaatactcaggattcaaacctgcccaatattccatttcacgcttccaagcattctcaaattctacctatggatgattcagatgtaataaaattggccaatggagataccagcatgaaaccaaattctgctactaaaattagtcactcaatgacttctttgcctcttcacccacttccacaaccttctcaaaagtcaaagcaatatcatatgatatccaaatcaaccacttctttgccgccagagaatgaccactactatcaacacagtcgtggcaccaaccataatcacgctgctaatgctgctgctgttaataataatactactactactaccgctgctacgggtctgaaaagatcagagtctgcaacggcagaaattaagaagatgagacaatctttgctgcataaaagagaaatgaaaaggaaaagaaaaacatttttggtggatgacgatcgtgttttgatcggtaataaagtcagtgaaggccatgtcaactttattatagcttataacatgctaactggtattcgtgtcgcagtgtcacgttgttctggcataatgaaacctttaactccggcagactttagatttacgaagaagcttgcctttgattatcacggaaatgaattgaccccttcttctcagtatgcatttaagtttaaggactactgtcccgaagtctttagggaacttcgtgcattattcggcttagaccctgctgattatttggtttcgttaacttccaagtacattttgagtgagttgaactcgccaggtaaaagtggttcatttttttattattcgagagattacaaatatattatcaagaccatacatcattctgagcatattcatctgagaaagcacatacaagaatactataaccatgtaagagacaatccaaacactttgatttgtcaattttatggtttgcatagagtgaaaatgcctatatcgtttcaaaataaaattaagcatcggaaaatttacttcctagtcatgaataacttatttccaccacacttagacattcacattacttatgatttaaaaggttccacatggtggccgtttcaccaatttggataa

SEQ ID NO: 79615 - DNA, 1764 bp, Saccharomyces pastorianus
atgagtagaagaattctacattcttttttggagactaaaagaaggtgtcgcagtacaacagtaaatgacaattatcagaacatttggttgatgcaatccctaatattgagcttcatgttcgctctagttgctgattatttggagaaaattgactcctctttgatgaaaaggcaattgtccgcattatgttcaacgatcagatcaaactgtttaccgacaatttctgcaaattctgagaagagtatcaataataacaatgaacctttaacatttggttctcctcttcaatacatcatttttgagtcaaaaattagatgcaccttaatggcttatgatttttgtcagttcttgaaatgtttcttccatattaaattcgatttgtctataaaggaaaaagatgttgaaaccatttatattcccgacaatgagtcaaaatgggccagtgaatcgataatatgtaatgggcatgttgtgcaaaagcaaaatttttatgattttagaaacttttattacagtttcacgtatggacacttacactcaataccagaatttttagggtcatctatgatttattatgaatacgatttaagaaaaggaaccaaatcacatgtgtttttggatcgaatcgatacgaaaaggctagagaggagtcttgacacttcttcctatggcaatgataatatggcagcaaccaataaaaatattgcgatcttaattgatgacaccataattttgaaaaataatttaatgtcaatgagattcatcaaacagattgatcgctcgtttactgagaaggttagaaaaggacaaatagcaaagatatatgattcctttttgaactctgcgaggttgaattttttgaagaattattcagttgaagtattgtgtgaatttttagtagcgttgaacttttcaatccgtaatatttcgtctttatacgtagaagaagaaagtgattgctcccaaagaatgaattctccagagctgccaaggatccacctgaataatcaagcgctttctgtcttcaatttacaaggctattactattgcttcatcctaattatcaaatttttattggattttgaagcaactccaaattttaagttactgagaatttttattgagttgagaagccttgcgaattctattttacttcccacactttcaagattgtatccgcaagagttttctggatttcctgatgttgtatttacgcaacaatttataaataaagataatggtatgcttgtccctggtttatccgcaaatgaacaccataatggtgcaagtgcagctgttaagactaagttagccaaaaagatcaatgttgaagggcttgcaatgtttattaatgaaatcctagttaactcttttaacgatacctcttttttgaatatggaggatcctattcgaaatgaattttcctttgataatggggacagggcagtgacagacttgcctcgttcagcacatttcctatcggataccggcctagaaggtattaacttcagcggcttaaatgattcgcatcaaactgtttctactttgaatcttttacgttacggggaaaatcattcatcaaaacataaaaatggtggaaaggggcaaggatttgccgaaaagtaccaattatctctgaaatatgttactattgccaagttatttttcaccaatgttaaagaaaactacattcattgtcacatgttagataagatggcaagtgattttcacactttggaaaatcatctaaagggaaacagttga

SEQ ID NO: 79616 - DNA, 390 bp, Saccharomyces pastorianus
atgttgatttctttcggactcgatcatccttccaatcgcgaagatgatctggataagctatgtaatatgaccagagatgttcaagccatattcagtcaatatttgaaaggagaagagtctaaacgatccctggaagactttttatcaacgtcaaacaggaaagaaaagccagatagcggcaactatactttttatgggttagattgtttaacgttatcgaaaatatcaagagctctgccggcctccactgtgaacaacaagcagccatcgcattccatagaatcaaagctatttaatgaaccaatgagaactatgtgcattaaagtgcttagatactatgaaaagttcagtcatgatagtagtgagagtgtcatggactctaatccaaac

SEQ ID NO: 79617 - DNA, 1869 bp, Saccharomyces pastorianus
atgaatacgataataactcacccgggaaaaatggagctggtatacgtgtccgactcagacgattctccttcagataatgatagcctaactgccttggaaagtttaagctctggtgaatcaaatgaaatcaaagtaactaatgatttagatacaagtgctgaaaaggaccaaattcaggcaggcaaatggtttgatcctgtattggattggcgaaaatctgatcgtgaattgacggaaaacattctttggaggatagctgataaaacgacatacgataaagaaacaataactgaccttattgaacaagggatcccaaaacatagttatttaagtggcaatccattaactagtgtgactaacgacatttgctctgttgaaaactatgaaacatcaagtgctttcttttaccaacaagtgcacaagaaggacagattacaatatttgccattatatgcagtttctacatttgaaaacacaaataacactgaaaaaaatgatgtgaccaataaaaatatcaatatagggaaacatagccaagaacaaaattcttcttccgctaaaccatcccaaattccaaccgtgtcttctccattaggattcgaagaaacaaagcaaagtaccacgcctactaaaagcaatagaagagtgtcgcatagtgatactaattctagcaaacccaaaaacacgaaggagaacctttcaaaaagctcttggaggcaagaatggcttgcaaatttgaaacttatttccgtttcgttggttgatgagttcccttcggagctttccaacagtgatagacaaataattaacgaaaaaatgcagttacttaaagatatatttgctaacaactttaaatcagcaatttccaataattttagagagagtgacatcattatactgaaaggtgaaatagaagattacccaatgagttctgaaattaagatttactacaacgaattacagaacaagcctgatgcaaaaaaagccagattttggtcatttatgaagactcagagatttgtttccaacatgggatttgatattcagaagtcctgtgaacctgtttctatatccacgtcggtcaaaccacatgtggtcgagcccgagcatatggcagatgccaaaattatgcctaaggatatactgcaaattacaaaaaaaccgttaatggttaaaaatgtgaagccttcttctccgccagatgtgaagtctttggtgcagctgagcacaatggaaacgaaaaccctaccagaaaagaagcaattcgacagtatttttaattctaacaaagcaaaaataatccctggaaatgggaagcacgcatcagaaaacatctcactctctttctcaagacctgcatcctacggctatttttctgttggaaaaagggttccaatcgttgaagatcgtcgagtgaaacaactcgacgatataacagacagtaatacaacagaaattttaactagtgttgacgttttaggaacacattcacaaactggtactcaacaatcaaatatgtacacatcaacccaaaaaacagaacttgaaattgataataaggatagtgtcaccgaatgttcgaaggacatgaaagaagatggtctttcctttgtggatatcgttttgtcgaaagcagcatcggcgctggatgaaaaggaaaaacaattggctgttgcaaatgaaattattcggtctttgtcagatgaagttatgaggaatgaaattagaataacttcacttcaaggtgatttaacttttacaaagaaatgtcttgaaaatgcgagaagtcaaatatctgaaaaagatgctaaaattaacaaattgatggaaaaagattttcaagtgaataaggagataaaaccgtattga

SEQ ID NO: 79618 - DNA, 810 bp, Saccharomyces pastorianus
atgaagaacctgccaaagatacccttattaaatgatattctttctgactgcaaagcttattttgccacggttaacatcgacgttttgaataacccatccctgcagctgtccgaacaaactcttcttcaagaaaatcccatcgtccaaaataatcttattcacttattataccgatccaagccaaataaatgtagcgtgtgtggtaagagatttggcaactcagaaagtgaaaaactactacaaaatgagcatttggactggcatttcagaataaatacaagaattaagggatcacaaaacacagcaaatacaggcataagcaactctaacttaaatacaactaccacaaggaaaaatattcaatcaagaaactggtatttgagtgactctcaatgggcagccttcaaagatgatgaaattacctccacaaagcataaaaatgattatactgatccgcataccaataaaaatatcgataaaagtgccctaaatattcacgctgatgaaaatgacgaaggctctgtagacaacactttaggaagtgatagaagtaacgagttgaaaatacggggaaaatatgttgttgtaccagaaacttcacaagatatggccttcaaatgtccaatttgtaaggaaaccgttactggcgtttatgatgaagaatctggtgaatgggtttggaaaaatactattgaagtgaatggcaaatatttccactcgacatgttatcatgaaacgtcgcaaaattcaagcaaatctaatagtggcaaggtcggtttggatgacttaaagaaattggtcacaaaataa

SEQ ID NO: 79619 - DNA, 981 bp, Saccharomyces pastorianus
atggatcacgacacagaagttatagtcaaggatttcaacagtattcttgaagaattaacttttaactcgagacccattattaccactctcacgaagttagcagaagaaaacatttcgtgtgctcaatattttgttgacgccattgagagtagaattgaaaaatgtatgcctaagcagaagctatacgctttttatgccttggactccatttgtaagaatgttggcagcccatacacaatctacttcagtagaaatttgtttaacttgtacaaaagaacatacttattggtggacaacaccacaagaacaaaactcatcaatatgtttaagctttggttgaatcctaatgacaccggcctgcctctgtttgaaggctcagcactggagaaaattgaacagtttttaataaaggccagtgctctccaccagaaaaacctgcaagcaatgttaccaactccgactgttcccctcctattaagagacattgataaattaacttgtttaactagtgaaaggctaaagaatcaaccaaatgatgaaaaattaaaaatgaaactgttggttttatctcagttgaaacaagaactgaaaagagaaaaactaactctcaatgctctgaaacaagttcaaatgcaactaaggcaggtcttctcacaggaccaacaagttttgcaggaaagaatgaggtatcacgaacttcagcagcaacagcaacaacagcagcagcagcagcagtatcacgaaactaaggatatggtcggttcttacacacaaaactctaattcagcgattccattgtttggaaataattcagatacaacgaaccaacagaattctttatcttcctctctttttggtaatatttctggcgttgaatcttttcaagaaattgagaaaaaaaagtccctaaacaaaatcaataacctctatgcatctcttaaggctgaggggctcatatatactccaccaaaagaatcatcg

SEQ ID NO: 79620 - DNA, 588 bp, Saccharomyces pastorianus
atggattcatacgaacttgtggaaaatacatgcaacaaagtactcagcaaagttgccacggtatctagggcacaagtggaaatttctgaaaatattgcaaggaaaggttgctctggaggcgggctagacgaactactttgtgatgcagacgaccccttcagcaaaaaagcagatgggccatacgggaccatcggtggtgatggagagactgctggagaagcatacaacagcgatgaggaaacgggtgggaatgacgtggtgctcaatgaactactagaaggaaccagccaaccttccacatcaaaaacatctttacctaaatccaaggggtcctcaacggtatccacaccgaatcattcacagtcaagttcaaacaaggacggggtacgaaacaatgacggcggcaaaaatggcgaagatgaggatacagacaatttgatgggaacagaaaattcattttctttaccgcctacgagaaactctgccgaggaaaccacacaaacgtttaaacaattgtccattagagaagataatgacaatcacagcagcgatacggacggcatgcaagaccagtcaagtaatatataa

SEQ ID NO: 79621 - DNA, 801 bp, Saccharomyces pastorianus
atgcctgacaataatacggagcaattgcagggatctccttcaagtgaccagagactgagggttgactgggacaacggtaaccattttgacgtctctcccgacagatacgcgcctcatctatctgaattttacccaattgtaaatagtaaaagaccagtggctagcagtgctggctcagaaaataacgaccatctggacgacatgaaccatttacgttcatccaaagtgtattcaaaggcccgtcgggcatcgagcataacttctggtacgagcacaataaacgacttgcaaacgctaatcacaaagagagatgtgaaagagacccaggaagccctatcgacattactcaggaactcgaatgcttattcggattcgttattaaagacatctcagaatggggcagaaattgcccattccttagaaaacattgccaagttgaagggttgcaatgatgaaacggcggagaaactattgagtgccagtgggttattctaccttttatctaatcatcagcttataatgtcaaagtatttcaatgacttgttgggagataatttaattgatgatattgatgaattcgaattacagaccaagataatggagaacaaattcaaagcacaaagcaaagagcaaagtttaaaattgaaattgcaggaaagacataacttcgatatctcgaaaagaaaaataaggaatttaatctcataccgagagagcctttctagcttgcaagcaaggttagatcaactggagacactaaaccgatttttacatggattcatacgaacttgtggaaataca

SEQ ID NO: 79622 - DNA, 1242 bp, Saccharomyces pastorianus
atgcataaaactatcgacaagtatggttgtggtgccggtggtacaagaaacattgctggccataacatccccactttgaatctggaagccgaattggccactttacacaagaaggaaggtgccttagttttttcgtcatgttacgtagccaacgatgccgtcttatccctactgggtcaaaagatgaaggacttggtgattttctccgacgaactcaaccatgcgtccatgattgtcggtattaagcatgctaacgttaaaaaacacattttcaaacataatgacttgaacgaattggaacaactgctccagtcataccccaaatccgttcctaaactaattgctttcgaatcagtatattctatggccggttcagtggccgacatagaaaaaatttgcgacttggccgacaaatacggtgccttgaccttcttggatgaagtacatgcggtcggcctgtacggccctcacggtgcaggtgttgcagaacattgtgattttgaaagtcaccgtgcaagtggtattgctaccccaaagaccaatgacaagggcggcgcgaagactgtgatggaccgtgtcgacatgatcaccggcactttaggtaagtctttcggtagcgtaggtggctacgtcgcagcctctaggaaattgatcgattggttcagatcgtttgcacctggtttcattttcaccacgactttaccaccttcagttatggcaggcgctaccgcagcaattagataccaacgttgccacatcgacctaagaacctcgcaacaaaaacataccatgtacgtaaagaaagctttccatgagttgggcattccagttattccaaatccttctcatatcgtcccagtgttgattggtaatgctgatttggctaagcaagcttctgatatcttaatcaataagcatcaaatctacgtacaagctatcaacttccctacggttgctcgcggtaccgaaagattgagaattaccccaacgccaggtcacaccaacgatttatctgacatcttaatcaatgcagttgatgatgtgttcaatgagctacagttaccacgtgtcagagactgggaaagccaaggtggcttattgggtgttggagagagcggatttgtggaagagcctaacttatggacatcaagccaactatctttaactaatgacgacttgaaccctaatgttagagaccccatcgttaaacaactagaggtttctagtggtatcaagcagtaa

SEQ ID NO: 79623 - DNA, 315 bp, Saccharomyces pastorianus
atgcaacgctccattttggcaaggttcggtaactcctctgccgctgtttccacactgaataggctgtccacgacagccgcaccacatgcgaaaaatggctatgccaccgctactggtgctggtgccgctgctgccactgccacagcgtcatcaacaaatgcagcagcagcagcagccgctgctgccaaccattctacccaggagtcgggtttcgattacgaaggcctgatagattccgaactgcagaagaaagacttgacaaatcgtacagatatttcaacaatatcaaccgattggccaaggagttccccctag

SEQ ID NO: 79624 - DNA, 918 bp, Saccharomyces pastorianus
atgtacatggttgtacaatatcaagtacttgaaatctattccatttttgaatcaaaaatgtatatcaactattatacatcgccagaaaccttggtttcttcagatgaaatagaaacatggataaaatacttggattataccatcaccttacaaacagattctttaacacatttaaattttcaaagagctttacttcctctggcccattatgatcttgtatggataaaatacagtaaatggttgataaattcaaaaaatgaccttttgggggcaaaaaacgttctattgatgggtcttaaattttctttgaagaagaccgaaataataaaactactgtattcagttatttgcaagttaaatgagtacgtacttttgcgagatctattggaaaaaattgagtcctcatattccgacaatgttgaaaacgttgatgattttgagatattttgggactatcttcagttcaaaacgttctgccagaattctctgtattccagtcgatattctgattcacaatcaaacgggcttttgaataaggagctgtttgataaagtatggaaacgtttgagttgtaaagaaaaaaaaagtggtcaagaaattttattgaataacttagtacagttttattcgaaggataccgtagaatttgtagaaaagaacatatttcaaaagataatagaatctggttgggaatactacctacagaacggtatgttctggaactgttattgccgtttaatttatttcgacacttctaggtcatatttggacaagaggcaatatattgtcaggaaaatatggccccaaatagacaaaaaatttgcacagagcgtcttgccgtctttaacagaattctgtcagtcatacttcccagaggagatggatacattagaggaaatgtttactgaagaaccttaa

SEQ ID NO: 79625 - DNA, 1887 bp, Saccharomyces pastorianus
atggacttggccacatccagaaatgctgaagacgttgttcagcttttgaagaaagagctgcaaacaaccgtaaataacccagatcaagacaaggcaatgcagtacagacaattgttaataaaaactattcgtaccgtggctgtaaactttgtagaaatggcagcaagtgttgtttcgctattattagatttcatcggtgatttaaactcggttgccgccagtggtatcattgcctttatcaaagaagtgatcgaaaaatacccacaacttagagccaatatccttgaaaacatggttcaaacgctagacaaagtgagatctgctaaagcttaccgcggtgcattatggattatgggtgagtatgctgaaggagaaagtgagatacaacattgttggaagcacattcgtaacagcgtaggtgaagttcctatccttcaatcagaaatcaaaaagttaacacaaaaccaagaacacaccgaagaaaatgaggttgacgctaccgccaagccaactggtccagttattctaccagacggtacgtatgccactgaaagtgctttcgatgtgaagacttctcaaaagtcagttaccgatgaagaacgtgattctagacctccaattcgccggtttgttttaagtggtgatttctacacagctgccattctggccaacaccatcattaaacttgttttaaaattcgaaaacgtttccaagaacaaaactgtcatcaatgctctaaaggcggaagctttactaattttagttagtattgtaagagtgggtcaaagctctttggtggagaaaaaaattgatgaagattctttagagagagttatgacatctatttctattttattggatgaagttaatcctgaggaaaagaaggaagaagttaaacttctggaggttgcattcctggacaccaccaaatcctcattcaagagacaaattgaaattgcaaagaagaacaagcataagagagcattaaaagacagttgcaaaaacatcgaaccaattgatacgccgatttctttcaggcaatttgctggtgtggattctactaatgtgcaaaaagatagtattgaagaagatttacaactggcaatgaaaggagatgcaatccacgctactagcagctctagtatttcgaagctgaagaagatagtacctttatgtggcttttctgatccggtttacgccgaggcttgtattacaaacaatcaatttgacgtcgtattagatgttcttcttgttaatcaaacgaaagaaacattgaaaaacctacatgtgcaatttgcaactcttggtgatttgaagattattgacacaccacagaagaccaacgtgattcctcatggcttccacaaattcactgttactgtcaaagtttcctctgctgacacaggtgtcattttcggtaatattatttatgatggtgcgcatggtgaagatgctcgttatgttattttaaacgacgttcatgttgacattatggattatatcaaaccagccactgctgacgatgaacatttccgtaccatgtggaatgcatttgagtgggagaacaaaatatcggtcaaatcacaactaccaacattgcatgcttatttgagagaactggtcaagggaactaacatgggtattctaacaccatcagagtcgttgggagaagatgattgtaggttcttaagttgtaatctgtatgcgaagtcgtcctttggtgaagatgccctagccaacttgtgtatcgaaaaggattccaaaaccaatgaagtcataggttatgttcgtatccgatcaaagggacaaggtttggctctgtccctaggtgacagagtggcattgattgctaagaagaccaataaacttgctctcactcatgtttga

SEQ ID NO: 79626 - DNA, 918 bp, Saccharomyces pastorianus
atgttagttacaatgctggaaggaaatccaatgcctgaattgttgatgcacataataagatttgtcatgccttctaaaaataaggaattaaaaaagcttttgtacttctactgggaaattgttcccaaactagctgaagatggaaaattgagacatgaaatgattcttgtctgtaatgccattcaacacgatttgcaacatcctaatgaatatattagaggtaacacattaaggtttttaacgaaattgagagaggccgaactcttagaacagatggttccctctgtcttagcgtgcttggaataccgtcatgcatatgttcgtaagtatgcaatcctagcagttttctccattttcaaggtcagcgaacatttacttcccgatgctaaagaaatcatcaattcgttcatagtagctgaaactgatccaatatgtaaaagaaatgcatttattgggttagccgaattagatcgtgagaatgccttacactatttagagaacaatattgctgatatagaaaacctagaccctttattacaagctgtctttgttcaatttatcagacaagatgcaaacaggacccctgctttgaaagcccaatatatcgaactattgatggaactgctttcgaccacgacttccgatgaagtcatcttcgagaccgcattagccctaactgtgttgtctgccaatccaaatgtcttggttcctgcggttaacaaattgattgacttggccgtcaaggtttctgataataacattaagttaattgttctagaccgtattcaagacatcaatgctaataacgtaggtgctttggaagagttaaccctggatattttgagagtcttgaatgcagaagatttagacgttcgttcaaaggcgcttgatatttcaatgggacctgcaggcatcaag

SEQ ID NO: 79627 - DNA, 279 bp, Saccharomyces pastorianus
tgtgcgaaatgttcgtcggaattttcaagatcatcagatttgagaaggcacgaaaagacacacttcgccatattgcctaacatttgtcctcaatgtggcaaaggttttgcaaggaaagatgcattgaaaagacattatgatacactgacatgtaggagaaacaggactaaattactaactgcgggtggtgagggtatcaatgaattactgaaaaaagtcaagcaatccaacatcgttcatcgtcaagataacaaccacaatggtagcagtaatggctga

SEQ ID NO: 79628 - DNA, 345 bp, Saccharomyces pastorianus
atggaggatcaggatgctgcatttatcaaacaggctacagaagcaatagtggatgtatcattaaatatagataacatagatcctataataaaagagttattagaaagggtaaggaataggcaaaacaggttacaaaataaaaaaccagcactcataccggcagaaaatggtgttgatataaatagtcaaggcggtaacataaaggttaaaaaggaaaacgcattaccaaaaccaccgaagtccagcaaaagcaaaccccaagatcgtagaaatagtactggtgaaaaaagatttaaatgtgcgaaatgttcgttggaattttcagtcatcagatttgagaaggca

SEQ ID NO: 79629 - DNA, 873 bp, Saccharomyces pastorianus
atggaaaatgttaatgaagccatcggttaccatattttgaggtatagtatagacaacatgccattaggaaataaaaatgaggctttccagtatctaaaagatgtctacggaattactaataaagaatctactgaatttattgagatgggccaaatcgtacatgatcttaaaaagggtgacacagaaagctgtctgaaatggtgctccaatgaaatggaaagcttatcatctaaccatacggctttatcgtccctaaaatttgatttatacactttgtcagcaatgcagatagtgaagcatggaaatccggtagagttgtactaccaaataacacagaacgcacccctggattgctttagacatagggagaaggaattaatgcaaaacgtcgtaccattattaactaaatcgctaataggtcaacctattgaagatattgattctaaagtaaataaggaattaaaagaatgcacgtccctatttataaaagaatattgtgctgcaaaacatattttctttgactctcccttgtttttgatagtattgagtggtttaatttctttccaatttttcatcaaatacaaaaccatcagggagttagcgcacgttgactggactacgaaagatgagttgccatttgatgtcaagttaccagattttctgactcatttccatccgatcttcatctgtcccgtcttaaaggaggaaaccactacagaaaatcctccttattcactggcatgccatcacatcatttctaaaaaggcgctagacagattatcgaagaacggaacaattactttcaagtgcccatactgccccgtaaatacttcaatgagcagtacaaaaaaggttcgttttgttatgctttga

SEQ ID NO: 79630 - DNA, 366 bp, Saccharomyces pastorianus
atggaaaggcaagtggagagaattgtaaagaagtgtttacaattgatagaaggtgcccgcgccactacaaactgtagtgccacatggaaacgttgtattatgaagcgtctagccgattaccccataaaaaagtgcgtttctatcgaaaaaccttcgaaaggaaactcactaacaagggaagaactaagagatgttatggctcggagagttttgaaaagcgaaatagattcgctgcaagtttgtgaagaaaccatcgacaagaattacaaggttattcctgatgaaaagctgctaactaatattttaaagagaaagttgacagaggaagaaaaaagctctgtcaaacgtccttgcgtgaagaagtga

SEQ ID NO: 79631 - DNA, 984 bp, Saccharomyces pastorianus
atggatgatttttcaagagataccgaaaactttgtttgctggttaaaaactaccgctgaaattgaagtatcccctaagatagaaatcaaagatctttgttgtgataatcaaggccgcgcagtagttgccactcaaaagattaagaaggatgaaacattgtttaaaatacctcgtagttctgttttaagcgttacaacatctcaactgataaaggattatccttctctcaaggataagttcctgaacgaaaccggatcgtgggaaggtttaattatctgtatactttatgagatggaagttttgcaagaaagaagccgatgggcgccttactttaaagtttggaacaaaccaagcgatatgaacgcgttaattttttgggatgatattgaactgcaacttttaaaaccatcacttgtccttgaaagaataggaaaaaaggaagccaaagagatgcatgaaagaattattaaatcaatcaaacaaattggtggagaattttcacgtgtagcgacgtccttcgagtttgataattttgcctatattgcaagcattatattgagttactcctttgatttggaaatgcaagatagtagtgtaaatgaaaatgaagaagaagaaaccagtgaagaagaacttgaaaatgagcgctacttgaaatcgatgattccacttgctgatatgttgaatgcagataccagtaaatgcaacgctaatttaacttacgactctaactgtttaaagatggttgctttgagggatattgaaaagaatgaacaagtgtacaacatatacggagaacatccaaattcggaactactaagaagatatggatatgttgaatgggacggttcgaagtatgatttcggagaagtgttacttgaaaatattgtcgaggcgttaaagagacttttgagacgaatactgaatttttggacaggtgtattgatatcttacgcaataacgccaatattcaagaattcttag

SEQ ID NO: 79632 - DNA, 132 bp, Saccharomyces pastorianus
atggcaactttcttattaaaaggtcaaattagaaatggcgaaactgttagagtggtggttaaagatgctaagcttgtcgtgctaccaaatcatgaagaaggcgaagttgttgaagaggaagctgaaaagtaa

SEQ ID NO: 79633 - DNA, 2022 bp, Saccharomyces pastorianus
atgttaagacaagctacaaaagcaccaatacaaaaatatttacagagaacgcaactattaaggcgaagtactccacgaatatacactattgtacagtgtaaaagatctatttgcagttttaatgcaagacctcgagtagccaataaacttctatcagatataaaaacaaatgcattaaatgaagtcgctatttcaacctgcgccctcaagagctcatatggattgcccaatttcaaaagaacgtacgtccaaatgaggatggatcccaatcagcaaccggaaatgccagctttagaacaatttggtacaaacttgacaaaattagcgcgcgacggtaaattagaccctgtcattggcagagacgaagaaatcgcaagagctattcaaattttatcaagaagaacaaaaaataatccatgtttgatcggtcgagctggtgtcggtaaaaccgcccttattgatgggttagctcaaagaattgttgctggggaggtccctgactcgttgaaagataaagatctagtagctttggatttgggatctttgattgctggcgccaaatatagaggtgaattcgaagaacgtttaaaaaaggttttagaagaaattgacaaggccaatggtaaggttattgttttcattgatgaagttcatatgctgcttggcttaggtaaaactgatggtagtatggatgcttctaacatcttaaagccaaaactggcccgtgggctacgttgtatctctgcaaccactcttgatgaattcaaaatcattgaaaaagatccggctttatcgagaaggtttcagcctatcttattgaatgagccgagcgtctccgatacgatttctatactaagaggtttaaaagaaaggtacgaggttcatcatggtgtaaggatcactgatacagctttagtgtctgctgcagttctttcaaatcgttatataacagacaggtttctacctgataaagccattgatctagttgacgaagcttgtgctgtactacgtttacaacatgaatccaaaccggatgaaatacagaaactggatcgtgctattatgaaaatacaaatagaactggaatctttaaagaaagagaccgaccctgtttccgtggaaagaagagaagcgttggaaaaggacctagaaatgaaaaatgatgaattaaacagattaacaaaaatatgggacgctgaaagagctgaaattgaatctatcaaaaatgctaaggcaaatttggaacaagcaagaattgagttggaaaagtgtcagagagagggtgattacactaaagcatccgagttgcgatattccagaattcctgacttggagaagaaggtagctttaagcgagaagagtaaggacggagataaagtaaatttacttcatgattcagttacttctgacgatatttctaaggttgttgccaaaatgactggtattcctacagaaacggtgatgaaaggcgacaaggaccgcctactgtatatggaaaattctttaaaagaaagagtcgttggccaagacgaggccattgctgctatttctgatgctgtacgtcttcaaagggctggtttgaccagtgaaaagagacctattgccagctttatgttcttaggtcctactggtactggtaaaacagaattgaccaaggctttagctgaattcctatttgatgacgaatcaaatgtgattcgtttcgacatgtcagaatttcaagagaagcatactgtctctcgtttaatcggtgcacctccaggttacgtcttaagcgagtctggtggccaattaactgaggctgtcagaagaaagccttatgctgtcgttttatttgatgaatttgaaaaagcgcaccccgatgtttccaaactactgttgcaagtgttggatgaaggtaagctgaccgattccctaggccatcatgttgatttccgtaacacgatcattgtgatgacctcaaacattggacaagatattttattaaacgacacaaagttgggcgatgatggtaagaattga

SEQ ID NO: 79634 - DNA, 600 bp, Saccharomyces pastorianus
atgtggaaagtgggtgtagtcactgctatgaagattgtgaaacggtattctgaaatgaaagacatccttatacaaatagaacggacagaaaaactttgtttcagtaaggcgttcaagcagcaggttgagttcgccaattatgcgtttcaataccaaagagtgttttgtcctctatcaaatcagattacaactttaaataatattcctaaagcagtcacaaattcccacgctgaaattattaaaattatgaaatgtattggttccgttgttgaaaggggatcaggggtacgaaaagatgtcattaatactaaaaatattgatcacaaagttcatgaaatgatagcaaaaggggagttgcaccctgtagatatggcttctaaacttattaatagagaaagaaaattaaaagcaagaaagctgtttaaagtaagtctacttgggggtgaatccaactcattcaataagaaagtggagcaaccgctagtggatacgcaggacgtgttatcggagagggagaattctcttgataacaaaaacgcatcctctatttatatgacctcaccagcagcgatctcaggcaccgtaccatcaattttctaa

SEQ ID NO: 79635 - DNA, 513 bp, Saccharomyces pastorianus
atgtcaataggcaggggccattggggtggaacaaacgatgggggcagcgctggtgcagcattaggcgttaggaatatcaaaaatcttccaaccctgaaaagtccttcagcgtcgtatgatccctttgcaaccaccgtaaaaaaaaacactctgagacccgtgcaaaacattaaaagaactacacctcaatcagttagttatcgaacttccactaatacagtcgccttctctccaacctatttggaaagtaaaaagggttcctcttctacttctctaaataatagcaaagataaattgaaaagtctcaacctacctcaactacctccaccaaagccaaaggtgcaaattccaggtctgaacagaccccaaattgctgatcctaagcagtggggtaaaaagtcaagcacacaagatactaacgtgcacgataatttgagggaattgaacacaactagtggaggaaataaaaagaaaggcaaacaaaagcagctgttattccacattggtgtatag

SEQ ID NO: 79636 - DNA, 933 bp, Saccharomyces pastorianus
atgagcgaatcagtgaaagaaaacgttactccgacacgtaacttccgtcgtactcaagggccccaaaataatacaaaacctcacaacgacagggagaatttcagaagaaagcaaaagaaaaataacctttctgctgaacccaacctcaccacttcaagcgcagatgatactgatgaagaaaatgaattatgtgtaatttgtgcgcgcaagttaacatacgtatctctaacaccatgccatcataagacatgccatatctgtggtttcagacaacgagctttgtacaacaagaaaagctgtttgatttgcagaacggagaatgaagaagtcatgtttaccgatcgcatagatggtgatatttcagataaatataacttttgcgaaaaaaatgaaaaatatggaataaatttcactagcgaagaggttgctaccgaaacactaaatcttttaaaatttttttgtcccctatcgaaggatgaacaagtttgtgactttggtagtttcaagaaatataatgaacacttgaaatctgaacataacagaatgatctgtttaatatgtgcaacccataagcatgcattcccttgtgagcttgaaatattcacccaaaatcaattacgcaaccatcaaactaagggtaattcagaaggattcaaaggccaccctatgtgtgccttctgttccggaaaacgattttattcagacgacgaattgtacattcacatgagaaatcagcatgaaaagtgccatatttgtgataagatgaaccccgcttctcctcaatactttaaggattataatcagccgtttgaccactttaaacattcgcattacgtttgcaccgtccaaacttgcttagatacaagtttgtcgtatttaaagacgagttggagttacaagcccacattttgcaggagcatggtaatatcctga

SEQ ID NO: 79637 - DNA, 870 bp, Saccharomyces pastorianus
atgtttagaaaatttcgccatgaggcagtagcaagtatactggctgtcggtgtagatccagaaaaggcttcggtgatctaccaatccgccatccctcaacacagtgaattacactggttgctttctactcttgcctcgatgggattacttaaccgcatgacgcaatggaaatcaaaatcgaatatcaaacaatcaactaatggggattatctggttaacgattctgacgtgggaaaagttagactgggcttattttcgtatcctgttttacaggcagcggatattctactttataaatctacacacgttcctgttggcgatgatcaatcgcagcatttggaactaacaagacaccttgctgaaaagtttaacaaaatgtacaagaaaaatttttttcctaaacctgtaactatgttggcacaaacgaaaaaagttttgagcttaagcacgcctgaaaagaaaatgtccaagagtgatccgaatcacgactctgtaatttttttgaatgatgagcctaaggcaattcagaaaaagattagaaaagctttaacagattccatttctgataggttctactacgaccctgtagaaagaccaggcgtatcgaatttaattaacattgtcagtggcattcaaagaaaatcgattgaagatgtcgtagaagatgtatctcgtttcaataactatagggatttcaaagattatgtttcagaagtgataattgaggaattgaaaggcccaagaacagaatttgagaaatatatcaacgaaccaacctatttgcatagtgtcgttgaatctggcatgcgcaaagcgagagaaaaagcagcaaaaaacctggccgacattcataaaataatgggcttctga

SEQ ID NO: 79638 - DNA, 174 bp, Saccharomyces pastorianus
atgtcgaataagcaggcggttctgaagttaatcagtaaaaggtggataagcacagtgcaacgtgccgattttaagctgaattccgaagcgcttcatagtaatgctacggtatttagtatgattcagccaactgggtgtttccaccttggtaattatctaggtgctacacgtgtt

SEQ ID NO: 79639 - DNA, 252 bp, Saccharomyces pastorianus
atgtcttgctcacctgcaatagcccgcgtagaaaaaagccttgaccaaaaattcccaatcgaaaatttggacttgaaatctgaaatcccatgtgattcaatatccggtggagtccacttcttcaacatcaatgaacttagaacgacactggccgagctgaatgccatcgctaaaccggcgagcattggaggaagagttatgccccaaggaatgagcacacccatagcaatcggaatcatgaatatattatag

SEQ ID NO: 79640 - DNA, 108 bp, Saccharomyces pastorianus
atgagattagaagatccaaaggtccaaaaagctgccggagatacgaataattcatgggacagagctcaaattatggataaattgagagctatgaaaaaccgtatgtag

SEQ ID NO: 79641 - DNA, 591 bp, Saccharomyces pastorianus
atgcaggttaaatcgattaaaatgagatgggagtctggtggtgttaattactgctatctattgtccgacagtaaaaataaaaaatcgtggctaatcgatccagcagagcctcctgaagttctgcctgagttgaatgaggatgagaaaataagtattgaagcaattgttaatacacatcaccattatgaccatgcagatggtaacgctgatatcttgaagtatttaaaagagaaaaatccaacttcaaaagttgaggttataggagggtcaaaggactgcccaaaggttacgataattccggagaacttgaaaaagttacacctgggtgacttagagattacttgtattaggacgccctgccataccagagactctatctgttattatgtgaaagatccaacaacagatgagcgctgcatttttactggcgatacactatttaccgctggttgcggtaggttttttgagggtacaggcgaagaaatggatatagctctgaacaattctatcttagaaactgtgggcaggcagaactggagtaaaacgagggtttatccaggacacgaatacacagtgatatgtaacgttgtc

SEQ ID NO: 79642 - DNA, 993 bp, Saccharomyces pastorianus
atgcattcagcgagcaggagatcaagcgtggctgaaagtgggagtttactttcggataatgcctcgtcttatcaatcaagtatattttctgctccctctactgtgcacacgcaactaactaatgactcttcgttctccgaatttcctaaccacaagttaatcacgagagtgagcctggatgaagcattacccaaaacgttttatgacatgtattcgccagatattctattagcagacccatccaacattctctgtaacgggcgtcccaagtttaccaagagagagttattggattgggatttaaacgatataagatcgttattgatagtcgagaagttaaggcccgaatggggtaatcaactaccggaagtaataacggtgggtgataatatgccccagtttaggttacaattattaccactatattctagcgatgagaccataatcgcaacgttagtccattcagatctgtacatggaggctaacttagattatgaattcaaactaaccagcgccaaatatacagtagctaccgctagaaaaagacatgagcatataactggtagaaatgaagccgtcatgaatttgtcgaaaccggaatggagaaatatcatcgaaaattacctcttaaatatagcagtagaggcacaatgcaggtttgatttcaaacaaagatgctcagaatataagaaatggaagttacaacagtccaacttaaaaagaccggacatgcccccaccaagcataataccgcggaaaaacagcacagaaacaaaatcgcttctgaaaaaggctttattgaagaacattcagttgaaaaaccccaataataaccttgatgaattgatgatgagatcaagcgccgcaacaaatcaacagggaaaaaacaaagtcagcttatctaaagaagaaaaggctacgatatggtcgcaatgtcaggcacaagtttaccaaagattaggattggattggcagccagattcagtatcctga

SEQ ID NO: 79643 - DNA, 882 bp, Saccharomyces pastorianus
atgaaattgcttactatgcaaggattacaaccgacaaatttgatacctgatgaaatcgtgtcatttagttatcaggataatggcaataaaggtgacgtaatgattttaggtcaaaatggatctattgtaagctggggcttcagtgaatctagtgttcgaaactgcatagtgcctatagttaaagcagcgagtttaaatccactgaacggagaagactttgagactgaggacatggattatgtggaaatagaaggggaacaagattttgataagctttccagtttggataataaggtaacaccgaggattgcatgcgaaagctttctttctggagatttgataataattaactccttggattctgatcaaggaatgctagataaggcggcattctcaagtgggctatcgagaagcaccaacttggcagtcctagaagaagcaatggaaaaacatatatcaaagaccagaacaataacagaaaatatttctaagggaacaaagttaaatctaaggtcaagtgatgcattaaagtcaataggccgcctttttctaattagaggaaagttgaacctctattcagaactaattgagacccctgatctttattggagtgaacctcaattggaagagatttttaaaaatgtttcgaggtatttggacataggcccaagaataaatattctgaacagcaagctggactattctacggacgagtgtcgagccctcatctctcttttaaacgagagaaacagcacttttttggaatggataattatatacctgattgctttcgaactgtgctttgaaatttatcatttctaccagaaatattcttcctactgctcagaacccacgaatgatgatctagatgctacaaagtaa

SEQ ID NO: 79644 - DNA, 3411 bp, Saccharomyces pastorianus
atgaaattcttaaggaccaatattgactctacaatcaatcgatttaacttagtttccgaaagtgtcaattctaattccttggagttaactcctggagacaccataaccgttcggggcaatggaggtagaacactttcacaatcgagtatacgaagaagatcatttaatgttggttccagattctcttctataaatcctgcaacgcgatcacgatatgcttctgactttgaagagattgcagttttaggccagggcgcatttggacaagttgtcaaggcacgtaatgctctcgatagcagatactatgcgatcaagaagattaggcatacagaagaaaagttatctactatattgagtgaagtaatgctgttagcaagcttaaatcatcaatatgttgtgcgttactatgctgcatggttagaagaagacagtatggatgaaaacgtttttgaatcaactgatgaagaaagtgacttgagcgaatcttcctctgattttgaggaaaatgatttattagatcaaagcagtatttttaaaaatagaacaaatcacgatttggataatagtaactgggatttcatatcggggtcaggatatccggatattgtctttgaaaatagttctcgtgatgatgaaaatgaagatttagaccatgatacttcctcgacttcctcgagcgaaagtcaagatgatactgataaagaatcaaagagtatccagaacgttccaagaaggaggaattttgtaaaaccgatgactgctgttaagaagaaaagtacgctttttattcaaatggagtactgtgaaaatagaacgctatatgatttgatccattctgaaaatttaaatcaacaacgtgatgaatattggaggttatttcgacaaattttggaagcactgagttatatacattcccagggtatcattcatagggatctaaagccaatgaatatttttatagatgaatcgagaaatgttaaaatcggtgattttgggttagctaagaacgtccatagatctctggatatacttaagctagattcacagaatttgccaggcagctcagataatttaacatccgccattggtacagcaatgtatgttgctactgaagttttagatggtacaggtcactataatgaaaagattgatatgtattcacttggaatcattttttttgaaatgatctatcctttcagtacaggtatggagagagttaatattttgaaaaagttacgatcagtgtcgatagaatttcctcctgatttcgacgataataagatgaaagttgaaaagaaaattataaggttactcatagaccatgatcccaataaaaggcctggtgctaggacattattaaatagtggttggcttcctgtgaagcatcaggatgaagtaatcaaagaggctttaaaaagtttgtcgaatccttcatccccttggcaacagcaagttcgagaaagtttatttaaccaatcttacagtctaacaaatgatattctatttgataactcagttccaacatccactcctttcgcaaacattctcaggtcccaaatgacagaagaggtagttaaaattttcaggaaacatggaggaattgaaaataatgctcctccgaggatttttccaaaggcccccatatacggtacgcagaatgtatatgaagtgcttgacaagggcggtaccgtcttgcagttacaatatgatttaacttatcctatggctaggtatctatctaaaaatccaagtctgatttctaagcaatataggatgcagcacgtttaccgacctcctgatcattcaaggtcaagtttggaacctagaaagtttggtgagattgacttcgacataatttcaaaatcttcctcagagtcaggtttttatgatgcagaaagcttgaaaattatcgatgaaatattaaccgtatttcctgtatttgagaaaacaaacacttttttcatattaaatcatgctgatattttggagagtgttttcaactttacaaatattgataaagcccaaaggcctctagtttcacgaatgttgtcgcaagtaggctttgcaaggtccttcaaggaagtaaagaatgaactaaaggcgcaactgaacatatcttctacggcattgaatgatttggagttatttgattttagactggacttcgaagcagccaaaaaacgcctgtataaattgatgattgatagtccgcatctaaaaaaaattgaggactctttgtcccatatatcaaaggttctcagttacctaaaacccttagaagttgcaagaaatgttgtgatatctcctttgagtaactacaatagcgctttttacaaaggaggtatcatgtttcatgcagtttatgacgatggatcctcacgtaatatgatagctgctggagggaggtatgacactttgatatccttttttgccagaccatcaggaaaaaagagcagcaatactcgtaaggctgtaggtttcaacttagcgtgggaaacaatattcggtatagcccaaaactatttcaaactcgcttctggaaataggataaagaagagaaataggtttttgaaagatacagctgttgattggaagccaagcaggtgtgatgtattgatatcgagtttttcgaactctttgttggacacaatcggggttacaatactgaatacattgtggaagcaaaacattaaagcggatatgttaagggattgttcctcggtggatgatgtcgttactggcgctcaacaggatggtatagactggattttgctgattaagcaacaagcgtatccactaaccaatcacaagagaaagtacaagccattaaaaataaaaaaattgagcactaatgttgacatagatttagatcttgatgagtttttaaccttgtaccaacaagaaactggtaataaatctttgatcaacgatagtctcactttgggcgataaggctgatgaatttaaaagatgggatgaaaacagcagtgccggtagtagtcaagaaggtgacatagatgatgttgttgctggttcgactaataatcaaaaggtaatttatgttccaaacatggctacaagatctaagaaagctaataaaagggaaaagtgggtttatgaggatgcagccagaaattcttcgaatatgatattacacaatttatccaatgcaccaattatcactgttgatgccttaagagatgaaactttagaaataatctcaattacttctttggctcagaaggaagaatggctgagaaaagtttttgggtcaggtaataactcgactcctagaagctttgccacgagcatttataataacctctccaaagaggctcataaagggaataggtgggcaatattatactgccacaaaaccggaaaatcatctgttatcgatttacagaggtag

SEQ ID NO: 79645 - DNA, 1452 bp, Saccharomyces pastorianus
atgtcattgagtcatctcactttagatcaatattatgaaatacagtgcaacgaacttgaagcgatacgttccatttatatggatgactttactgacttaactaaaagaaagtctagctgggataagcagccacagattatattcgaaattacgcttcgatctgttgacaaagagccggttgaatcttctataacattacattttgcgatgaccccaatgtatccttataccgctccagaaatagaattcaaaaatgtacaaaatgtaatggatagtcaattgcaaatgctgaaaagtgaatttaagaaaatccacaacacctcccgaggccaagagattatatttgaaattacatcttttactcaagaaaaactggacgaatttcaaaatgtggtaaatacacagtccttggaagatgatcgattacaaagaatcaaagaaactaaagaacaattagaaaaggaagaaagagaaaaacaacaggaaacaataaaaaaaagatcagatgagcagcgaaggatagatgaaattgttcaaagagagttggagaaaagacaagatgatgatgatgatttgctattcaacagaacaacccagttagatttacaaccaccttcagaatgggttgcatcaggtgaagctattgtgttttcaaaaactataaaggcaaaattgcctaataactcaatgttcaagtttaaagcagttgtaaatcctaagccaataaaactgacatcagatatatttagtttttccaaacaatttcttgtgaagccttatataccaccagaatctccgttggcagattttttaatgtcttctgaaatgatggaaaatttctactatttgctatctgaaattgaattggataatagctatttcaacacaagtaatggaaaaaaagaaatagcaaatttagagaaagagttagagacggtgttgaaagctaagcatgacaatgtgaatcgattgttcggttatacggtggagcgcatggggagaaataatgcaacgtttgtttggaaaataagactcttgacagagtactgtaactactatccattgggagatttgatacaatctgttggatttgttaacttagcaacagcgcgtatttggatgattagattgcttgaaggattggaggccatacacaaattgggaattgttcataaatgtatcaacttagaaaccgtgatcctggtgaaggatgcagattttggaagcactattcccaagttagttcactccacttatggctacactgttttgaatatgctatcgagatatccaaataaaaatggttcttcggttgagttatctccaagtacatggatagcccctgagttgttgaaattcaataacgccaaacctcaaagattaactgatatttggcaacttgacgcccgatctcaagatttcgtggtaataaattacagtcttgcgccttag

SEQ ID NO: 79646 - DNA, 288 bp, Saccharomyces pastorianus
atgcctttatggagaaaaatggtggcctttctaccactgttaggagctgcactaattgctctatccagaactcaagattacagacatcatttcgtcgatgtaattttagggtctatgttgggttatataatggcacactttttctacagaagaatcttcccacccattgatgatcctcttccgttcaaaccattgatggacgattcagatgtcaccctggaggaagcagtgacccatcagaggatcccggatgaggaattacatcctttgtccgatgaaggtatgtaa

SEQ ID NO: 79647 - DNA, 186 bp, Saccharomyces pastorianus
atgatacttcttaactacccagtgtattaccaacaaccgatcgaacgtcagttttacattaacgatctcactatatcgcatccttatgcgacaactgaacgtgtaaataacaacatgttgtttgtttatagttttgtctgtgccatctttaaccatattgataattggttccatttcggccgatag

SEQ ID NO: 79648 - DNA, 93 bp, Saccharomyces pastorianus
atgaaacctccaatttcttcaagaaaaaaattactactagtagaagacgaagaccagtcattaaaaataagcaagaaaaggagaaggaaatag

SEQ ID NO: 79649 - DNA, 690 bp, Saccharomyces pastorianus
atggccaagtatcccagtttcaaatttatcggagaagaaacttatgtaaaaggtgtcacgaaaataactaacggccctacatttattgttgatcccatcgatggtactactaattttattcacggttacccctatagttgtacatctctaggtttagctgaaatggggaagccggttgttggtgtggttttcaatcctcacttaaaccaactattccatgcttccaaaggcaatggagctttcttaaatgatcaggagataaaggtttcaaaaaggccattgattttgcaaaaatccttaattgctttagaaggaggttcggaaagaactgaaggttcccaaggaaactttgataagaaaatgaatacttataaaaacttactaaatgagtccggcgcctttgttcacgggttcagaagtgcaggaagtgctgccatgaacatatgctacgtagcgagcggcatgcttgatgcttattgggaaggtggctgctgggcttgggatgtttgtgccggttggtgtattcttgaggaagcaggaggaataatggttggcggaaattgtggagaatggaacattccattagacagaagatgttacttggctattagaggtggatgtgagtcgatggagcagaagcgatttgcagaatcgttttggcctcacgttgcgggtgagttagaatactaa

SEQ ID NO: 79650 - DNA, 78 bp, Saccharomyces pastorianus
atgggccttgaaaaggagcagactaaaagtttgcacgatgatataataaaaagcattggcgattcatattctatatag

SEQ ID NO: 79651 - DNA, 477 bp, Saccharomyces pastorianus
atgagttctacagataatgacagcgatgtggatttaacagaagatttagccgtggccaagatcgttaaagagaatcctgtagctagaaaaatggttaggtatattttatcgagaggagaatctcaaaattcgatcataacaagaaacaagttgcaatctgttatacatgaagctgctcgcgaggaaaacatagcaaaaccgtcttttagtaaaatgtttatggacataaatgctatactgtataacgtatatgggtttgaattacaaggattgccgtcaaaaaataatatgaacgctggcggtaatggaagcaatagcaatacaaataaatcaatgcctgagccactgggacatagagcccagaaatttatcttgctaaacaatgtcccgcactcaaaaaattttgacgatttcaagattttacaaagcgctcacacttatgaagagctaatagttaccgggagagtatattggtga

SEQ ID NO: 79652 - DNA, 2700 bp, Saccharomyces pastorianus
atggatatcaatgacgacgatgatgaggaaatggacgatttatacgccgatgaagctcctgaaaatggactaacgactaatgattccaaaggcactgtggaaactgttcaacctttcgatatcgaactgttatcatctctaaggaatgttggtcccatcacatcgttaactgtaggtaaggtatcttccattgatgatgtggtaaaaggactaccaaatccaaacaaaaacgagtattcgctagttgccacatcgggaaatggttcaggttctcatttgaccgtcatacagactagtgttcaaccggaaattgaattagcattgaaatttatcagtataacacaaatctggaatcttaagatcaaaggaagagataggtacttaataactactgattccacaaaatcccggagtgagatatatgaaagtgacaataacttcaaacttcataagggcggccgtttaagaagagatgctactacagtttacatttcaatgtttggtgaagaaaaaaggataatacaagtcaccaccaatcacttatatttatatgatacacattttagacgtctcaccacaattaaatttgactacgaagttattcatgtttccgtcatggatccgtatatactagttaccgtatcaaggggtgatattaagatatttgaattggaggaaaagaataaaagaaaattgttaaaagttgatttgccagaaattttgaatgaaatggttattacatctggtttgattttgaaaagcaatatgtgtaatgaatttttgattgggttgagtaagtctcaagaagaacagttattgtttacatttgttactgcagataaccaaattatcttttttactaaagaccataatgacagaatctttcaactaaatggtgttgaccaattaaatgaatctttatacattagcacttatcaactgggcgatgagatcgtccctgatccgtcgattaaacaagtaatgataaacaaactgggccatgacaataaagaagaatacctgacaatattaaccttcggaggagagatttaccaatatagaaaattaccacaaagacgtagtagattttatagaaacgttacaagaaatgatctagctattactggtgctcctgacaatgcatacgccaagggtgttagttccatcgaaagaatcatgcattactttcccgattacaacggttattcggtaatatttgtaaccggtagcgttccatacatattaataaaagaagatgattccacaccgaagattttcaaattcggaaacataccattggtttcagtcactccctggagcgagcgttcagtcatgtgtgtagatgatattaaaaacgccagagtttacacactaactactgacaatatgtactatggtaacaaattaccattgaaacagataaagatcagcaacgtgcttgatgactacaaaactctgcaaaagttagtctatcatgaaagggctcaattgtttcttgtatcttattgcaagcgggttccttacgaagcattaggagaagatggcgaaaaagtaattggttatgacgagaatgttcctcatgcggaaggatttcaaagtggaattttactcattaatccaaaaagttggaaggtcattgataaaattgactttccaaagaattctgtcgtcaatgaaatgagatcctctatgattcaaattaattcaaaaactaagaggaaaagagaatacattatagccggtgttgccaatgccaccactgaagacactccaccaactggcgctttccatatttatgatgtgatagaagttgttcccgaacctggtaaacctgataccaattataagctcaaggaaatttttcaagaagaggtcagtggtactgtatctactgtttgtgaggttagtggaagattcatgattagtcaaagccaaaaagttctagtaagagatatccaagaagataattccgtcataccagtggcatttttggatattcctgttttcgttacggattctaaaagctttggtaatcttttgataattggtgacgctatgcaggggttccaatttattggttttgacgcagaaccatacaggatgatttcattgggtagaagtatgtcgaaatttcaaacaatgtcgctagagtttttagtgaacggaggggatatgtattttgcggcaacagatgctgacagaaatgttcatgttttaaaatatgcgccagatgaacccaactctctttcgggtcaacgtttagtccactgctccagtttcacgttgcattccaccaatagttgtatgatgcttttaccaagaaacgaggaatttggctctcctcaagtgccatcgtttcaaaacgttggtggccaagtggatgggtcagtcttcaagatagttcctttaagtgaggagaaatacagaagactttatgtgattcaacaacaaatcatcgatcgagaattacagctaggtggtttaaaccctcgcatggaaagattggccaacgacttttatcagatgggtcactctatgaggcctatgcttgatttcaacgttatacggaggttctgtggattagctattgatagacggaaaagcattgcgcagaaagcaggaagacatgcgcattttgaagcatggagagatatcataaatattgaattttcaatgagatctttatgccagggtaagtga

SEQ ID NO: 79653 - DNA, 111 bp, Saccharomyces pastorianus
atgttcagggagaaaaacactacgtcaatttggataccttcgtccaagagcaaaaacggaggaagtaataatgacgaaacactactacttatggaacttgaaatccaatat

SEQ ID NO: 79654 - DNA, 942 bp, Saccharomyces pastorianus
atgaatgtatatgatgatgtgcttgacgctactgttgtgtctcattcattagcaacacattttactacttcagattatgaggagctcttagtggtgcgaacaaatatcctttctgtctacaggcctactagggatggtaaactgtatttgactgatgagtttaagtttcatggcttgatcaccgatataggcctcattccccaaaaagacagtccgttaagttgcctgcttttatgcacaggcgtcgctaaaatctctattttaaagttcaacacgctaacaaactcaatcgataccctaagcctgcattactacgaaggaaagttcaagggtaaatcgttggtagagctggccaaaatttccaccttgagaatggatcctggaagttcttgtgccttactgttcaataatgacattatcgcttttctacccttccatgtcaataaaaatgacgacgatgaggaggaagaagatgaggacgagaacatagacgatagtgaattaatccatagcatgaatcaaaaatcccaagggacgaatactttcaataagaggaagagaaccaagttaggtgacaagttcacggctccaagcgtggtattggtagcgagtgagttgtacgaaggcgccaaaaatatcatagatattcagttcttgaaaaattttactaaaccaacgatagcgctcttataccaaccaaagcttgtttgggcaggaaacaccaccatttcaaaactccctacacaatacgttatactcacattaaatatccagcctgcagaaagtgccaccaagattgaatcaaccacaatagcatttgtgaaggaactgccttgggatctacacaccattgtacctgtttcgaatggtgctatcattgtgggaaccaatgaactggcatttctagatatactggcgttttacaatcgacaatattattaa

SEQ ID NO: 79655 - DNA, 663 bp, Saccharomyces pastorianus
atgcttatatgcgtgaagtgcgctttagtaagaacatgtggctgtttctgtagaagccttgtctttctctgtattcctttaaaggccaaccgtacgtgcttaattacaagctttgttcgcattgcaagaaagttagaaaaaaaatcaattctgaaagataattataattcaaacggtaaaccattggttaaaaaggaacataacatttcactagttcaatacattatatgccctttaacaatgacagatagattaacacaattgcagatatgtttagaccaaatgacggagcaattctgtgctactttaaactacatagataagaaccatggttttgaacgattgaccgtaaatgaacctcagatgtccgataaacatgccacagtagtacctcctgaggaattttctagcacgatagatgagctatccacggacattatacttaaaacaagacagataaacaagcttattgactcgttacctggtgttgacgtttcagctgaagagcaattaaggaagattgatatgttgcagaaaaagctagttgaagtggaagacgaaaaaattgaggccatcaaaaagaaggagaaacttttaaggcacgttgattctttaattgaagattttgtagatggcattgcaaactcaaaaaagagcacataa

SEQ ID NO: 79656 - DNA, 1296 bp, Saccharomyces pastorianus
atggattgtttcgtgtctggtatatattattgctactgctcaagagagcttctttttttatgctatcgaactcgatctttcgctccgaaacacctaacactaacaaaaggatacctgacagaatacgctatcaaaagaacgaatatgactagtgcaagtgttaccaatactggaaacgaaaccatgaaccttccacagatgcggtcgatttggctggatgaagatgaagaagctgaaaaactctacagtctgcaggcccagcaattcatgggatctgatgatgaagaaaacctaggcattactttcatcaacagcgataaacctgtgctgagtaacaagaaaaacattgagttgcctccactttcaccaaattcacatccgtcttgccaccacaggagaagtaattctaactctgcaaagtctaaagaatcatcgtcatcatcgtccagcgccaacaagacaaatcacaaaaaggttttccttaagctcaatttgttgaagaaaaagttgcttggtgcccaaccggacataagaggtaaaggtatctccacgccatttgattttcaacatatttcacatgctgacactagaaatggattccaagatgagcaattgcaggaaccttcatcgctgtccacagagattaaggacgactatacctcctcctcaagcaagcgggattcgaaatcactaaataaagcttttgtcactgaaaggatccctgctaatcgtgaaagcaaactcatttcaagatcgcacgaaaataagacatcaagactatcagtcgcgcgttcgatctcagtaacgtcctccaattactctaaaaacacacaaggaaacaatcattccattaatgggagagtcgtatctacgtcaactatggctacatctatttttgagtattccccaaacgcatctccaaaacaatttaacaataagtcacacgctctgggtcatagatacactaattccacggattctagtgagtcttcgctggattttttgaagaactacaacttccccacactacttgaagataagcctattttagacttcttgcctcgttctcaaaggtcaagcgcttatcgtagccttttagagaccccaaactcaaataaggattcagcaaaagccttctttccttcacgccaaagtcctcttcccaagagaagaaactctatagctacgccttctccacaatctaaattttcctactctgactcccctgtaaaccatagaaaatctttcgatgatgttctttattctttcaaccagctcgagcccctgcaaacttaa

SEQ ID NO: 79657 - DNA, 1026 bp, Saccharomyces pastorianus
atgcaaaatgatagaggtgacgtaatcattgacaggtacttgacattggatcaagagttcgacagaaaagatgatgacatgctattgcatcctgtgaaaaaaattatagatttagatggtaacatacaggacgacccagttgtacgaggcaacaggcccgacttcactatgcagccaggtgtggatattaatggtaatagcgatggtaccgtggacatcttaaagggtatgaatagattgagtgaaaaaatgattatggctttgaagaatgagtattcaaggacaaatctacagaacaaatctaatattacaaacgatgaggaagatgaagataatgatgaaagaaatgaactgaaaatcgatgacttaaacgaaagctacaagacaaactatgcaatcatacacctgaaaaggaacgcacatgaaaagacaaccgacaacgatgcgaaaagctcggcagactcgataaagaatgcagatttgaaggtttctaatcaacaaatgttacaacagttgtcattggtcatggataatttaattaataggctagacttgaaccaagtagttcctaacaacgaagtcagcaacaagatcaataaaagagtcataactgcaatcaagattaacgccaaacaggctaagcataacaatgttaattcagcactcggctcttttgtcgacaacacttctcaagcaaatgaattagaggtgaaaagtaccctaccaatagacctattagaaagttgtagaatgctacacacaacgtgctgtgaatttctaaagcacttttatattcattttcagagcggtgaacaaaagcaagccagtaccgtcaaaaaactttataatcatttgaaggactgtattgaaaagctgaatgagctatttcaagacgtccttaatggtgatggtgaatctatgtcaaacacatgtaccgcctatttgaagccagttttgaactccattactttggctactcataagtacgatgagtacttcaacgaatataacaacaattcgaactag

SEQ ID NO: 79658 - DNA, 441 bp, Saccharomyces pastorianus
atggaggaacctaagccttcagaaaattcgcaaccaactccacgtaagaaggctatcaaactgactgaattaggaccaagattaactctaaaactggtcaaaatagaagatggtatttgttcaggtaaagtattacatcatgaatttgttcaaaaatcaagcgaagaaatcaaagccttagaaaagagacacgctgcaaaaatgaggctgaaggaacaaagaagaaaggaacaagaagaaaacattgctaaaaaaaaggctgttaaagatgctaaaaagcaacgtaaattggaaagaagaaaagctagagcagaagaacagggtgaaggtcaagggaaagatggtgcaatgagcgatgatggatcttcatcgagtgaagatgagcattatagtgatgtaccagaggatttggatagtgacttattcagtgaagtagaataa

SEQ ID NO: 79659 - DNA, 873 bp, Saccharomyces pastorianus
atggctaaaagaaggcagaaaaagagaacgcatgcgcagatcacacccgagcaggaacgagatattcctaaatccatggtaatcagagtgggacaaacttcattggctaaccattctctaaaccaattagtaaaggattttcgccagatcatgcaaccgcatacggccgtaaaactaaaagagcgcaagtccaataaactgaaggattttgttgttatgtgtggcccattaggtgttacgcatcttttcatgttcactcaatctgaaaaaacaggaaatgtctcgctaaagatagctagaactccacaaggtcctactgttacttttcaagtattggactattcactgggtagagatatcaaaaaaattttgaagagacctaaatcgttaaataatgatgatgtattaaatcctccattgctagtgttaaatgggttttccacatcgaaaagatctgatgaagacgatcaggatgtaaacgtggagaaggttattgtttccatgttccagaatattttcccacctctgaatcctgcaagaacttcgttgaattctatcaaacgtatatttatgatcaataaagacagagaaacgggggaaatttctatgcgccactattttattgacattcgagaagtagagatctctagaaatctaaaaaggctttataaagccaaaaataatctaagtaaaacagtgccgaatttgcatcgaaaagaagatatttcttctttgatattagatcatgacttaggcgcctatacatcagaatctgaaattgaagatgacgctattgtgagagtggttgataatcaggacgtgaaggcaaaacattctcaaacttcgctgtcgcaaaaaacacccgttaaatga

SEQ ID NO: 79660 - DNA, 240 bp, Saccharomyces pastorianus
atgttagtgtacaagatatcgcctaatacaacagataatgcaattaaggagtgcccgatttgttttgagaatatggaacccggtgagaaagttgggagactagaatgcttgtgtgttttccattataagtgtattaagaactggtttcacaaaagggcgcaaatgactgcagcccagaagggaaatggacatgcttttgttaaaaggaacttttgtcctttccatgatgccgtattttaa

SEQ ID NO: 79661 - DNA, 1104 bp, Saccharomyces pastorianus
atgaccaagtacatgatcggtgcttatgtgatatttttaatctatggtctcttctttaccaaaaaactgtttgcgaaagacaaagaactggaaagattgttgaagaaacaagaagaagggaatgccaatgaatacgaagcattaaggattaaagaattgaaaggaaaactaaggaggagagatgaattgaaattagaagaatacaaaaaaatgcaagaagaaggcattgaaaacttcgatgatattcgggtacagaattttgatcaaaacaaattgaatgaacaaatattgccagcaagagacacaacaaacttttaccaagaaaaagctaacgaatatgataaggcaattaatatggaagagagagtaatatttctcggtaaaagaaggaaatggttaatgaaacattgtcaaggggatgttttggaagtttcatgcggtacaggaagaaatatcaagtaccttgatatgtcacgcatcaactctataacattcttagactcttctgaaaatatgatggaaattacacataaaaaattccgagaaaagtttcctaagtataaaaaagttgcatttgttgttggaaaggcggaaaatctagtagacttagcagagaaaggtaagccctctctagagaatgaaaaggaaaaccaagtaaaatatgatactatcgtggaggcgtttggtttgtgttcccatgaagatccggttaaggcacttaataattttggcaagttattaaagccagatggaagaattattttactggaacatggtagaggtcaatacgattttataaataagatattagacaacagagctgaaagaagactgaatacttggggctgtcgatggaatctcgacttaggcgaagtgttagatgattctgacctagaattggtggaagaaaaacggactcacttaggcactacttggtgtatcgttgcgaagagaaaaggtgatgtgaaaaagaaagacgagcttgggtttgtagaaaaatacttgcaatcaagtattagaaagagaatggaatcattcgaaaaaaaagacgatatggcatctaaaaaagaacttgagccagtacctcctgtaagtaaaagttaa

SEQ ID NO: 79662 - DNA, 444 bp, Saccharomyces pastorianus
atgatcgtatttcgtcgctttcctacgtgccttttacatcacattcgacaaccggcatccaggagtcttttgttggaatcacaaaggcgatcattatcttttacatcttataaatataacagcagccacattgatgatgataaaagtaaaaaaaagcttaaaaatgttttccaaatgaatagcaatagagtcattcgtaagcaaaaaacaaaagaagaattggccaaagagaggttcgaagaacaactgaggtcacctaatagatttgtgaggtgggggagctattgcgagatcagaaaagttttcaaagggaatgaccaagtacatgatcggtgcttatgtgatatttttaatctatggtctcttctttaccaaaaaactgtttgcgaaagacaaagaactggaaagattgttgaagaaacaagaagaagggaatgccaatga

SEQ ID NO: 79663 - DNA, 195 bp, Saccharomyces pastorianus
atggtttcgttttttgtgaaggatattaaggtcgagttgtttgtaaaacaaaatgaaatagtttcatgttcaatattggacgatattcatgattttagtcaaaataataaaagtaaatgggaaattgcattgctcggttctttggatgatttggaattaaagttaaaccattcttttgcgacaatattcaagtga

SEQ ID NO: 79664 - DNA, 516 bp, Saccharomyces pastorianus
atggttcagcaccaaatgtttgatcctggggtggcagatttattggatacagacattctaacgtcaccttcaaaaagaaagcgaaaactaaaaatagacgatattagtacaagtgatagaagtgagttggaagattatattgtcctggaaaatgtttatagaatgtttggtataacatttttccctcttgtggaccctattgaccttaaaataaaagatgctagcggtgaaatatttgttgatagagaaatgctgggaatacgactggaagtcttcagtgaacggacatcccaatttgaaaaacctcactatgtattgttgaaaaagaggatcaaatcgaatagttggttcctgttcaagcatacaatcccgagtttcattgatgtccaaggtatatttgatgacaccaatgggggactagtgatatctcatgatgacgcctatttatttgctaaaagagtcttcctgcaacttgtggaagtaacctgcagcatcaagctgcactgccgtccttta

SEQ ID NO: 79665 - DNA, 453 bp, Saccharomyces pastorianus
atggtagtgatttcaactgaatcgcttttcatgatacccttccaaaagtgcgatgagagtcctgttatccttcactgtcttcaaacacatttcttcaacaaagtcatcgtcatcatcttttttttttttttcatcgagtattttttcacacgaacggcacaagtagccttcaactgtaataaacaaaagcagatagggaggaaaagaagtgagtttaggagaagaaagcataacatggagaaccctcacgaacaagtgcaggctaacatactttcgcgaataattggtaatgtcaaaaggctcaatgagagcgtggcaattcttaaccaggagcttgtgaccattaataatcggaacaaaaatctagaaatcatgggcgcaatttgtgataactaccatagtagcgtccaattcaacctggaagcgaccaataacaagaagccacctctttaa

SEQ ID NO: 79666 - DNA, 1224 bp, Saccharomyces pastorianus
atgattaaacttaatctttccgcacagtatgaccccagaaacgggaaatggtacaattgctgccatgattgtttcgtcacaaaacctggctataacgattatggcgaagtaatagatttaacaccagaattctttaaggtacgaaatataaaaagggaggacaaaaacttaaggctattacaattagaaaatcggtttgtccgtctagttgatggtctgattacactctataacacatattctagatccattattcataatttgaagatgaatagtgaaatgtccaagttagaacgtacagttactccatggagagatgatagaagtgtactcttttgtaacatatgttccgaaccatttgggctattactaaggaagcatcactgcagattatgtggtatggttgtttgtgatgatgcaaacaggaactgctcaaacgaaataagcataggttatttaatgtctgcagcgtcagatctaccattcgaatacaatatacagaaggatgatttacttcatattcctatatccataagattgtgctcgcactgtatcgatatgctatttattggcaggaaatttaacaaggacattagaatgccgctaagtggaatatttgctaaatatgatagcatgcaaaatatatccaaagtaattgatagtctcctgcccatttttgatgactcattgaatagcctgaaggtggagactgccaaggattctgaaaatacacttgatccaaagaatctgaatgatctcgctcgattaagacataaattactcaattcttttaacttgtataatacactaacaagacagctcttaagtgtagaacctcaaagtcatctagagagacaacttcaaaattcgatcaagatagcttccgctgcatacataaacgaaaaaatcctaccgttgaagtcgcttccggcaattttgaacccagagggccataaaacgaatgaagatgggcaaaaagctgaaccagaggtaaagaaattatcgcaactaatgatcgaaaacttgaccataaaagaagtgaaagagctgagagaagaattgatggtcctaaaggaacaaagctaccttattgagtccacaattcaggactataagaagcagcgtagattggaggagatcgtcacacttaataagaacttagaagaattgcactcaagaatacataccgttcaatcgaagctgggtgaccatgggtttaattaa

SEQ ID NO: 79667 - DNA, 723 bp, Saccharomyces pastorianus
atgctaaagcctaacataatatttcaacagttgctattttggactgatccacgtaacttagttaaccagacaggttcaacaaaaaaagatacagtgcagcttacattcttgatcgatgtgctcaaaatatacgctcaaattgagaagaaagaaataaagaagatgatcatcactaatataaacgctatatttctttcttctgaacaagattattctactttgaaagaacttcttgagtattctgacgatattgcagaaaatgataatttagacaatgttagcaaaaatgctctggacaagctaaggaataatttgaattcgctgattgaagagatcaatgaaaggtcagaaactcagacaaaagatgagaacaacactgcgaatgaccaatactcgtctattttggggaattcattcaataaatcttcaaatgacaccatagaacacgctgctgatataactgatggaaataacacagaattgactaaaacaactgttaatatttcggcagttgacaatacaacagagcaaagtaactcaaggaaaagaacgagatcagaagcggagcaaattgacacatccaaaaacctggaaaacatgagtattcaagacacgtcaactgtagcaaaaaatgtaagttttgttttacctgacgagaaatcagatgcaatgtccatagatgaagaagataaggattcagagtctttcagcgaggtctgttaa

SEQ ID NO: 79668 - DNA, 2082 bp, Saccharomyces pastorianus
atgcaagatcctgatggtattgacattaatacgaaaatctttaactcagttgctgaagtatttcaaaaggcacagggttcatatgcaggacacaggaagcatatagcagttttgaagaaaattcagtcaaaggctgttgagcaaggctatgaagatgcttttaacttttggttcgataaattagttactaagatccttcctctgaaaaagaatgagattatcggagacaggatagtaaagttagtagctgcatttatagcttctttagaaagggagttgatattggccaaaaaacaaaactataagctcacgaatgatgaagaagggatattctcaaggttcgtcgatcagttcataagacatgttttgcgtggtgtggaaagccctgacaagaacgtcagatttagagttttacagttattagccgttataatggataatataggggaaatcgatgaatcacttttcaatttattaatattgtctttaaataagaggatttatgatagagaaccaacggttaggatacaggctgtgttttgtttaactaaatttcaggatgaagagcaaactgaacatttaactgagctttctgataatgaagaaaattttgaagctacgagaactctagttgcttctatccagaacgatccgtcagctgaagtacggagggctgcaatgctgaatttgatcaatgataataatactagaccgtatatcttggagagggctagagatgtaaacatcgttaatagaaggctcgtgtattcgagaattttgaaatcaatgggaagaaagtgtttcgatgatattgagccgcatatttttgatcaattgattgagtggggtttagaagatagggaattatcagtgagaaatgcgtgtaagagactcattgctcatgattggttaaatgctctggatggcgatttgatagaattactagaaaaattggatgtctcaagatcctcagtgtgtgttaaggctatagaagcactttttcaatcaaggccagatatattatctaaaatcaaatttcctgaaagtatttggaaagactttaccgtagaaattgccttcctctttcgggctatttatttgtactgtttggataataatataacagaaatgctggaagaaaactttccagaagcctcaaaattatccgagcatttaaaccattatattcttctcagatatcatcacaacgacatttctaatgactctcagtcgcattttgattataacactttagagtttattattgagcaactatcgattgccgccgaaaggtatgattatagcgatgaggttggaaggagatcgatgcttacagtggtacgaaatatgctggccttaactacactctccgaacctcttattaaaattggtattcgtgtaatgaaaagtctgtccataaatgaaaaagattttgtaacaatggcaatagaaatcattaatgatattagagacgacgatattgaaaaacaagaacaagaagagaaaataaaaagcaagaagattaatcgcagaaatgagacttccgtcgatgaagaggacgaaaacggcacacataatgacgaagttaacgaggatgaagaagacgacaatatttcatccttccattctgctgtagaaaacttagtgcagggaaacggcaacgtatctgagagtgacataataaataatctcccacccgaaaaggaagcgtcctcagcaacaattgttctctgtcttacaaggtcatcatatatgctagaactagttaacacaccgttaacagaaaacattttaattgcgtcgttgatggacactttgatcacaccagcggttagaaataccgcgccaaatattagggagcttggtgtcaagaaccttggtttatgttgtctcttggatgtgaagttggctattgataacatgtacatcttaggtatgtgcgtttcgaaaggtaatgcatcattaaagtatattgcgttacaagtcattgtagatattttttccgtacatgggaacactgtggtagacggagaaggcaaagttgactcaatctcgttgcacaaaatattttacaagttttaa

SEQ ID NO: 79669 - DNA, 3675 bp, Saccharomyces pastorianus
atgtcagcacccaataatattaacaacaataacgacattgagaattcttcaaacagtctatttgatactattctatcaattgctcatagtgccatatctcatgtccctaaaatttcagccttaaatactgagatacaacgtgaattttcgcattcaggtgaaagtcatacaggttcaactcgccatccttatttccatatccaccacgcgcagcagcaacatcccttgtcacagcaacaagggcccttacctgtttccgaaaatgctaaccaaaatcctaatgacacagtgctcattcattccccctccgctaacacagcccaccgcagttcatcatttttgcgtcatttagattatttactatcccccacttctggtccagcctctgataaacatactcaagtagaggaaggggatgacgaggaagagttatcgcctctttccaaagcatttctttcaccatcaactcaactggtacctacaaatacatcgactacgcccctttcaggttctttgacacctaacaatagaaacgtaaatgcaaactctaactctgaaaccgagaacgacaatgatagggatgatagatcaaatgttggcaaagtgaaatttcagcccttgaaagtacacgagcctgcaatctcaacctttggtaaaggcaacttaactttagaggcagtggcaggatcctctgatattgataatacaactattgatctggacgagaataataccaataataatccaaatgcaagttcaacaaacttgagtcatattagcaaaagtaacgtaaacaataatctcggtccaaaagaattaaacacaagttatcgtaatagtagctatatcgacatggcaaggtttgaaaattcacaatcgaacctttctagccatagggcaagaagtaagacactgcccgcgaacaaagcattagagaatgccgttggtgatgaaggtaatagtaaaagaaattcaagatattcttcttattcaaacgatatggcctttgatgatgccgacgaaagaaaattcagaggtatgtccaaaaaattcttaaacaggagatctttttcaccttcgaacttaggcaataaagtgatccctggaattaatttaagaaattcattcaacaaaaataggaatagtagttctgatttctttagtacaaatcagggacagcaaatgccaagaacaagtactgcgggctcaggtaatatccatgcaataatgggtttggattctggcaatgatgatttcaagttagaaggtattgaatatgcttcagaaaagaaaaacagcgaatttcatacccttttcaaggactgcgatattaatcctaacgaaaagttaattgtcgatcatagttgtgcactatctcgtgatattcttttacaaggaaggatgtatatatctgatgcacacattggatttttctcaaacattttgggatgggtcagtacagttttcattccgtttaaggaaatcgttcagattgagaaaaagactaccgccggaattttccccaatggtattgtaattgatacgttgcatacaaagtacatcttcgcctcttttatgtcaagggatgctacctttgatttaattacagatgtatggaatcagatcatcttaggtaaaaaatataggaatggcttcggtaataatgacgacggtacgataagcgattcgagcagtgcattttttgatgattccgatgacaatgacgacgatggagacctggatgacgatgaccctgatattaatagcacagatatgacatctagtgacgatattgatgctgatgttttcaatgaatcaaatgatcttggtaaaaaccaaaaatctacgaactacttattgggtcccaataaacactctccaaccactgctgatttcaaaccttccaataatgatcatttggttattgaagcaaatattaatgcaccattaggaaaagtagtaaatcttttatacggtgaagacgtctcttactatgaaaggatccttaaagctcagaaaaattttgaaatatcgccaatccctaacaatttcctcacaaagaaaattcgtgactatgcatatacgaaaccgttatcaggcagcattggtccaagtaaaacaaaatgtttgatcacagatactttagagcattatgatttggaagactatgttaaagtgctcagtattaccaagaacccggatgttccttcagggaatatcttttcagtgaaaactgttttccttttctcttgggataaaaacaactccaccaaattaacagtttacaattctgttgattggactggtaaaagttggatcaaaagtatgattgaaaagggaacatttgatggtgttgcggacacgacaaagataatgatatctgaaattaagaaaatcttaagtgatgaagactcaaacataaactcaaagcatcaagccagcaataatgaatcagaagaagaaattattaatctgccaactattggacctccagttcatgatccgacggaacctgattttcaaaaaggaaaagacgatacagttatcgatgaaaaaattaatataccagttcctttaggaacagtgttttcactattgtatggtgatgacacatcatatattaagaaaatcatcgaaaaccagaataactttaatgtttgtgatattccaaagtttgtgaataacgcaagagagatcacctataccaaaaaattgaacaattcattcggtccgaagcaaactaaatgtatagtcacagagaccatcgagcatatggatttgaacagtttttttatggtaaaacaaatagtcagatctccggatgttccttacggtagttcattttcagtacatacgagatttttctattcctggggtgatcacaacacaacgaacatgaaagttgtcaccaatgttgtctggacaggtaaatcaatgctgaaaggaaccattgagaaaggttcaattgatggacaaagaagttcaacaaagcaactcgtagatgatctcaaaaaaataatttctaatgctagttcaacgaagaaaaaatcgaggagaagaggaaagacggtaaataaaaggaaatcatcaccatccactatcaagaatgagaagaatgaagaaaacttcgaagatacaagtaccaaaaattcatttttttccgctttctcaatgttacaacaagtaaacataacatccgttcaaggaattatgacaattatctctttttttatttgcttgattttcttctttagattattattccattctaagaatacttcgaacatccagattattactccaggaacaatcttaattaatggaaatgaatataattacgttcctaattttaaaacactctatcatgtttacgaagataatattataaaagatgcccgccgtaaagactcgaataaaaataacatagtcaccgatacggagggtctcatatgggactggttgatagatcgtggaaatggaaccgttcaaaatagtgtcttgtccaatcatattaaggagagtaataacaagaaggttaagctcgtaaatggagttagtgatcataaaatacagcagctagttgaatctataaaaatcaccgaattgcagctgcaagaaatgaaagaattattggcccaaacggataacacgtcggctactaaccaattactttga

SEQ ID NO: 79670 - DNA, 576 bp, Saccharomyces pastorianus
atggaatttgacggcatacacccaagagatactctaacgttagaagaatttagttctcgtctcacgaacatattccggaacacgaattcccaaatattccagcaaaataataataacctcacgtctattttgcttcctaaagattccagtggacaggagtttcttctgtcacagacgcttgacgcggatgctttaacaagttttcactctaacacactagtttttaatcaattggtgaatgaactgacccaatgtatcgaaagcacagcaacatccatagtgttagagtctctaataaatgaatcattccatttcataatgaacaaggtcggcataaagacaatagccaagaaaaaacctggccaagaagatcagcaacagtatcaaatggcagttttcgctatgtcgatgaaagactgttgccaagaaatgcttcaaacaactgccgggtcttcccatagcggcagcgtgaacgaatacctggccactctggattctgtgcagccgctcgatgatctgagcgccagcgtatacagcaactttggcgtctccagctcgttttccttcaagccttaa

SEQ ID NO: 79671 - DNA, 1113 bp, Saccharomyces pastorianus
atgtttgacgaaggaagacctgaaagcatttttaatcaacaattggatgacacaaatactaatacatacatcaatgacaactcttcagattccttggactccgaggaagaaaatgacgacgacgaatatgagtatgtggaagagccggtcatcgaacttgatgaagacggcaatatcaaggagtacaccaaattagtgagaaagcctaaaaccatttccaaggagcagaaattagctttgttatttaggcctccattttcaatcatgtccaaactcgacttagacgctgcaaagcaaaaggcaagggcaaagcaaaaatggataatgattaacattcaggattcaggaatcttccaatgccaagccctcaacagggatttgtggtcgtccagaccggtaaaaactataatcaaagagaacttcgttttcctacagtatcaatatgaatcacgtaatgcccaaccctatcttcagttctatcacttgaataataaggatgatttgccccatatcgcgatactggatccaattaccggtgaacgtgtcaagcaatggaatagggttgttcccattccggagcaattcatctcagaaatcaacgagtttttggcctcattttcgctagatccaaaggtccctaatcccacggttaatgaacctcttcctaaagtggatccaacaactttgaccgaagagcaacaaatggaattagccattaaagagtcattaaataataactcgagcaaatcaaaccaagaagaagtgccgagtactggcgaagaacagaaacgagtacaagaaccggatccattcagtaccattgaagccagggtgcatccagaaccgccaaataaaccagggatcactacaagaattcaaattcgtaccggtgatggctccagactagttcgtagattcaatgctctggaagacactgtgcgtactatttacgaggttatcaagacagaaatggatggttttgccgattcaagattcacactaaatgatcaccaaagagaggacttgattgataaattaaacatgaccatagcggacgccggcttaaaaaatagttctttactacttgagaagcttgaccctgaaatagaataa

SEQ ID NO: 79672 - DNA, 1074 bp, Saccharomyces pastorianus
atgaactgtggaatattcacagaaggaacggacatgccaaatattgattgtatactactgtgtaggcccacaaaatcgcgttcacttttgattcaaatgattggaagaggtttacggttacaccattcgaaagaccactgtcatatcatcgacttcattggagcttctagtgttggagtggtttcagcgcccactctactgggtataaggagtgatgatatcgaatttgatgatgctacagttgaagatttaaaagcaatccaaggagagataatagctaaacaacaaaaaatcgacgaaaggttaagggctttatttcagactgatgaagcagcaatggaaaatgtaactgaaagaaatagcgttgccgattggattcacagtgcaaattcggttgatttaaccttgtgctcctttgatagtttgaggaatttaacacagagcaataactcatatccatctggcaaggagtttgatgaagcttctgaagctgtaaaagaaatggagctgttgatgaactcacaatatccgtgggtgaaatttgcctcaaatgcgtggggcctccctttaaaaggtaagaatcatttgagaatatacaaagaaaaatccgaagacaaattgtcgatggtatatcatctaaaaatgtatcgacaattaccgtgttttataacaaataaatacgcggactatgttccaaaaagtataataaaagacgctaatctttggaatgtaatgtcaaaggtggaaaaaatcataaatactctaaattcggacttggaaggacaaacaatgcaataccaggcaatatctagtaaatactcgaaatggagacaaacagttcctacgtcaaaacaaagagactttgttttcagaaagctaaagaaagtatatggtgagtcctcaaaagattttattagattatctttggatgatgttactacttatgtcaatactaagatgacgaaaggagatgcttccaacttaatctttgccagcagtttggcacctgtctacccgttgaaatcattgttacgaatattagaatatcaaaaaagaagatcttttataaagtga

SEQ ID NO: 79673 - DNA, 786 bp, Saccharomyces pastorianus
atgacctcaacactagccactagactctcgacatattctatttcattaatactgcagcgcatcaaaattataaaacgttgttactcagctcccgtactcagagattaccaacaagatgctatagatgcatgtgtgatttctattcgacagggcaccaagagaattggtgtatcattagccactggtggtggtaagacagtgatattctcaaatcttatcaatcaattgcgccaaaactattttaaagaatgtcaaggaaattttaaatcgttgatcctggttcacaggagggagctggccttacaagcgacggccactcttaaaaaaatattccccgacttaaaggttcacatagaaatgggaaaatatgattgcgatattgaagattctgacgtgattgttgcatctgttcagacgttgattagaagactccataaatatgatactaattcagtgaatctcatcatcattgatgaagcacatcattctgtggctaattcttatagaagtatcttagatcatttcaaagcttcaactgcagaaaccaaaatccctgttattggctttagtgcgactttcgaaagagcagataaaagagctttgtcaatggtaatggataaaattgtgtaccaccggggaatactggaaatgatcgatgacaagtggctatgtgaggcaaaattcacgtcagtcaaaattgaagcagacttatcagatgtaaaaagcactgcagatgacttccagctggcaccgttatcgtctctaatgaatacgaagagaaattaa

SEQ ID NO: 79674 - DNA, 1152 bp, Saccharomyces pastorianus
atgatggacttctacttaagtgttattgttcaccctgatcatgaagcccttataaatttgatttcttctaaatttccgtatcatgtgcctggactgctacaagttgctttgatatttattaggcaaggtgatagatcaaacactaatggattgttacaaagagcactctttgtctttgatagagctttgaaagcaaatattattttcgattccttgaattgtcaactaccttatatatacttcttcaacagacagttttacttggcaatatttagatacatccaatctcttgctcaaagaggtgttataggaactgctattgaatggacaaaagttctctggtcactgagcccattggaagatcctttaggatgcaggtatttcctcgatcactattttctattgaataatgactatcagtacattatagaattatccaactctccattaatgaactgttataaacagtggaatactttaggattttccttggcggtagtactaagcttcctaagaataaatgagatgagttccgcccgcaatgcgcttctaaaagcctttaagcatcatcctttacaactgtcagaacttttcaaggagaaactcttgggcgatcatgcgctaactaaagatttatccattgatggccattcggcagaaaacttggaattaaaggcatatatggcccgcttcccgttactttggaatagaaacgaagaggtaacatttttgcatgatgaaatgtcgagtattttacaggattaccatagaggaaacgttacaatcgattcaaatgatgggcaagatcacaataacattaacaacttgcaatcacctttctttattgcgggaatcccaattaacttattaagattcgccatactatctgaggagtcttctgtaatggctgcaattccatcatttatctggtctgataatgaagtatatgagtttgacgtattaccaccaatgcctacgtcaaaagaatcaatcgaagtggttgaaaacatcaaaacctttattaatgaaaaggatttagctgtccttcaggcagaaagaatgcaagatgaggacctgttgaatcaaattagacaaatatctttgcaacagtacattcatgaaaatgaagagtcaaatgaaaatgagggttaa

SEQ ID NO: 79675 - DNA, 945 bp, Saccharomyces pastorianus
atgagctctagagcattaaggagattacaagatgataatgctctgctagagtcgctgctatcgaattcaaatgcgaataaaatgacgagtggtaaaagtactgccggtaatattcagaaacgggagaacatcttctctatgatgaataacgtacgtgattcagataatagcactgatgaaggacaaatgtctgagcaggatgaagaagctgctgctgctggggagcgtgatactcaaagtaatggtcaacctaaaagaattacactagcatccaagtcttctagaaggaaaaagaataaaaaggcaaaaaggaagcaaaaaaaccataccgccgaggctgcaaaagacaagggttccgatgatgatgatgatgatgaagaattcgacaagattatccaacagttcaaaaaaactgatatattgaagtacggtaagactaaaaatgatgacactaatgaggaaggtttcttcacggcatctgaaccagaggaagcatctagccaaccttggaagtcatttttaagcttagaaagtgatccgggcttcacaaagttccccatttcatgtttgaggcattcttgcaaattttttcaaaatgatttcaagaaattggacccccatacggaattcaaacttttatttgacgatatatctccagagtctcttgaagatattgattcgatgacatccacacctgtctcccctcagcagctgaaacagattcagagactgaaaagattaattagaaactggggcggaaaagatcatagattggcacctaatggccccggaatgcacccgcaacatttgaagtttaccaagatcagagatgattggatcccaactcaaagaggtgagctctctatgaaacttttaagttctgatgatcttttagattggcaattatgggaaaggccgttagattggaaggatgttatccaaaac

SEQ ID NO: 79676 - DNA, 498 bp, Saccharomyces pastorianus
atgaaatgctgcttaacctcagtccttaatcaaaacaacacggtggatgaatatttcacatttgaagtgatgaaaaatctgttgctaaatgtgctgtgtaatagtgcgtttaaggattctttccatgaggcactatatgttttcactgtgatttttttgactctgtgcaaagaatatccctctgctagagcgttcctttttgagatatctaatggttataatattgatgagttatacagaaatttaaggagcgtggacgaatacaaaacacaaagggcactcatgattgattttatagattgggttaaatccaccagtgggaaagaagatggtaatgtggaccatgcaggcgatgagagaaaaagacaagagaaaagggaaactatcctcaagaaggcaaatgagagattaattaagaagaataaagaaaacggagacatgctggatgatccgaacattgaagacggtgctgtgggtaatctctttgatgacaactga

SEQ ID NO: 79677 - DNA, 1320 bp, Saccharomyces pastorianus
atggactatccagaaattaatttggaagagagaggcgctgaatcagacgcagttagagatttgagatatgcttgtggtatcgagttgaataggatggctttattaatgcctgaatctctgaaaaaaatatacccagaccttgaaagtgtcattgccagaatcatgcccaacttatcttaccatgaaaaaatttccttcaaatccttcttattgatcattgtattgaagtcttcattagatatgaaagaggaaagatttgcggctattgtggatccagaacttttagcctggtctgataaaacaacagttgttggtctttctgatttgcattggtttatggaacgcttaggtattgttcagatcgcagaatatttccagaggcgtgatatcgacgaaaatagtgaccttttatcaattccaattgatgatgagggtaaagagctgaagtcggaattgaccaaacgttggcaaagcttgtttcctgttcgtgcaacaagaatgttcattcattattcaatgcaaagtataaagacagatgaagaattcaaaatgttacaagatctgtggagacctaggattgtcccaatattaccttacatcacgagactactgtaccaattgcaatcctaccacgatccagataattggaaaggattacctacggttgtgcaatccttcgtcaagtattccactattgaaagattttgggaggccggagcttcaaataaatcaaaggatgagtttattgatgaacatatgaaagcgatgcaaaccttacgagacttcgccgactccgtaggacacatcattaggtatacaagggaatacactctacttgttttaagtgccatatcatcacttggtagtgttttttaccttttggacgaatcgcccgacttactactgaactctattgccatatttaagccaggtagcaatgagataagccctggcgtttcaacacatggatggaaacacataatgaatatagccattcgtcctatattaaaaggttgtccaaaagattgtctggggaaattcatgcccgcatttttgcctaaattatttgaaatcctggacctgctgctatgtcagaaatggtcctcgcatatgaatgatatggacatgaacccagttccaactgacgatgatcaaatgactgaagaaattttggaagagaatttgttgagacaactaaccacagttgttgttagaatagtaattgattgtgttggtcaaggcaatgccaatccaaacagtgctaaaagcaggctaaataaccatcaaatggagatgagaaaaattatattaatgatttaa

SEQ ID NO: 79678 - DNA, 432 bp, Saccharomyces pastorianus
atgaggaactccgagaataaaaatgccattaaaatggctgtagaactcgcacgtaaggaatttgagaggttcccaggcgatactggctccagtgaagtccaagcagcttgcatgactgttcgtatccagaatatggcaaaccatattaaagagcatcgtaaggattttgctaacaccagaaatttgaggatattagtccagcaaaggcaggcaatattaagatatttgaaaagagataatcctgaaaaatactactggactattcaaaaactaggattgaatgatgcggccataacggatgaattcaatatggacaggcgttacatgcaagattatgaattttttggtgataaaatattgataagagattctaagaaagtggcaaatcaaaagcgtaaggagataagaaaacaaaaaagggctacattttag

SEQ ID NO: 79679 - DNA, 387 bp, Saccharomyces pastorianus
atgtcgattgttggaaggaatgctattctgaatctaagaatttcactatgtcctctgtttatgggcaaaagatcgtttgtatcctctccggttagcaatagtgcaaaagctgtgaaattcttaaaggctcaaagacgaaaacagaaaaatgaagccaaacaagccactttgaaagcgtcaaccgataaggttgatccagttctgggccgggcggacactccctttataacacgtattatggcagagttaaaagagcctttagttctatcgaaaggttataatattgaagaggtagacaagttccttgcagccattgagtctgctaagcgtgaaagagctgagttgtcaggtttaaatacagaagttgtgggtattgaagacatataa

SEQ ID NO: 79680 - DNA, 825 bp, Saccharomyces pastorianus
atgtttttcttactattgttttatgcattgtatattgatggaagaaaatgctggggtggattctcaaggaaggctttcacccattggaatgatttagggcatttagccttctcaggtattattatgttggaggcggaagagctgtcatatgaactattgacgttatttagtgcatattacggtgtcagttatctagcagctcagtcggcagtatctactatggctgcattgctctatatgatcccatttgcaataggtatatctacctctacgagaattgcgaacttcattggtgcaaaaagaaccgatttcgcgcacatctcttctcaagttgggttgtcattttcgtttattgcggggttcatcaattgctgcatactagtatttggacgtaatctaatcgccaacatttactcaaaagatcccgaagtcatcaaattaattgcgcaagtattgcccttggtgggtattgtgcaaaatttcgactcgcttaatgccgttgctgggtcttgcctcaggggtcaaggcatgcaatctctaggaagtatagtaaatttaatggcttactatctatttggaattcccctggctctcatcctaagttggttctttgacatgaaattgtatggtctttggattggtattggaagtgccatgcttttaattgggctagttgaggcttattacgtattatttcccgattgggacaaaattatgacctatgctgagattttgaaagaaaccgaagatgatgaagtagatagcgatgagtatttaacagactcagacgatcctgatgaaaacacagccctcttaggggcttaa

SEQ ID NO: 79681 - DNA, 732 bp, Saccharomyces pastorianus
atggctggaattttgtcaaagactctttcagaagtgcatccttccctccgaacaaatggtatgggtatcggtaacactcacaggaggatatcgctaggcttcctacctcccaacaagaagaatcctctggtacgaaaatttcgtgcaagaacgagaaatattgatcagaggagtttcagatctttaacagatgattttggaagtaacgtccatgaaccaaatccgtacttaggtaatattgatgaggaacctgacctttactatcatgatgaagaagatggcgaactgagcagaacgatttctctaccatcaagggtatcagaaactcctgagctttcgccacaagatgttgattggattctacatgaacatgaacgacgatactcatcggtatgcaactctgataatgaggaagcaagtcaaagcaacacaccagatagaatacaagaatattctggaagagaactagaatatgacgaatttatgaatagactccaagctcagaaacagaaattaactcgaagtgcggtaacagacgctaaaggcacctcacatcacagaagaccatcattcgtatctgtgactagccgaggctcagttcccacaatttaccaagagatcgacgagaacgattctgaggcactagcagaattggctcacagccacgtcaccttcaaatcagaagcaagagttttgggacctgcaggcatgcaagctggcactgccgtcgtt

SEQ ID NO: 79682 - DNA, 195 bp, Saccharomyces pastorianus
atggtgaaaatctatattttcttgattaggaataaaatcatggaaagaagtgttggaataaaaattcgctatcgtctgtcaactaatagttatagtatcaatatattatcatatacggtgttagatgatgacataagttatgagaagctgtcatcgaagttaggggaagctgaagtgcaaggattgataatgtaa

SEQ ID NO: 79683 - DNA, 1638 bp, Saccharomyces pastorianus
atggagagaggcgatttggtgattcctatcccaagatgtgagaatcaagaggtgccgatccaaaggatttgtcagtccaatgggcgtgagaaatttccatgtggagatttcttggagaaagttgaagcgaatggcccgttcatccagtttttcttcaaccctcaattgtttagcaaaacttgtcatcccagatatcttaaccagaaaggaggatatggttcttgcaaattggttgaaaacaagaaagttattattgaattctcctctcccaacattgccaagccatttcatgctggtcatttaagatccactattattggtggctttttggccaacctttatgaaaaattaggttgggaggttatcagaatgaactacctgggtgactggggtaaacaatttggtcttttagctgttggttttgaaagatacggtaatgaagaggctttagttaaagatccaattcaccacctgttcgatgtttacgttcgtatcaacaaggatattgaggaagaaggtgacagtattccattagaacaatccaccaatggaaaagctcgtgaatatttcaagagaatggaagatggtgacgaggaagctttaaaaatttggaagagattccgtgaattttctattgaaaaatatattgacacatatgcacgtttgaacatcaaatatgatgtttactctggtgaatctcaagtttctaaagaatccatgctcaaagctatcgacctgttcaaggaaaagggcttaacacatgaggataggggtgcagttttgatcgatttgacaaaatttaacaaaaagttaggaaaggctattgttcagaaatcggacggtactacgttatatctaactagagacgttggtgcagctatgggccgttatgaaaagtatcattttgacaagatgatttacgttatcgcttctcaacaagatttgcacgctgcccaattcttcgaaattttgaagcagatgggctttgagtgggctaaagatctacagcttgtcaactttggtatggtccaaggtatgtcaacaagaaaaggtactgttgtcttcttagataatatcttggaggaaactaaggaaaaaatgcacgaagttatgaaaaagaatgagaacaaatacgcgcaaattgagcatccagaagaagttgccgatttagttggtatctctgccgtcatgattcaagatatgcaaggtaagcgtatcaacaactacgagtttaaatgggaaagaatgctttcattcgaaggtgacactggtccataccttcaatatgctcactcaaggttaagatcagttgaaagaaatgcttctggtatcacccaagacaaatggataaatgccgatttttcgttattaaaagaacctgccgcaaaactgttgattagactgctaggccaataccccgatgttttgagaaatgcaatcaaaacccacgagccaacaaccgtggtcacatatttattcaaattgactcaccaggtttcttcttgttatgacgtcttatgggttgctggtcaaactgaagaattagcaactgcccgtctggctctatatggtgctgcaagacaagttttatacaacggtatgcgcttgttaggtttaactcccgtagaaagaatgtaa

SEQ ID NO: 79684 - DNA, 624 bp, Saccharomyces pastorianus
atggaacttcatgtttttccattccgaaaagtatccgcggtgttgatggagttcactacaccaaaatcatatgccaacactaaaatttctgctggtattattaccgatgataaagaagttttagcgatgacaactaacaatcttgttgagcacttaaactcagaaattgattctgttggttggaaagttccaaaagatattaagatcaccttcaaaggtatcaataccaaagtcaaggatgaacaattggaatccgagaatgggactgaacaagctttacaaggagaggatgaaaaggaagatgaaaaggaagatgaaaaggaagatgaagaggaagaagaatacaagaacgtcgcagaagaaaataagatctgtgctgttgtggagggtccgttgaacaacctagttgaaagaattgatgtgatgggcgaaattccaagttttgttaaaaacatcgtctctggtgttgctggtactaagccatttatataccaatatgctgatccaaaaagctcaactttacaaataaatggcggggagaaaattcacggtgtagcttggaccgaagtaacattcatttctgaatcagatgtgattagtgaggaatcttacaatgaagcatga

SEQ ID NO: 79685 - DNA, 339 bp, Saccharomyces pastorianus
atgagacacgttttctggccaaggaatgcttgtcacggtactatcaaagttaagaaagaagttattccagaatctgatgaagaagaatcctcagctgatgaggatgataatgaagacgaagatgaagagtctggtgattctgaggaggaatctggtagtgaagaagaaagcgacagtgaagaagtcgaaatcacctatgaagatcgtacgattacttttaaagaggaagaccctgcgatttcgacattaataatggccttccaaggcatgaagcctcatcacgcagctaaggcatggaacttcatgtttttccattccgaaaagtatccgcggtgttga

SEQ ID NO: 79686 - DNA, 687 bp, Saccharomyces pastorianus
atgtcttcccttcagggatgtatcaggactccgccagaggaatgccccaggctaggtccagaggcgctacttcagacccctgatttcaataggacaataagcaatgagccattgaccactggcaacgaacgtttgcaagcagctctaatttcttcatttgggtctttgatggagttcagaacattattaataaattcaaatcttgctatatcaggcgacgggtttacgtggttagtcgcaagacggcagctcgacaaacgtgccatgcgcaacgaaatgccaaacagggatattgaatatgataagctgtttatattgaatacgtacaatgcgggaactcccttcaacttctctacatctggagtaatgaatgagctcaataaccaatataccaacatggaaaaacaacgagccaaagaagccggtaatcttgaagattctgagatgactgccaagcaagccaagacaaaatttatttatgaaacccaacagaaaggtttttctgggaaagaggtttcatatatcccgcttttagccattgatgcgtcaccaaaaacatggttaaccgattatggcgtatttgggaaacgagaatatttagaaagggtatgggactctatagaatggaaaattgtagagtcaaggttacctcaacgtactaagatccaagcattcaacacgttatga

SEQ ID NO: 79687 - DNA, 156 bp, Saccharomyces pastorianus
atgcttcgctttactggtgctcgcgctattagaaagtactctactaggtatgcactcgagcacctgaaagaaggtgctcctctgaaagggctgttttctactgaaggattacagaaagcatggttcgaccgagtgaaatatctcgatgcaaattga

SEQ ID NO: 79688 - DNA, 492 bp, Saccharomyces pastorianus
atggatgccaaaaataagacagaattggttcatgggccagttactgcgggattaggttctagtacatttttagatggggcgccggcctcctcagctgccattagaaacgacataaaagcccattcctatcataatcgtaacggtggtttacaaagaaataagtcactttctcaacgattaggtctcggaggatccggtgatagcaatgcccccatgacaggcgttagaagaaacttgagtttaagtagagacaactatgatgttggtcacagcaatgaaggtgttagaaggtcgaaaaccgttaattctcctaacagaacgcataagtccaattatactactgatttcgacggccaagatgatcacaatgaagatgaggaagatgtttatttgggtgtgcgctacaatgagcccaatatgaaaaagaaatcgacgggcagcaaattactgagcagagtaaaaagtctaaaggtcggcaggaaaagtcagtaa

SEQ ID NO: 79689 - DNA, 549 bp, Saccharomyces pastorianus
atggagaatagaaacagtagtacctctagtaggccattttctgttaataacccgtttagaaatgccacagttgattcaagtattaatcagtataaaaatgactcccagtttcaggagtgggcgaaaaaccaatctcgtaccaattcatttgatatgccacaattgaacacaagaacttcttcacaattatcattcccaaacattccagaggatgaaccccagcgaaacgcagatcagcagggtgctttttattctggtttggagagctttagtagtggtagtttatcaccaccttcgagacctctttcctcaaagaatcctttcctagacgatgtgagttctgcaaccgattttagaaggtctcccccacctgtttcaaggaataaaaatcatccgactgctaaagaagaaaaagaacaactaaggcaaagatatttggaagaaagtgacgtaagtacagtaggtaacacaagagaaaacactgacctaccaccctcatacgaagagatcacttcaaccaatggatcaaggcgtgcatatccaaagtaa

SEQ ID NO: 79690 - DNA, 1824 bp, Saccharomyces pastorianus
atgagtaccgcaactatccaagaaccaaaactcatgccgatcacaaatacgccgtatgtgcattccaatagtacttctgcaatattaccatataaaacaacccaacttactccttctcaacgttaccgtttaaggaaagagcaaaatgaccaatctttgcgtaaagccataaaaatgaaagaaaaattttatgaagatcaagacgttaacttggaacttcaagagggcgatgtcgacggctcgttaatttggaacattccaatggcatctttatcgaccagttcttttttaacattatctaagtttaatagaaaagaaatgagtttagattcagcgcggggggatgaagagatattaatacaggagaacaattgcgaaggcaaacaacactcatcttcggctctctgtgtggacaaaactttccatcaggttcatagtactagaaaacatacatcaaattcaagtaacactttaaaagaatcatgtctggactataaggagcttccgccaacatgcattcctggtatatctcctgtgtctgattcacagtacatccaggatacaatgaaaaatctctcccaaatatacctgcatagttccgaaaaaatctccaaaagtattctttctggtcgttcaagatctgtacagagtttaccactggaatttaaagaagccagtagtcagggaatggaagacctaatgctagtttcagaggacaaactaaaggccgtaagtcatttccgtccgagttggctcccgcccaaggatttcaaagagaggaaattgcaagataaacaaatctacaaaaatatcgacttagcatcaatggaagagttgcaaaaaaataaagaacgtgacgaaaaagccaaaaagaatgagcagaataaggtcaaattccagcatttactggaccgaggcattactcgtaactcgtcattaagtgaattaaagaaaattatttgggaaacacctttgatatctaaagtacggcttcaaatatatagtcaacttctacaaagtgacaattgcttgataacaaaatgttttattgaatcatttgaggaagtaatgcagctactcaacaaaatggattttcccaaagataaagaatttgaaataagacagcttattgaacacgatgtacaggaaaaggttttttataaaaatggaacagataagcaagtggtttctgacttgatgctattactgcaactgaaatctatatctcaacaaggtttggttactggtgatgagatgctattctaccattttttaactgatcaatcttttgggactttgaaggaaacatgggaaatggtcaacttgatacagatgacgtgcttcagtgaaatttgcaaggaaaaatacgattcaagaatattaaatcccagaggaattgttgcccatcttttacgaaaagatgagttcaaaaatgaattcaatggcggatgtttgaatagcaatacatggtggaacatattgcaaagaatggaccataaactttttatgtgggtaatggatgtaattatcgttcataatggccaaaactttgcaaactaccccgtaaaaatggaaatattcaaagacaaagtatgggaatactatagatctaagaaggttattgtaaattataagattttggtttcactaacagttaacgtattgttaaactaccacttcggatatgataatctgaaacatttatcagatttggatgataagcatttttgtattccactgtatacggaggatagtatcgaagaggaaaacctcaataatattttcacaaagtggtggttgcactactaccgaaaattacgttag

SEQ ID NO: 79691 - DNA, 732 bp, Saccharomyces pastorianus
atgacagcacgtcgtttgattaatatagttcctaatacgtctaagctagaccctttaaaggaggaggactcaacgcatctgaaacaaaatcaacctaagaagttttccacaaaggagttgatgctttcagaatataccgaacgcaaaagttgcagccttccgttgtctaaatcccgatcaggcagtagtgcatccagtagcactacaggttcgaacggaaagaatattggaacaagacgccctagctccaacctagatttcaatttcgctagccaagatgttgttaaaaatgtattaggtaataataatccacacgtacccacagcgaagtgcattaggccaatatcagatgattctataggtacatcgagcacagagatattttcttcatcgcactcaaatacgacatctgattctttatgtacatcagatataagctcagaagagggtgaaatagcaaacagtaagatggaggataactgcttcttcaaaagtatgagagaagctgaccatagaagcaatattacgcccttaaagaaaagccgaccgggatcaagactacagaaaacacgtacagcaagtagcgctgataaaacaatctgctcaatgagtaccataactacatgcattccatctcgtcaaaattcggtgtcaactcctaaactctccaggacagtagggctgcctggatcgagcaatacaaccaacagtatagccgcatcacaaacttca

SEQ ID NO: 79692 - DNA, 576 bp, Saccharomyces pastorianus
atgatacaaggtggtagcagtgcagaaagccctagaagcagtagaagaaggtccgccattacagcagccttggctatagctcatactataagtacagctagcgcatatccgctaaatgtaggctccacccaatcacaagtggggcctcccggagatggtaaaaacagccagctgggtacaattttatcttggattggcgcttccttctacgtaggcgcacgtatcccacaactaatcaagaattacaatagaaagtctacagacggcttatctcccttcctatttgctactacactactctgcaatatcacgtataatttgagcatcttcacaagctgtagatttttagataatcagaacaagagggaattcatcgtgaatgagttgccctttatatttggaagtgctggaacaattgcgtttgatttgatatacttctaccaatactatatcctttatgcaactgatatgcaactacgtgaactggaaagagaactatacagtcctgaagaagacagtgcagcgcaactagtgacagaacgtacatcactgttgtctggtgaaacgcaaacatag

SEQ ID NO: 79693 - DNA, 273 bp, Saccharomyces pastorianus
atgtcgtgctcaaacggcatctggcctactgtatctaatttgtgcggatcattatccttcttcacctctgttatttcattgtttccacaaataattgagacttatcgagataaatctgtcgatgggctatcgccatattttttgctggcttggttatgtggggatattacctcgctgataggggcaaagctaacagggcaattgttattccagatacttttagcaatttattttctattgaatgatcttttgtatgtggtcgggatcctctag

SEQ ID NO: 79694 - DNA, 1203 bp, Saccharomyces pastorianus
atgaaagaaaactatgagaagcagttagaatcgctaaggaaagatattgaagagtacaaagaaagcgcaaaagattctgaagacaaaattgaggaactaaaaattaggattgctgaaaattctgctaaagtgtcggagaaaagattaaaggatataaaacaaaaagatgaacagatcagcgacctcactcagaatctaaaactacaagaagatgagataagctcattaaaatccataattgacaggtacaaaaaagatttcaatcaattgaaatctgaacagagtaatatccaacatgacctaaatttacaaatactaaatctggaaaataagttaatagagagcgaggatgaattaaagtcactaagagattctcaaaaaattgaaatagaaaactggaagagaaagtataacaatctttcactggaaaatgacagattgttgacagaaaaagaatccgcatcagacaaagagcgcgagatatccatcttgaacagaaaacttgatgaaatggataaagaaaaatggaacttacaggaatctaaagaaaaatataaacgcgaactacagaaggtgattactgctaatgatcgtttgagaagagagaaagaggagttgaatgaaaacagcaataatattcgtatcatggaagacaagatgactaggataaaaaaaaattatttgagtgaaatcacttctttacaagaggaaaataggagacttgaagaacgcctcatattaaatgagaggcgtaaagacaatgattcaactatgcaattaaatgacatcataagctattataagttgaagtatcactcagaagtaagacacaacaacgatcttaaggtgatcaatgattatttaaacaaggttcttgctttggggacccgtcgtttaagattggacacaaggaaaggtgagcacagtctaaacatttcacttccagacgatgatgaactagatcgtgattactacaatagccatgtttatacaaggtatcatgactatgaatacccgcttagattcaatttaaacagaagaggtccctatttcgaacgccgcttaagcttcaaaacagttgcccttttagtgcttgcttgtgtgaggatgaaaaggattgctttttacaggagatcagacgataacagattgcgaatactaagagatagaattgagagtagcagcgggcgtatatcttggtag

SEQ ID NO: 79695 - DNA, 1551 bp, Saccharomyces pastorianus
  modified_base (492)..(563): a, c, g, t, unknown, or other
atggacgaagcgtcacatctcccaaatgggagcttgaagaacatggaatttacgcctgtaggatttatcaaatccaagcgaaactccacgcaaacacaagttgtatcgcctactaaggttccaaatgccaataatggtgatgagaacgaaggccctgttaagaaaagacagagaagaagcattgatgatacaattgactccacaaggctatttagtgaagcttcacaattcgatgacagctttccagaaattaaggctaacattccgcctagtccaaggtcaggtaatgttgacaaaagtcgcaagagaaatttgattgatgatttgaagaaagatgtgccaatgtctcagcccttgaaagaacaagaagtaagagaacaccaaatgaagaaagagcgatttgaccgtgctttagagagtaaattactaggaaaaagacacataacatacgcaaattctgatatttctaataaggaactttacattaatgannnnnnnnnnnnnnnnnnnnnnnnnnnnnnnnnnnnnnnnnnnnnnnnnnnnnnnnnnnnnnnnnnnnnnnnacttgaagaagaaacggatgacttgaagaacagattacaagcgctggaaaaagagctggacgccaaaaataaaattgtgaattcaagaaaagtagatgatcattctggatgcatagaagaacgtgaacaaatggaaagaaaattggctgaattagaaagaaaactgaaaactgtgaaagaccaagtgctagaattagagaataatagtgacgtacaaagtttaaaattgagatctaaggaggatgaattgaagaatttaatgaatgagttgaatgaattgaagagcaatgcagaagaaaaggatacacagttggaattcaagaaaaatgaactgaggaaacgaacaaatgaattaaatgagttgaaaatcaagtctgatgagatggatttacaactaaaacaaaaacaaaatgaatcaaaaagattaaaagatgaattaaatgagcttgaaaccaaattcagcgaaaatggttctcagtcttctgcaaaagaaaatgaattgaaaatgctgaaaaataaaatagccgagctagaggaagagattagcacgaaaaattcacagttaatcgcaaaagaaggtaagttagcatcattaatggctcagctaactcaattggagagtaaacttaatcaaagagactcccagttgggctcaagggaagaagaattgaaaaaaacaaacgataagctacaaaaagatatcaggatagcaagagaagaaacagtttcaaaggatgaacggataactgatcttcaaaaaaaggttaaacagctagaaaatgacttatttgtgataaaaaaaacgcacagtgagtctaaaactattactgataatgaactagaatctaaagataaacttattaaaattttagaaaacgatttaaaggttgcacaagagaagtactctaaaatggaaaagagctcaaagaaagggaatttacctataaaatttccgaatcaaagttggaagatgaaaagaccacgctaa

SEQ ID NO: 79696 - DNA, 144 bp, Saccharomyces pastorianus
gcctgcaggtctgttagtaaagctaaaatagatgcgcacggcattaatataacatgtacaaaatggaatgaaacgagcgctggaggcaaatgttatgcattttctaatagtgctggattattaacactcgaatacctgtcatga

SEQ ID NO: 79697 - DNA, 621 bp, Saccharomyces pastorianus
atgccgctataccttgcagttgagattgtcttaggtatttccattctaaacaaatgtagtggtgcttatggtattttagcattgttcacgggtcatccgttggattttatgcaatggatagcatatctttggtcggtatttacattaatcgtattctcacaagggctgtatctgattcataagccaaacttgctggtattttcgcaaatctgcgtactttatacaatcgataccatttccacttgtttttttactctatggtttaccacgcaatggttcaccttggaagacactgctaatattgatggaaataatgcactacaaagtaacccaatatcgacaggtaagctgacagaacgtggtattgatataagtaaacaaagtgcaactgaaagctacgaatattccatgactattttaattacgttggtgtcattgatattcaggttctactttaacttcattttggcatcttttgttcaagaattgttacaccaccccaaatatttagttgatagggatgacgtagaacaaaacttgaaaaacaagcctatttggaaaagactgtgggctaagagccaaaaaggttgttataagctatgtaagaatttgttagagtaa

SEQ ID NO: 79698 - DNA, 1566 bp, Saccharomyces pastorianus
atgtctactattttgaaaacatctcgtgcacctgaagttgaagctagtccagtagtctcgaagaagcgaaaattaaatagacgtagagtactaccactcgatagtcttgatttttttgctggaggtttgagtactaagactctatcagaaaataggtctttaactgacgctaagagacttaattgtggcgcagaatcaaagactgtcatttcaagtcccaacattgcagaggcagatgaaaagcacgccccatttcttcaaaacgcactaaagccgactgaagatattggaaagaaaagtggtcacagtagccctggtgctataattgtcagtagccccaacttaggtactgtgaacacgagtgagtattcgttggataagtcgctacagtcacataagttaccacagccgtcattgccggaggtagcagggattggctctcaaaccatatcttcgaactccgctgactatgaaacagctgctgtgaattcgatggatgatgctgaagttactaagaattttagggtgaatcatcaccagaatatagagcaaccctctaaaaacatccgtaaactttctaattattcacgagaaatttcatctccattacaagaaaattgtaagtcacctgtaaaagagttatctattaaagagaaatctggtacgccgcacgcatttgttgaagctattcaagaaactaaaaatagagaggtcaaaagagttaagtcaaccattgttgaattgaaggatgaggagttgagcgaggaagctattaatcagctaaaaaatttggctattgtagaacctagtaacaatttactgaggaaatcatttgatagtgagggaaacaaaacaagcagaacaactgaaaaatgggaaaatagcctaatggagccagaatggcataaacgcaagaatttcaagacttttgtcaaggtacgtccaaaatcaaaggcgcacaaagaagagggtaaaaataacactcaaagctcagattttatacgaaatgcagcctttttaatcactagaaattatgttccgttaaaaaaatactccaaaaaggatacaactacaaaatggggcacagaagaaaacgaagatatgtttgctttgacggagatggaaagatttggatcgaatacatttatgtccgataatataaactcaaacactatccagaaaagatctcaagctctaaacagattcacgaatgaggatagttcaaatgaaggagaagaagattcgttttctttttctcgttgttcaggtactgcagccagcgttcaaccactaaaaaacaaaatttttattactgatgaagatgatctgggtgatattgatgataaaagcgatagactaaatcacagagaaaataatcgtaatctttttgtggtgaaggaaatgaacttacggccaaacttgtcagaagaatgttccaagcaaagtagacacagtagaagcgcaactagtagatcacgtggctcttttggggcttctaataacggtgatggcgacgacgacgatgacgacggtccgaagtttacgttcaaaagaagaaaaggataa

SEQ ID NO: 79699 - DNA, 906 bp, Saccharomyces pastorianus
atgtgggtagtacgataccagaatacattggaagatggctctattagctttatatcatgttgtcttcaggccttcaaaacttatagtataggtagatcaagtaaaaacccactgataattaaaaatgataaaagtatttccagacagcatatcacattcaaatgggaaatcaataatagttcggatctgaaacacagtagcctgtgtttagttaacaagggtaaattgacatcattaaataaaaaattcatcaaagttggcgaaacatttactattaatgcctcggacgttttaaagtccacaataattgaactgggtacaactcctattcgtatagagttcgaatggataaatgaagtctggaacattcctcctcatttgacacaattcaggacgatgctttctgaatatggtatctccactgagatttctattaatgatattcccgctaatctgatgattagcgattacccaaagagcgaggacaacagcatacgggaattgtatgcccttgttagtactatacccatgaaaaaatcacggtttctggtggaattgtgtaatactcttcttcccacatctaaaactaatttaaaatttgatgaaatgtggaacgatatgattagtaatccggagtacaatgtttttgattttgatccaaatattttgctttcgaagtttatgaggctgaataatatcagagtgttaactactatcaaaagtgaaccacgtctatcatctctcctgcggacgttcaatataaatttatttgcatttgacaacattgatagtttatataaatatgttgacagcttggaagcatcaacagaatacctgattttgacaactacagatcagaacgaacatgggaaaacctatgtactatcacacgatgtgacatcataa

SEQ ID NO: 79700 - DNA, 1197 bp, Saccharomyces pastorianus
atgatccttggtacaggtttagctgtagctagatccggtataataaaagccagcagggtcctataccgacaaatgattgtcgacttagagattcagtcgaaggacaaatcatacgcctggtttctaacatggatggccagacatcctcaaagggtatctagacacttatccgttaggacaaactacatacaacatgacaatggatcagttagtacaaaattttcgctggttccgggtccgggaaatcattggattcgttataagggtgcttttatcctgattaaaagagaaaggtccgcaaaaatgatagatatcgcaaacgggtcaccatttgagaccgtaaccttaactacactgtaccgtgacaaacatttgttcgatgacattttgaacgaggctaaagacatagccctgaagactactgagggcaagactgttatttacacttctttcggccctgaatggagaaagtttggtcaaccaaaagctaaaaggatgctgccctccgtcattttggacagtggcgtcaaagagggtattctcgatgacgtttatgattttatgaagaacggcaaatggtactctgacaggggtatcccatatcgcaggggatatttactctatggccctcccggatctggtaagactagctttatccaggctttagcgggcgaattagactacaacatttgtattttaaacctctccgaaaataatttaacagatgacagattaaaccacttaatgaataacatgccagaaaggagcatactattactggaagatattgacgcggcgttcaacaaaagaagtcaaactggtgaacaaggttttcattctagcgtaacatttagcggtttactgaatgccctggatggcgtcacatcttctgaagaaactattacattcatgactaccaatcatcctgaaaagctagacgcggctataatgagaccaggtcgtattgactacaaagtcttcgttggtaacgcaactccataccaggtagaaaaaatgtttatgaaattttacccaggtgagactgatatatgcaaaaagtttgtaaatagtgttaaagaattggatatcaccgtaagtaccgcccagttgcaaggacttttcgttatgaataaagatgcaccacacgatgcgttgaaaatggtctccagcttacggaacgctaatcatattttctag

SEQ ID NO: 79701 - DNA, 321 bp, Saccharomyces pastorianus
atggctaacatcacattcaaaaacggtgaattggccagaagggctgttgaaagatttaacggctctccaatcgatggaggcagatcaagattgagacttaacctaatcgttgatccaaaccaacgcccagtcaaaagtttagccgacaggatcaaggctatgccacaaaaaggcggaaacgctccaagaccagtaaagaggggtccaaatagaaaagctgctatggcaaaatcccaaaacaaaccaaagagagaaaagcctgcaaagaaaagtctagaagatctggacaaggaaatggcggactatttcgaaaagaaataa

SEQ ID NO: 79702 - DNA, 294 bp, Saccharomyces pastorianus
atgtctgctagcttagataaatccttagacgaaatcattggctctaacaaagcaggaagtaatagagcccgtgtcggtggtactcgtggtaacggtccaagaagagttggtaagcaagttggtagccaacgtaggagccttccaaacagaagaggccctatcagaaaaaatactagggcacctccaaacgcagtcgctagagttgccaagctcttggacaccactagagaggtcaaggtcaacgtcgaaggtttgccaagggacattaagcaggatgctgtaagagtatgttaa

SEQ ID NO: 79703 - DNA, 144 bp, Saccharomyces pastorianus
atggttttcgaccattggtccactttaggttctgacccattggacccaacctctaaggctggtgaaattgttcttgctgctcgtaagagacacggtatgaaggaagaagttccaggctggcaagaatattacgacaaattgtaa

SEQ ID NO: 79704 - DNA, 1380 bp, Saccharomyces pastorianus
atgactccaaatttctccacaaaagaattctacggtgcttggtcgtctattgctgcacttaaaaaacattcgttggttcttgaggaaggtagaccaaaacggtattcgctaacagaggaaggtgtagaactaacaaagagcttaaagacggcagacggaatctcttttccaaaagaaaatgaagaacctaacgagtattccgtaaccaggaatgaaagtagtgaattcacagcaaatctgactgacctccgtggtgaatatggtaaggaagaagagccctgcgatataaataacacttcattcatgctggatataacttttcaagatttgagcacgccgcaaaggctgcagaacaatgtatttaaaaatgatagactgaatagccaaactaatatatcttctcataaattggaagaggtctctgatgatcaaacagtacctgattccgcattaaaggctaaaagcacaataaagaggagaaggtacaacggagtaagttacgaattgtggtgtagtggtgatttcgaagttttcccaattattgatcacagagaaataaagtcacaatctgatcgtgagtttttttcaagggcatttgaaagaaaaggtatgaagtcagagataaggcaactcgctttgggtgatattatatgggttgccaagaataaaaataccgggttgcagtgtgtgctcaacaccatagttgaaagaaaaaggctagacgatttagctttaagtataagggataacaggtttatggagcaaaaaaataggttagagaaatctggctgtgaacacaaatactatctcattgaggagactatgagtggcaacattggaaatatgaatgaggccctaaagaccgcgctttgggtcattttagtgtattacaaattctccatgataagaacttgcaattcggatgaaactgtggaaaagatacatgcgttgcatactgtaatttctcatcactattctcaaaaagatctcatagttatatttccaagtgaccttaaaagcaaggacgattataaaaaggtgcttctacagtttcgtcgagaattcgaacgaaaaggcggtattgaatgctgtcataatcttgaatgctttcaagaactaatgggaaaaggcgatctaaagacggttggtgagctaactatacatgttttaatgcttgttaaaggtatatctttagaaaaagcagtagccatccaagaaatatttcctaccctgaataaaatactaatggcatataaaacgtgctcctcggaagaagaggctaaattgttgatgtttaatgtactgggagatgcacctggtgcgaagaaaattactaaatctctttcagaaaagatatatgatgcttttggtaaactttag

SEQ ID NO: 79705 - DNA, 945 bp, Saccharomyces pastorianus
atgctatatcctactgcatctacatatcatgtgaatagtataattaagcagctgataattgaactcgataagttacgactatacgaagatgcaagtgaacctttactagtacagtcccaatcggttattcgatacatggatagttcaacctcaggaactcttagcccacctaacattaaaagactttcctcgaacacagaaagaactagcaacacaatgtcctcctcatcagcatatctatcggcgttgcgaggcccagctccaaacggtgccctggcatctaacaaaaagaaaagacacagaatggagccacgcacaataagagcgttaatagtaggttgcatgttaatgtttttccagcaaatcactggctttaatgcttttatgtactatgcggcaataatattttccaaatttaatataaaaaaccctctactgcctccaattttgattgcctcaacgaacttcatattcacttttttcgccatgtacaccatggactctttgggaagaagagccattcttttgagaacaattttgattatgactgttgggttacttctttgcagtgtaggtttcggtcataaccaagtcaatttacttttaatttctgttgtaatttatgttgcagcatatgcttctgcgatgggcagcgttccatggacttgtgtggaatttctccccttgaacaggagatcatttggggcatcatgtatagcctgcacaaattggttgaccaatgcatttgtttcaatgacatatctgagcactattaacaccattggtgatgaaaatacaatgctcatttttgcttttttcacagtttgtgcctggtttttcgtatatttttggtatccagaagtcaaaggtttgtcactggaagaggttggaaaggtttttgataatggaattgatgttcattatgtctttcgtacctaccattga

SEQ ID NO: 79706 - DNA, 702 bp, Saccharomyces pastorianus
atgtctacagatgaaagtgaagacgtttattctgatctgtattccattatctcccaggtaacatccaatactgccaatgacatcgagcaactcccatatgctttaacgttcaaaacgtcgttaatcttcgttggtgctaccattggtgggcttttattcggctatgatactggtgttatatcaggtgttctgctttctttaaagcccgaagatctatctttggtagttttaacggatgttcagaaggagctgataacttccagtacaagcgtcggatcattttttggctctattctggcatttcctttagcagataggtatggaagaagaattactctcgcaatctgctgttcaatttttatcctagctgcaattggaatggctatagcaagaacattgacgtttttgatttgtgggagattgctggttgggatcgctgttggagtgtctgcccagtgcgtccctctatctctgagtgaaatttcaccttccagaatcaggggttttatgttgacattgaacattattgccatcactggaggtcaattggtttcctatgtgattgcgtcccttatgacagagattgataattcatggagatatttgttcgcactttctgctattccagctattctgttcctttcaatactggatcttatccctgaaatcgcacgatggtccatttccaacggagacatctat

SEQ ID NO: 79707 - DNA, 1638 bp, Saccharomyces pastorianus
atgtttttatctaatagaaatggtttcacaggtagggttttcggtgttactttagcagaatcgttgagcgtcgccagtgcagaagtcattgttcaaagtgagttggtgagttttggtcggatacccatcgtggtagccaagtgcggcgcatacttaaaagcaaatggattggagacctcgggtatatttcgtatagcgggcaatggtaaaagagtaaaagcccttcaatacatattctcgtcgccacctgattatggtaccaaattcaacgattgggaaacatatacagtgcacgatgttgcatcgctcctgaggagataccttaataatttggccgaaccgctaatacctttatccctatatgaacaattcagaaacccgctacgatctagaccaagaatcctaaggcatatgttgacccacgaagtttctcatccgaatgcgaataaagcaaataatgtaacagtaaagtcaagtagacagaactataatgatgatggtgctaatgatggtgacatcgaaaaggaggacgccaaagatgatgaagaaaaaagacgaagaaaaatacgtcataagagaaggctgacccgcgatataagggcagctatcaaggaatatgaagagctctttgttaccttatcaaatgacacgaaacagctaactatatacctactcgatttactgagtctttttgcaaggcaatcacagtttaacctaatgtctggtagaaacttggcggccatcttccaaccttcaatattatcgcatcctcaacatgatatggaccccaaagaatacgaattatcccgactagtggtggaatttttgatcgaatactcgtacaagctattaccccatcttttgaagttggctaaaagggaacaacaggaacggttgtcgaccgaaaataagaaaaataatggggataaacagaaaactgatcctatagaaataccaaagatcacctcatcggattcgccaccaatagtttcttccaataaaaacccaccggtgattgacaataacaataaactagaccatacgacgttatcgccaatatctacttcgataccggagaactcatcagacctacagacttcaaaaatgttaaagcctccgaagcaaagaagaccacactcaaaatcgtttggttctactccggttcctccggatgttattgctagtaataaaagaagaacgagtttattcccgtggttacataaaccgggaattttgagtgacacaggagacaatggcgacttaactgctactgaagctgaaggtgatgattatgaagaagaaaatgttgatccatacggtcagtctccatttagcgtacactcaggttctttgcccaaacagcattatctgccaattcctcgaatgaacagatcgttgagtggaaacagtaccaattcgtcctttaacactagacctatttcaatgatcctgaccagtggtaatgataattccgctgatcaattagaattactaagtaacactcatagcaataatgagcgcagtaatgctttaccattaaccgaagatgatggggatgaaagaaattcaagatcacgcaagagggaatcgtggtttcaaaggctaacaagccgttcaggctctgctaacagggcttga

SEQ ID NO: 79708 - DNA, 441 bp, Saccharomyces pastorianus
  modified_base (393)..(395): a, c, g, t, unknown, or other
  modified_base (420)..(422): a, c, g, t, unknown, or other
  modified_base (432)..(434): a, c, g, t, unknown, or other
atgccaaataatactcttaaacaaggtcccaaaattgaaaatgtttctccctctaaaggtcacgtcccaagtttttggaaacagttcataaacaaccccaaaagtatgtcatcagagagtatcagtgtccctaggtcaccaacttcactttccagaagtgcccaaccaacgactttaaagaggcctccgctgtcttcgagaccatactcatataatactccaacgaaagataggaaatccttctccaaatccgcaaaacagaacagtagcagcaacaacactaatgcggggacatcgccccacgcagagtttaaaaattatagagatatgtttttatctaatagaaatggcttcactggcagagtttttggtgtcactttagctgaatcgttnnntagtgttgccctagtgcggaagtcnnnattgttcaannnagcgtaa

SEQ ID NO: 79709 - DNA, 180 bp, Saccharomyces pastorianus
atggttttcttagcctcgttgtccgccatttcggaagccatcgaggacaggatcattatgaattctatgccggagttgatgatgatttctcttgcatccttggtaaacatcaaatcctggtccagtatttcagatatcatcttttgtacggtcgctaagatcattcagtgttttctctaa

SEQ ID NO: 79710 - DNA, 834 bp, Saccharomyces pastorianus
atgttatcaatattcatgtatacgattattttcaatcctatactacaacaatatctaccatctttcgtgcagcaaagggatttgtatgaggcaagagaacgtccttcaagaacattttcgtggcttgcgtttttcctctctcaaatcattgttgaaatcccatggaatattttagcgggtacgattgcttattgtatttactattacgcggttggattttatgcgaacgcctcagctgctggtcaactccatgagagaggtgctttgttttggttattttctattgccttctacgtctacattggttcgatgggtttgttaatgatttctttcaatgaagttgctgaaacagcggcacatatgggatcgctattgttcacgatggcattatctttctgtggtgttatggctacccctaaggctatgccaagattttggatctttatgtatagagtgtcacccctaacttatatgatcgatgcattattagcccttggtgtggctaatgtggacgttaagtgttcaaattatgaaatggtaaaatttactccaccatctggaaccacctgcggtgactatatggcatcatatatcaagttggccggaacaggctacttgagtgacccgtctgcaacagatatatgtagtttctgtgcggtatccaccaccaatgcctttttggccactttcagttctcattattacagaagatggagaaattacggtatttttatctgctatattgcttttgattatatcgctgcaacattcttgtattggttatccagggtacccaagaagaacggtaagatttccgaaaaacccaagaagtga

SEQ ID NO: 79711 - DNA, 1566 bp, Saccharomyces pastorianus
atggcatatgttgttttctttttctttgtttatctaattctttgtgagtataatgaaggtgctaaacaaaagggtgaaatggttgtgttcctaagatctaagatcaagcaattgaaaaaggaaggtaaattacaagaaaagcataggcctggagatattgaaaataatgcaggcagttctccagattccgctacaacagaaaaaaaaatactagatgatagttctgagggatcggatagctcttcagataatgccggattaggactttccaaatctgaagcaattttccactggcgtgatttatgctatgatgttcctataaaaggaggtcaaagacgtatcttaaataacgtagatggttgggtaaaaccaggcactttgactgccttaatgggggcgtcaggtgcaggtaaaacaactttactggattgtttggctgaaagagtcaccatgggtgttattactggtaatatttttgtcgatggtcgtctccgtgacgaatcattccctagatctattggttattgtcaacaacaggatttacatttgaaaacggctacagtaagagaatctttgagattttcagcttatttacgtcagccttcgtcagtttctattgaagaaaaaaatagatacgtggaagaagttatcaaaattttggaaatgcaaaaatattcagatgctgttgttggtgttgcaggtgaaggtctaaatgtcgaacaaagaaaaagacttactattggtgttgaactagcggcaaggcctaaacttttggtttttttggatgaaccaacttcaggcctggattcacaaactgcttgggacacttgccaacttatgaggaaactagctacccacggtcaagcaattttgtgtactatccatcaaccttctgctatattaatgcagcagtttgatagattattatttttacagaaagggggccaaactgtatatttcggcgatttaggtgaagggtgcaaaactatgatcgattattttgaaagtaaaggagctcacaaatgtccacctgatgcaaaccctgccgaatggatgttagaggttgtaggtgccgctcctggttctcacgctacgcaagattataatgaagtctggagaaactcagatgaatacaaagctgttcaggaagaattggattggatggaaaagaatttaccaggcaggtcaaaagaaccaactgcagaagaacataaaccttttgctgcatctttatactaccaatttaaaatggttaccattcgtttgttccaacaatactggagatcaccagattatttatggtcgaaatttattttgactattttcaaccaagtttttattgggttcacttttttcaaggctgacagaagtttacaggactacaaaaccaaatgttatcaatattcatgtatacgattattttcaatcctatactacaacaatatctaccatctttcgtgcagcaaagggatttgtatgaggcaagagaacgtccttcaagaacattttcgtggcttgcgtttttcctctctcaaatcattgttgaaatcccatggaatattttag

SEQ ID NO: 79712 - DNA, 1299 bp, Saccharomyces pastorianus
atgacaagaaactcatggatgatgctggatggtaccaaaactgattttcatataacggtgagaaataaatcactgagctgtgcaataaatcatattaagatcataccaatgaataatattgagcaaatgttgaaacctgattattggaaaaaaatgccaccagatgacttgtacatcatggaaaaacagctagattggctctctaagtcttgtgtacgtattattaaattaccaacggtaatcaagccaaatgaaaccatcacatttgatttggaattagataatactgctgttccatttaatttcaccggatttgacttattgatcgaatacggtatgagcgctactgatgaatcctgcatttatttaaaaaagttatcaataccatatgaagtaacattgagaagaacaattgaagtaccaagtatggacatcataccgctaaatgaactcttcagctcgcaagttgaaaatgttgattggattgagtatgtaatgagcaaaatacgtgcagaatctaacctccactctagagattttatattgttattattagacttcagaaattcttggattgacggaataaaattgaatgttcaatttgaagatttcactagtaatgagtatcatgtagaggcaagccatacctcgagaattattgttcctattaaaaaaattgattacaaaaagtataattttgagaatacacctataccaagaatctatccaggccgacaatttattcaaagtggtttaaacgaagaacagactatagaaatgagacaaaaattttggtgtcgcgaacatatcatttcaaagcttaaatgtaactggaaattaaccacagaccaatctgtaacaggttcggtggatttcaataagttcatagaaaagtttgatcacaagatggtctacacgatataccccgggagattattttacggagtgcagctattgcttgatgagccaaaagtcaaagtaggggaaataataaacttgaagataataacagagccgactagtacatgtagaagaaaacaaaattctactgtaaattttttggacatcgtgattttcgacagcaagacatcaaaaatattaccaagatcgaacagacgaatttggtataatggttcgttaactaaaccaatcagtacaaccaaagtttctgaaattaacttagaaattattccaattgaaaaaggccggtacgagtttagcgtttgcatctccaaatcaaacaaccaagatggaattatccagttcgactctgaaaacgttatcttgtctgttatttag

SEQ ID NO: 79713 - DNA, 2163 bp, Saccharomyces pastorianus
atgaatattcttaagcatttcccaagctatgttggcccatctaagattaggaccttagtgataccaattggccattggacgcgaaaagagtttaataatgcggtacagaaactttctgaattcaacgaaattcatctgtctgatgtaacccccattgacagccctatcttcacaccgcaaggctttccacatgggaagttatttttcgacttcttgaccatagatcatgacgatgcattggagttgtttctgtatgattttgagccatttcggaaaacatttgtcattattgggctggtaaacgattacagtgaccccttgaccaatttgaatttcatgaaggagaagtatccaactttgatttcaccgaatttggtgtacgcttcatctacacccactaaagagcttgagcaaaccatagatacgatggaaaatgtattcgcatcttctccagatatgcagaaaaacatagaaacgattatgtgcgacatagcaaggaactttttaaccgcattgaacagctattactcttcctataaacatgttactttgaggtcgccgggtgcgattggtgggaatgcggtattgaaaacaactctaataagacagaacagttacacatcttcgtcatccagcacacccatgtcagcggtacaatcttccgtctcaagttcatcgaaggcaggctcagttactactgcttctaagaggttatcttcctttgagatgactaccaatagtttaaagagatccgcttctctaaagctagctaccacgctttccacatctgagaataggtctcaacaaaaatcattgggcagacaaatgaaaattttgggcaatttccaattgctggcaggaaggtacgttgatgcgttgaacagctttgttgatgcgatcacaactttgtacaaagtgcgtgactacttatggttgggttctgctcttgacggtatttcgatctgctttttacttctatcttatctcggtttgtcataccagattccacaaattgtgagtctcatttgtcctgtggagaagctcaattttgaatctagctcaacggggatttcgcctgtagattccaatagtaaagccacagcaagcacgacggcgtcaagcacaccaaggaacagcatatctatagctgctatgcagtcacctagaaattccattatgtctttatctgccccagcattaaatattgatgtagaaaacatcaacctcccgttattaattaaatgcatatctgacaaagtcttgtattattatgatttaagtttgatgcacaatagtgaatatgctccgcaagtggtttattgcgagtttttactgaagactttaactttcatgacatcgtgttataagagttcagagttttcaaaggacgttctggacaatattgtgaaaaaccaacacagggccttgtcagatatccctaatagtccgatgttcccaaggtttgaagtttatttctatagcaataaattgttcgaattacaattgaaggaaatgcaagttgaggctcaaattaaaatatactctactatggcggaagtttatcgccttttgggatacaaaagaaagcaattattcgtgttaagattgctgatggttgctcttttggcgactccgaataagatagcatggcatcctgactacaggaccttgatagataccatcatagaactcctcaacatcaatgaaagcgaggccaaaatcaatgtagatgatccgtctcaatctacttggttgatcctacagaaaaagatcctacaactatgcattaaagtttcaagaaaaatcaatgacttcgaatatgtcgctaaatttagctcgatactaattacgaaatatacgcatctgttaaatcagtcggaacaagatgccttgtttaaagaatatattcaaccatcaattaccaacgagtctatcacaagttattgggatcccttcattctgagggaagttgttataaatagaatattggatagtgaccccacttcaaacgaaatcccattagagtcagatgttagcagccttgaaagcctagaaaatagacaaaagacacaggatattaatccgcaggaagttttcaaccctttcaaacgggttcaaccacttcttttgtttctaataacagcaccaaagttcctattttag

SEQ ID NO: 79714 - DNA, 207 bp, Saccharomyces pastorianus
atgtatcattcggcgattctctttgactttttgctgaggttctggtggctatgggtatatttatcgcagaatctgaaattagttgccgcagatagcgactacatttttttccaaggcgaaatgcagtatttcgaagtaattagaagaggcatatgggtcgttttcaaattggacgcagagtattatattaagtttgcaagcaaataa

SEQ ID NO: 79715 - DNA, 909 bp, Saccharomyces pastorianus
atggagaaaagcgaaagtaattctgaaggactttatctccaaaatatattaaatgttccccctccgcagcgatttattgtgctcataatacttgccctttggatctggacatggatattaaaattcttcttgcatagtaatttagacgtatcccaagtcatactcacgagagtaccgcacgatatacgtccaggttatactctacagcaattgcatagaacagctagaaattttgctttgaagataacaaggattattataccgttccactttgccactgtgttcctttttgagttcatgaatattatagaaggtccactcaaaaatatcattctcatcgtatattttctaccattgatccaatgtgtcactatattttggtttctgttgaaagagtgccagataataaaatattgtactaggagatgtttgttgatagaatcctccccccgttccttaaggaatacctacattttaatctctgacacgttgacatcgtttgcaaaaccattgatagacttcacattgtttacctctctaatttttagagaacccttcacacattttgatctatccgtagcccttcttcctgtactggtaagactactgcagtgtttgagagaataccgtttactgcacgaagcaactttactattcaatgcattgaaatacagttgtaatcttcccattcttttttgcacctggagatcaagagtgtatgagggatccatcaacgaagaaagactacaccacgttcaaagatggtttatgctaattaattcttcctatacgttattttgggatgtaaggatggattggtcattggactcgttaacctctttaagatccagatccaaaagtgccgtcacatctaaagaaaaaaatgtatcattcggcgattctctttga

SEQ ID NO: 79716 - DNA, 1437 bp, Saccharomyces pastorianus
atggcgacatttgaatctttaatcaacttatatgatatctatttgaacgatgtcgcactaaggcaagattccaacttggtggaaacgtggatgaaaagagtgtccttgcagaagtcagcagcggaaaagtgtaatgtgtattcagaagctatactgaaaattgatccccgaaaagttggtacgcctggctctttcggtaggctttggtgttcgtatggggatttgtattggagatcaaacgcaattagtacagctagagaattgtggacacaatctctgaaggtaccgtatccttatatagaagatctggaagaaatttacctaaactgggctgatagagaattagataaagaaggggtggaaagagctttttctatccttgaagatgcattacatgtgccaacaaatccagaaattctcctcgaaaaatataagaatggacacagaaaaatacctgctcaaactgttctattcaactcattacgtatttggtccaaatacattgattatctagaggcttactgcccaaaggatgcaaattcctccgataaaatattcaataagacaaaaatggcatacaatactgttattgatttgagattgatcactccagcaatggcagaaaattttgcattgttcttacaaaatcattacgaagtcatggaaagttttcaggtgtatgagaaaacaatccctctgtttccccccgaaatccaatacgaattatggattgagtatctagaagtagcgacatcacatcaattgtcatcactgagtcctgaacatattagatttttgtttgagaaagcacttaagaatctatgttcaaatggtatagactgtaaaacaatttttatcgcttatagcgtatttgaagaaagaataagtggtctgattagcaagagtattgagatattacgtagaggtgctgtaataggtactgttagtgtgagcacgcacctcgaaagtagactgcaactgtggagaatgtgtatttccaaggccgaatctactttgggaccatcagtaaccagagagttgtaccaagaatgcattcaaattttaccaaactctaaagctgttgagtttgtgattaaattttcagatttcgagagctctataggagaaactattcgagcacgtgaaatccttgcctatggtgcaaagcttcttccttcatccagaaatactgaattatgggatagctttgaaatttttgagttaaaacatggggataaggaaacttacaaagacatgttgaagatgaagaaggtgttggaatccaacatgctcattgattcagctagcgttagccatgaggaaggtaacattaacttcgtggcggcagcaacctcgcatgctcccaactcgcatactcttaaccaatcaacctcttcatattcgattaatccagatgaaatagaactagatatttga

SEQ ID NO: 79717 - DNA, 969 bp, Saccharomyces pastorianus
atgtcagcatacatcgcaatgaaaggagtaataacaaacgtcgatgagaacataagaaatgatgaagatgtggcttttgagtacgaaatacaaaagacaccgcagaacatacttacatggaaaagatatatcgagtattggaaagaggagggaagaactgacaaacagattaggtggctatatgaaagattttgttcacaatttgtaacagatacaagtatatgggaagattatatacgctgggaatcaacaaaggaagtagtcgaaacttcacgtattttctggctttttcaaaggtgcctgaaaagctgtgtacgagattgtgacaggatatgtttgtcttatttagaattggcaattgaacaatatgacttggcaatgataaggcatgccttagcttcatctttaatgaaaatggagagagaaatgcatcggaaagtttgggatcctgtcataaaatttgtggaagaaaaagttttaccattaacgcaactggattcaactcaagaagatgaagaagaaagtactgatgaagctgaattgataaatgtacttttagtgaagggtttcacgaagggaggttttattagcgaggaaattagtgaaaacggaagtagaggtgatatttggtcgtcacatattttagaaagatacttaaaagtggctcctcagcaaaaacgaaatgaatcgctggcaactcttgcattaactagagacaatattaccatcaaatcagtatatgaaaagtatttgccacaagatgaaaatagtgggaagtatctacctagttcagaactgccttttgaattaaatttcaattatttggccagcctagaaaaactaggtttagataatcaatatgaggagttcatgaggcaaatgaatggcatatatcccgacaaatggcttttgttgatcctatcacttgccaaatataatatctctcgcgggaggctgacagttgtggtg

SEQ ID NO: 79718 - DNA, 699 bp, Saccharomyces pastorianus
atgacagaattgcccaagagaccggaacttaaagagatttcacttcttcactctcgaaaatcttcctactattctgctaagggtgttgaaaggccaagtacaccgttttcagattacagaggcttaagtaggtccagttcaataaatatgcgtgactcatttgtacgtctgaaggctagcagtttggatttgatggccgaggtcaagcctgagaggttggtgtattcgaacgaaataccaaatttatttaatataggtgacggctctacgatttctgtaaaaggagattctgatgacgtgcatccccaagaacctcccagctttacacatagagttgttgactgtaatcaagatgatttatttgctactttacagcaaggcggtaatattgatgcagaaacagcagaggcggtttttctaagtagatacccagttcctgacttgcccatatacctgaattcatcctatctgaacagaatactaaaccaaagcaatcagaattcagaatcacatgagagggatgaaggtgcgataaatcatattataccccacgtgaatttgaaccatttactgacaagcagtattagagatgaaataatcagcgtagcttgcactactagatatgaggggaaatttatcactcaagtagtttatgcaccttgttattataaaacacaaaagtctcagatcagtaattag

SEQ ID NO: 79719 - DNA, 1200 bp, Saccharomyces pastorianus
atggtagatatatcggatacaagtggatacctacataaacaaggtgtcttacctagtgtttctttcatttgcacttctttttttgcgtgtggactgacatcttggaaagttgaactgtcatattatatagttgttgcagccgccatgggaaacagtccttctactcaggatccatcgcattcaaccaaaaaggagcatggacatcattttcatgatgcattcaataaagatcgtcagggaagcataacctctcaactgtttaacaataggaagagtactcataagagacgcgccagtcatactagcgaacataatggtgccattccccctagaatgcaattacttgcatctcacgatccatcgacagattgtgatgggcgcatgagcagtgatactactatcgataagggcccgtcccatctattcaaaaaggattattctttgtcctctgccgcagacgtaaatgacactacgttggccaatttgactttaagtgatgatcacgatgtgggtgcacccgaagagcaggtgaaatctccgtcgtttttgagcccaggtccatcaatggccactgtcaaacgaactaaaagtgatctggatgatctgtctactttgaattacaccatggttgacgaaacaacagaaaatgaaagaaacgacaaaccacaccatgaaaggcatcgctcaagcatcatagctttgaaaaaaaatcttttagaaagttcagctactgcttccccttctccaacgaggtcttcatcggtgcattcagcatcacttcccgccttgaccaagacggattccattgatattcctgtaagacaaccctattcaaagaaaccatctatccatgcataccaatatcaatatctcaataacgacgaaacattttctgagaactctcaaatggataaagagggaaacagtgatagtgtagatgcagaagcaggcgtacttcaaagtgaagatatggttttgaaccagtctcttttacaaaatgctttaaaaaaggatatgcaacgtctttcaagggtgaattcctctaattcaatgtatactacagaaaggataagccacgctaataacaatggaaatatcgaaaataacacccgtaaccagggaaacgcgggaggctccaacgacgattttaccgcacctatatctgctactgcaaaacatgatgatgaaactgtaacggtg

SEQ ID NO: 79720 - DNA, 432 bp, Saccharomyces pastorianus
atgtcgagtatgtcttcaatatcatcaacaaactccaccgaaaatactttagttgttctaaaatggaaagacgatggtaccgtggctgcaaccacggaagtctttatagtaagcacggatattgcttctgctcttaaagagcaaagagagcttactttggatgagaatgcaagtttagactcagaaaaacagttaaatcctaggatccgcatggtttatgatgatgtgcataaggaatggtttgttccagatctttttttgcctgcaggaatttatagactgcaattctccatcaatggtatattgactcactcaaattttcttcctacagctacagattcagaaggcattttgtcaactggtttgaagtattgcccggttatcatacgatcgagccatttagaaacgaagcagacatggactcgcaagtag

SEQ ID NO: 79721 - DNA, 1293 bp, Saccharomyces pastorianus
atgagctcgagggacaacgacgatagcggagacaacgtcaacggtagaggcacctcacctatccctaatctaaacatagacaagccttcgccgtcagcgtcgtcagcgtcaaaaagagaatatttaagtgcatatccaacactagctcacagagattcatcatcttcacttagtccgcggggcaaaggacaacggtcttcatcgtcttccagttccagtcaaagaatatatgtttccccaccatctcccacaggtgatttcgtacacgggagttgtgcagacggtgataatggatctaggactaatactatggtcgaaatgaaaaggaaaaaaccagttcgtccagtggacatagatgaaattatccagagattactagatgccggctatgccgcaaagaggaccaagaatgtttgcttaaagaattccgagattattcaaatttgccataaggctcgtgaattattccttgcccaacctgctctcttagaattatctccctcggtaaaaatagtgggtgatgttcacggccaatatgcagatcttttgagactttttaccaaatgcggtttcccccccatggcaaattacttatttttaggcgattacgtagatcgcggtaagcagtccctggagaccattttactattactatgctataagattaaatatcctgaaaatttcttcctcttaagaggcaatcatgaatgtgccaatgttacaagagtctacgggttttatgatgaatgtaaacgacgttgtaatatcaagatttggaaaacctttgttgacacgttcaacacgctaccgttagcagccatcgtcacaggaaaaatattttgtgttcatggtggactatcacctgttctaaattccatggacgaaattaggcacgttagtaggcccaccgatgtacccgacttcggcttaattaatgaccttttatggtcggatcctacagattcatcgaatgaatgggaggataatgagcgtggagttagtttttgttacaataaagtggctattaataaatttttaaacaaattcggattcgatttagtgtgtagagcacatatggtggtggaagatggttatgaattctttaatgacagaagcttagttacagtgttttcggctcccaactattgtggtgaattcgataactggggtgctgtcatgaccgttagtgaaggcctactctgttcttttgagttgttggacccactggacagtaccgctttgaaacaagtgatgaaaaaaggcaggcaagaacgtaaattagccaatcgctga

SEQ ID NO: 79722 - DNA, 630 bp, Saccharomyces pastorianus
atgggtaattccggttcgaaacaacataccaagcacaatagcaagaaggatgaccacgacggtgacaggaaaaagacactagatctcccaccactgacaaaatcggatactacacattcgctgaaatcgtcaaggtcgctgaggtcgctgcggtcgaaacgctcagaggcgtcgttggcatctaatgttcaagctcaaacgcaacccctctcccgcagatcgtccactctgggaaacggcaatcgcaaccataggcgatcaaacaacgccccaatcactcctcctaataaccactacctaacctcacatcccagttcgtcaagaagactctcttcctcttcgagaaggtcgagcatggggaataataacaattcagaattgcccccgtcaatgatccagatggagcccaaatcacccatcttgaaaaatagtacaagcatgcattccactagctctttcaactcttacgaaaatgcgttgactgatgatgacgacgataggggggatgatggcggcgagagcccctcaatggccaaggttactcgcatcaacactagttcttccgcagatagaggctacaagcgtactcctttaagacgtcataattcatacaaccggaaaaaggtgtaa

SEQ ID NO: 79723 - DNA, 162 bp, Saccharomyces pastorianus
atgttcgctgattttgtatggcgagaggcattttttacgccttggtatatcattggtgttattttcatttttgtttcattctttctagttaaccatcggggagaatctgctgttgaaaaggactgtgctgcggttgaaaaaggacctatcttggatgcctaa

SEQ ID NO: 79724 - DNA, 786 bp, Saccharomyces pastorianus
atgaatcgtgttggtatagacgtagatcatatgataggggtcctgcttctggccgtagtggtggtgttttgggttggcgcttcgtgtttgactaatgaattgctcgagacaaacgcgtacaataaacctttcttccttacttatctaaacatatcatcgtttgctctttatttgacgccagatctatggaggataatccaatcaagaaggaagagcttgcaggaacggacagaacgaacattacctattcacacacaagaatctttttcagagttcctacctttactatcttcaactccttctacttcttctaatttgtcttcgatagcggacacgaaagtgaaggatacaatgaggttgagtctgctattttgcgtcttgtggttcgtggcaaatttggcggctaacgctgctttgtcgtataccacagtggcttcgtcaacaattctttcatcgacatcctcattttttaccttatttcttgccactagtctaggaatagaaactttttcgacaaaaaaactgctggggttatttgtgtctttgtttggaattatcttaattgtgatgcaatcctcgaagcaacaggattctgtgagtgcttcctcctttttggtaggtaacactttagcactgctggggtcattgggttacagtgtctataccacccttttgaaatacgaaatatcatccaaaggtctcagactagacattcagatgtttcttggttatgttggtatcttcacgtttctgttgttttggccaattttattatcctggatataa

SEQ ID NO: 79725 - DNA, 1275 bp, Saccharomyces pastorianus
atgtacttgaaggcatttgataaaaacaagttactgttgttagctgcgcagattgtttcatactgttctaataataagaactccatcaaaaacgtgccaccaatattaataattttacccttggataatgcaactctgactgaattagtagacaaggcgaatatttttcaggtgatcaagaacgaagtttgtgccaagatgcctaacattgaactatatttgaaagttattcctatggatttcattagaaacgtactggtgacagtggatcagtacgtcaacgtagcaatttctatatataacatgctgccgccaaaatctgtaaagttcacccacattgcgcatacgctgccggagaaagtgaatttcagaaccatgcagcaacagcaaatgcaacagcaacagcaacagcagcagcagaataacagtacaggatcatcttctataatatattatgactcgtacatccacctggcatactcgcgtagtgtagataaagagtgggtttttgcagctctttcagatagctatggacaaggcagcatgacgaaaacgtggtacgtcgggaattccagaggaaaatttgacgacgcatgtaatcaaatatggaatatggccctaaatttagcgtctaaaaaattcggaaaaatatgtctaattttaactagattgaatggcatactgccggatgatgaattgatgaattggaggagactttctggtaggaatatacatcttgctgtggtgtgtgtggatgacaactctaaaatctccttcatagatgaggacaaattgtaccctagtttcaagccgatctacaaagacactaggtttggaggacgcatggatatgaccagattagacgactatgaaataagggatatagaccaggatatccatggaatagtatttcagcacccgttcccactggcacactcacagcatcgctgtgctattaggagtggtgctttgatcaaattcaaaaaatgcgacggtgatacggtttgggacaaattcgcagtcaaccttttaaactgtccacattctgatagtacacaattgctggaaaccatcttagaagagtttcgcaacctggctgctctaaacgtgtggtacggtctctctgatggcgaagatggccatattccatggcatatcctagccgtgaaaaaaatgatgaacactcttgtgcacaccagagtaaaaattgctaatacttccgccgctactgtgcataccgctacttcttcatcaattattctctcggataaataa

SEQ ID NO: 79726 - DNA, 1782 bp, Saccharomyces pastorianus
atgctgtcgcccagcgatcaatttgctccagctttcttaaatacccctaataataacatcaatgagaatgaattatttaatgataggaaacaaactacagtatcaaatgacttagagaacagcccactgaaaacggaactggaggcaaatggtagatcactcgaaaaggtaaataattccgtgagcaagacaggaagcgtagacacacttcataataaagagggaacactggaacaacgagaacagaacgaaaatctgccaagtgataaaagtgactctatggtagacaaggaattgtttggtgaggatgaggatgaggatttatttggcgatagcaataaatcgaattctacaaacgaatcgaacaaaagtatatcggacgaaattaccgaggatatgttcgaaatgtctgatgaagaagaaaataataacaataaaagcattaataaaaataacaaggaaatgcatactgatcttggtaaagatattccattttttccctcatctgaaaaaccgaatatccgtacgatgagcggaactacaaaaagattaaatggaaagaggaaatatttggatattccgatagatgaaatgaccttgccaacgagtccattatatatggacccaggtgcgccactccctgtggaaacaccccgcgatagacgcaaaagtgtgttcgctccactgaattttaaccccataatagaaaacaatgttgataacaaatacaaatctggagggaaattttccttcagtccgttgcaaaaggaggaagcattaaactttgatatttctgtggcggatctttctagctctgaagaggaagaggatgaagaagagaacggtagcagcgatgaggatctaaagtcattgaacgtacgcgacgacatgaaaccttctgataacatcagtactaatactaatattcatgagcctcaatacataaattactcttcgatcccaagtctacaagactctattataaagcaagaaaatttcaattcagtaaacgatgctaatatcactagcaataaggaaggcttcaactctatttggaaaattcctcaaaatgatataccacagaccgagtcaccactgaagaccgttgattcatctattcaacccatagaatccaatataaagaagaccttggaagataataatgttaccagtaatccgtccgaatttacgccgaatatggtaaattctgaaatttctaacctaccaaaagacaagagtggtattcccgaattcacaccggcggaccccaatttatcttttgaatcatcaagtagtctaccgtttctattgagacacatgccgctagcatctataccggacattttcattacgcctactcccgttgttacaatttcagaaaaagaacaagacatcttagatttaattgcagaacaagtcgtcactgattataatatcttaggaaacctcggtattccaaagatcgcctataggggagttaaagattgccaagaaggtttaataacaaccacaatgttacagttattttccactttcgatagattaaatggcaatgatacgatctccaaattctataacatgaagcagccgtacgtttttgtaaagaaacatcacgaactaatcaaagtcaaacacgactctcagccatttattaagttcctcaattttcgccctccaaatggaataaaaaacttcaaatccttattattaagttcatctttcaaagaagatgtctgtcatttgcgccaactctatctcaaacatatattaatcaagagttag

SEQ ID NO: 79727 - DNA, 1008 bp, Saccharomyces pastorianus
atgagttctgacgcttccacgtacagacttgaggatgttttatccagcttctatagagtggagaaaatcaaaaagatcaactatcatcagtacatttctaaagcccaaaacgatcaatggtctatccaaatggaattcatgctacggaagcaggatccaaagactctagttgcgctgctttcaagggatttatggtgtttcagtataaatgatgatccggtaccgacacctcctgcgatagaacataaaccggtgagcccagataaaatcggaactttcactgccgattattcaaagccaaacttaccgccacactatgctctttttttaaaagctttaagaaggaaaatttacattaatttggcattaggttcacacaataagctaatacaatttgggaatgcctgcatatcattaagcggagtgccaaattatctcgtacagctagaaccacacctttttgtaaacggagatctcacagtgtcgttatgtgccaagaacatgggattagtaccaatgaaggaggaaaatttggaagaatctttcctttcaaagcatgcgctttatttagcaccatctggaataaggatgcatttggcccctgcttccaagcaaggatacttgataacgccaccaaaacatacagaacttctcttgacgacgttaagtgtatctcatggtataaacttacaaaataaaaaaaatttgaaatgggttgctgttgttcctgacttaggacatctcaacggccacacacctactatagcttcgtatttaactcccttacttgaagcaaagaagctagtatggccgctgcatttaatcttcgcccaaccagtagctgatatagaaaattctacttccggagatccatcagaatttcactgtttgcaagatgctctggatgccattgatgatttcatacaattaaagcaaacagctgcctataggactccaggaagttccggcgtattgagcagacctgcaggcatgcaagctgcactgccg

SEQ ID NO: 79728 - DNA, 240 bp, Saccharomyces pastorianus
atgaaaagaatccaaaagggtccagttagaggtatttctttcaaattgcaagaagaagaaagagaaagaaaggatcaatacgtcccagaagtctctgctttggacttgtctcgttctaacggtgttttgaacgttgacaaccaaacctctgacttggttaaatctttgggtttgaagttgccattatctgtcatcaacgtttccgctcaaagagacagacgttacagaaagagaaactaa

SEQ ID NO: 79729 - DNA, 603 bp, Saccharomyces pastorianus
atgaaagataaattaaacgagttaccagaggcagacatcagcgtactaggtaatgcagagaccaacccagcattacgcggtgacattgcattaactattttcgatgtgtgtatgaagactttgggcaagcattatattaataagcataagggttactatgccatctcagattccaaaatgaatattgaactaaataaggagaccttgaattacctattcagtgagtcactaaggtatattaaactatttgatgaatttttagacttggaaagagactatcttatcaatcacgtgttgcagttttggaaaaatgacatgtatgacctttcgctccgtaaggatctaccagaattgtatttgaaaacagtaatgattgacatcactctaaatatcagatatatgccagttgagaaactcgatattgatcaattacaattgtctgttaagaagtattttgcatatatatcgaaattggatagcacatcggtgaagtcattgaaaaatgagtatcgttcatatttacaagacaattatttgaaaaagatgaatgcagaagatgatcctaggtataaaattctagatttaattatcagcaaactttaa

SEQ ID NO: 79730 - DNA, 225 bp, Saccharomyces pastorianus
atgcaaaacccaactcactacaaaatcccagcttggttcttgaaccgtcaaaatgacatcactgatggtaaggactaccacactttggctaacaacgtcgaatccaaattgagagatgacttggaaagattaaagaaaatcagagctcatcgtggtatcagacacttctggggtttgcgtgttagaggtcaacacaccaagaccactggtagaagaagagcttaa

SEQ ID NO: 79731 - DNA, 405 bp, Saccharomyces pastorianus
atgaaatggacagcagtaatatcgaggttgggatcaaccgcggagaagatgggcgaaaagaaaaataagaagaaaaagaaaaatgacaagactatgccaattgagatgccagacaaatacgaactcggccctgcatatgtaccgcagttattcactccgacgcgtttcgtccaattctacgccgacttggaaaaaatcaatcaagaattacataattcatttgttgaatctaaggatattttcaggtatgaggtagaatatacctcagacgagaaaccatactcaatggattcgttaacagtaggaagttatttggatcttgcaggcagattatacgaaaacaaacctgcatgggaaaaatacgtcgaatggtcatttgcgtcttctggatataaagatgattaa

SEQ ID NO: 79732 - DNA, 141 bp, Saccharomyces pastorianus
atgggtgcgaaaccatctaacaaagaagcatatatgaacaccgtccgcgacacatactatcggaaagtgtggaataagctggaaagagtggatgaaatacatgttgaaaatgagaagcaaaagaaagaaaagaaggactaa

SEQ ID NO: 79733 - DNA, 195 bp, Saccharomyces pastorianus
atgaatattgaccacttcatcccaacggatggtaaaaaagctagaaaatcgttattgaaagccatggagcaatccactcgtgttcaacaaggagaagacagtaatgaagaggacgaagaaactgaattgaatagaattctggatcacgctatggcggcaaaagaagtttttttaaatgggtgcgaaaccatctaa

SEQ ID NO: 79734 - DNA, 381 bp, Saccharomyces pastorianus
atgattaagaacaatgaattcattgaatgggcgcaattctccggtaactactatggtagtactgtcgcttccgtcaaacaagtcagtaaatctggtaagacttgtattttagatattgatatgcagggtgtcaaatctgtcaaggctatcccagagttaaatgccaggtttttgtttattgctccaccatcggtcgaggatttgaaaaaaagattagaaggtagaggtacggagaccgaagaatccatcaacaagaggttaagcgccgctcaagctgaattggcatatgctgagacaggtgcccatgacaaagttattgtcaatgatgatttggataaggcctacaaggaattgaaggattttatctttgcagaaaaatga

SEQ ID NO: 79735 - DNA, 159 bp, Saccharomyces pastorianus
atgtcccgtcctatcgtaatttctggcccaagtggtacaggtaaatctacactgttgaagaaattgttcgctgaatacccagattctttcgggtttagtgtttcatccactactagaaccccaagagctggcgaagtaaacggtaaggggatcctctag

SEQ ID NO: 79736 - DNA, 2232 bp, Saccharomyces pastorianus
atggggcacgcaaaaaccacgaccgttagacagttaccatcagattgtaccccgctaacagtggctaatcaaactatcgaaattttacaaagtctaattgacgcggattctaggctaaaatacttcctgattgcagaacatgacaacctgatagtgaacaaagctaataacaaatctaggaaggaagccttacctgacaaaaaattaagatggcctttatggcatttattctcacttttagatagaaagctcattacagacgaaagcgtattgatggatttgttaacaagaatattacaagtttgtactaaaacattggctgtcctttctacaagttcaaatggtaaagaaaatttaagcaaaaagtttcatttacctagttttgatgaggatgatctcatgaaaattttatccattattatgcttgatagttgtactacaagagtatttcaacaaacacttaatataatttacaacctctctaaattacaaggctgtatgtccattttcacgaaacatttggtatctttagctatcagcataatgagtaaattaaagagtgctctcgatgggctatcacgtgaagtaggcactatcaccaccggaatggagatcaattcagaactgttacagaaatttacccttccaagttctgatcaagctaaattattgaaaattttaactacggttgattttctttacactcacaaaagaaaagaggaagagcgcaacgttaaagaccttcaatctttatatgataagatgaacggcggaccagtgtggtcctcattgagtgagtgcttatctcaatttgaaaagagtcaagccatcaacacttcagccacaatcttacttccgttgatcgaatcacttatggttgtatgcaggcgtagtgacttaagtcaaaatagaaacactgcagtcaaatatgaagatgctaaattattggatttttccaaaacacgtgtcgaaaacttatttttcccatttacagacgcacacaagaagttgttgaatcaaatgattcgttcaaatccaaaactgatgagtggtcctttcgcattattggtcaagaatccaaaagttttggattttgacaacaaaaggtacttcttcaatgccaaattgaagtctgataatcaagagcgtcctaaattacctattaccgttcgccgtgagcaggttttcttggactcttatcgagccttatttttcaagacaaacgatgaaatcaagaattctaaattagagataacattcaaaggagaaagtggtgtcgatgccggtggggtaaccagagaatggtaccaagtactatcgagacagatgttcaaccctgattatgctctttttcttcctgtaccatcggataaaactactttccatcctaatcggacatcaggtatcaaccctgagcacctttctttctttaaatttatcgggatgattatagggaaagcaattagagaccaatgctttttggattgccattttagtcgtgaagtatacaagaatattttgggtaggcctgtatcattgaaggatatggagtctcttgatccagattattataaatcattggtgtggattcttgaaaacgatatcacagatattatagaggaaactttttctgttgaaactgatgattatggtgaacataaagttatcaatttgattgaggggggcaaggatataatagttacagaggccaataaacaggattatgtgaaaaaggttgtcgaatataaacttcagacatctgttaaggaacaaatggataactttttagtgggtttctatgcccttatatccaaagatctcattacaatatttgatgagcaggaattggagttattaatcagcggtttgcctgatattgatgtcgacgactggaaaaacaatactacttatgttaattacaccgcaacctgtaaggaagtgagttatttttggagggcagttagatccttcgacgctgaagaacgtgccaagttgttgcagtttgttaccggtactagtaaagttcctctaaatgggtttaaggaactaagcggtgtcaacggtgtttgtaaattttccatccatcgtgattttggttcatcagaaagactaccatcatcacatacctgtttcaatcaactgaatttacctccttatgaatcatatgagacattgcgtggttcactattattggcaatcaatgaagggcatgaagggtttggtcttgcctga

SEQ ID NO: 79737 - DNA, 84 bp, Saccharomyces pastorianus
atgaaagagcaatcagagaatatagaattatatcttcttgaagaaaatggagagatcatgacatgttgggaatggaaagaatga

SEQ ID NO: 79738 - DNA, 1746 bp, Saccharomyces pastorianus
atggatcacagaaaccttgatccgaaaacgctgaaggtcagccaattgagaagagttttggtagaaaatgatgttgcgttccctgccaacgctaggaagcctgtcttggtgaaattgtttgaggagaaagtgaggcaacatctccaatcttcacctgaggcctcaaaggttagaactagcattcaaaaggttgtgaagtctggggcaaaaaacgcagatcgcaaaaagacattaaagagtaaaaagcttgaatcaagttctagtgagagtaaaactgtcaaagatgaaaatgttgaaactaacaagaggaaaagggaacaaattagtacggataatgaagtgaagatgcaaatacaggaagagaagtctcctaaaaagaaaagaaagaaaagatctagtaaggccaataaaccaccagagtctcctccacaatctaagtcagatgggaaagcaacttctgctgatttaacttctgaactggaaactgtagaagaacttcataagaaagattcttcggatgacaaaccaagggtaaaagagcttccaaaaccagaattgccgaatttaaaagtatcaaacgaatttttagctcaactaaataaagagttagctagtgcagctacggagaattatgatcattctataaaatccacggacttatcgtctatcagaatcgaaacagaagagcctgttggtccttcaactggagcagaaacaagaaatgaaagtgaggtgatggagaatatcaatttggaagtccaacctgaggtgaaggaagcaaaagaagaactaacaaaaatatcagaaacttttgataatcaagacgaagaggatactagtaggttatcgtcgaaaaaaaatatacgaagtccaaaaggtcgcaccaggcacttcattgccaacaaaactaaaagagggatagatattatgaaaccgtttattgcacatctcttcatttggttatggaatggtgctattttcctttcaataatatgtcctattctttttggtctttggtatcgagaacagagaattcaagtaggatattgcggtcatgaaaagcccctgaaatctcttgcaatctcagctttccctcagactgaaagggtagattcagtgttgcaagcttatcgaccaaattgtctcgaatgtcctgagcatggaatatgttcttcttttatgaatgttgagtgtgaaccaggctatgagcctaaaagttctattttagaaacgtatggtattattccttttccaaaatattgtgccaaagatgaaagtaaagaaaaggaggttgatgaactggtttggaaagtaaatgaatatcttaaaaagaagaatgcacaacatgaatgtggtgaaggagagaatctctttgagagtggtgaaacggaaaccaaattatatgatatattctctcattccagaccgtcatgggaaagtcaaagggaattcaatgatcattggaaaaatgtgcttgaaatattaaagaaaaaagatgatattatctggctgccattagattttgaaactaatggaaaaagagagaaatctaaatctaataacactaactatatttatcgttcaacttcaaaaaaatgggttacgttgcaatgtcatttagaaggggatatacaggagtatataacgaaatatggtggttctttatttatcaccctaggcgtccttttccttatcaaaaaaatacaatcgacacttgacaattacgttcaaggagagcagataatt

SEQ ID NO: 79739 - DNA, 711 bp, Saccharomyces pastorianus
atggaacgaacgcatcattcttcagaactaggccactgcattcctcgctttgatcattactgcatgtggatagggactgttattggtagagacaattatagactctttgtgcagtttgctgcttatttttcaacacttttacttatcatgtgggtgtctatttgcgtttacataagaattattactcaacacaatcataattatagccccaatttaaacgcaaatataatttcaacgttagtgtttgccatccttggatggttattaaccgcaagtttgttggcatcgagtattttttacatgagtcaaaacaagacgtctttggaggctatcatagatagcaaaaggaaaaaatttggaacaaggaagatattttgttattactcggaagcaaacaagttgaggtttgtggtagagttcgatagatctgaatttcactctttctgggacaaaaagtcaatcttagctaatataaaagactttatgggttctaacatacttatgtggataattcctttaggcaagccctatacatctcgatgcaaatctgatggcaaaagcggttcaaaaacaacgctagtggaaatattgggtccctatgaagaaactcttagtgactacaccattcaggccattgaggacaagatatcaagaggagaatatctggccacattgcgggcttctggtgacgatagtgatcctgcttactaa

SEQ ID NO: 79740 - DNA, 114 bp, Saccharomyces pastorianus
atggctctatcatggaatattcgaatcaggcgcaggtcatggtttagattcatcttaccgattatcgtgctcggtttactgtgctacggtacgtgggcttactgccataaacta

SEQ ID NO: 79741 - DNA, 141 bp, Saccharomyces pastorianus
atgaaccttctacaagaactcagccctcgtctgtttgaggctgccaatgcttccgagaagggcaagcgattcccgatggaaatgaaggtgcccactgacttccccccaaatacgttatggcattataacttccgaaaatga

SEQ ID NO: 79742 - DNA, 162 bp, Saccharomyces pastorianus
atgctggcacaaacattcaaaaaaccacacagagccgttctagaacaggtatctgggaccacggtcttcatcagaaataagagaacaaagagcaagagctcactgtcacctttggcacaaagggtcgtcacgcagttgagtgtgatgtctgcaagcagaaag

SEQ ID NO: 79743 - DNA, 612 bp, Saccharomyces pastorianus
atgaccatagtggctaataacagttcgggcaatgatattatatccaagtacggaaacaacaaattaatgttaaactcggaaaactttaaagtcgacatacccaagagaaagagaaaatatatcaagaaaaagcagcaacaggtttctggatcgacggtaaccacaccagaggtagctacacaaaacaatcaagaagtggcaccggatgaaatctcatctgccacaattttttcaccttttgatactcatctactcgagcccgtcccttctagttcatcggaatcttccgctgaagttatgttccacggcaagcaaatgaagaattttttgattgacataaacagcttcacaaatcaacagcagcaggcacaagataatccttcgttcctgccactcgatattgaacaatcttcatatgatttgagcgaagacgcaatgtcatatcccatcatatccacacaaagcaaccgcgattgcacgcagtatgataacacaaaaatctcacaaatcttacaatcacaactaaatccagaatatctcagcgaaaatcacatgagagagacacaacaatatttgaatttttacaatgacaactttgggtcacaattttga

SEQ ID NO: 79744 - DNA, 783 bp, Saccharomyces pastorianus
atgaactgtatcactattgacgttttttttactgctttttcccatccctgcaagcgaaaaaaaaagcaagctgactcttgtataaactgcaaggactcattgattaaaagtagatttacattacagactaaaggaaaaggcaaactataccggctataccacattcgttcaaaaatgccctctaccacgctactgtttccgcagaaacacattagggccattccaggcaagatatacgcgttcttcagagagctcgtcagcggagttattatatccaagccagatctaagtcatcattattcttgtgaaaatgcgacaaaggaggaaggcaaagatgcagcagatgaagaaaagactaccacaagtttgtttcccgaatcaaataatatagaccgttctttaaatggtggctgctctgtgatcccttgctccatggatgtcagcgatttgaacacgccaatatcgatcacactatctcctgagaatcgtatcaaatcagaagtaaatgccaagtcactactcggatcaaggccagaacaagatacaggcgcccctatcaaaatgtctactggtgtcgcaagctttccattaagtccatcaggctccaccccagaacattccaccaaggtcttgaacaacggcgaagaggagttcatttgtcactactgtgacgctactttcaggattagaggatatctaacgagacatattaagaagcacgccatcgaaaaggcgtatcactgtccatttttaacagtgccactcctcctgatcgacagctga

SEQ ID NO: 79745 - DNA, 3225 bp, Saccharomyces pastorianus
atgttacaggcttttaaaccgaaaaagaggcctcctcaagagaagaaaaaaacaaaaagtaagacatccaaggctgcatctacagctaataaatcacctgcatctgaatctacctccaagaaaaagaaaaagaagaaaactgtaaaggaaagtaataaatctcaagaagcttacgaagatgatgaattttccagaatattagccgatatggttaaccaagtggttaacacttcattaaaagaaacatcaacgcatactgccacacaggataataaattggaaagcgaaagtgattttacttcccctgtgcaaagtcaatatactactgaggattcaagcacagctaatgatgactcgcttgacttgaatcaaatcatgcaaaacgcaatggctatggtttttcaaaatcaaaacgacgatgaatttgatgagaacattgttgaagactttaatcgtggcttaggcgatctgagtgtttccgatttactgccgcatgataacctttctaggatggaaaagaaatcggtgcctaaaagttcgagcaaatctgaaaagaaaacagctatatctaggagagcttccaaaaaggcatctagagatgcctcaagtgtagaattgactgaagtaccttcaaaaccgaagaaaccttccaagacagaagtatctttagaaaagaagttacgcaaaaaatacgtctctattgccaacgaggctgcatctgtggctagaaagaaaagatgggctaaaaacaaagaactaaaggagaaagagaaacttgaacgccaaactgccagagaggaaaggagacataaaaaaaaactagagaagcagaggttggcagaagaacaagaggaactgaaaaaaattgttgaacgaggtccaccttatcccccagatttaagactaactaaaagcggtaaaccaaaaaaaccatacagaagatggactccggaagagctactgaaacgatcacaggaagctgaaaaaccgaggaaggtgaaaaaggaaagaaagaaaaaggaaaagaaaatgaaggtaccgtcatctgctttgaagaaaattcctctcttcaactttgtaaagggtaatgttcagccaagtgcaagacatcgtctgaacgacattgaaggttcgctatccactattggattacataaatcgcctgacggtgttcgcaggattctttcgagaccaaagagtgaggatcacgaatggcccctatcagattcatctgcatctcaaaattacgatgcacacctaaaaactgtagtgcataaagaaaaaattcctttccatcccccatggactataccgtctcaaccaccatttgcactacccgtagctagaagaaagaaaataccaaatatcaaaaagtatagaaagagaaccaataactctttccgtgtctccaaagaaggtacggcaagtactaggaacagaattttaccagccatattactaccgataataaatacattaaaagctgctgcaaaatcgcaaacagctgctggcgccacacctgaagaggcaaggaaacggctggcaaccattattcaacatgccaagtctacagttattagggcagctttacaagcaaggaaaaacagtatgcaagccgctcattctaaggggactaccacagaactggcaacaactgcgtctcgaatgaagaatccgctgagaatgattcctattttcaatacatctcgagtgaaacaacaattagacaaacaattaccggccagaagtgcaggaacagaaatgagcagctctgaatcccctgataaagccacgcccgatccccactctaattctacaatcgctgagcatactttaaagggcgttactacgccaattaaaatagaagacagcgatgcaaatgttcctcctgttaatatagcggtttcaactatagaaccatcacaagataaactagaacttacgaagagggcagagagcgtagaacctgtggaaaataatgttgaaacagcgaaagaaacccaaagcgtacaagaaattaaggagaatgtcagtaccaaggcttctgaggaagttactctaactgaagacaagacaaatggggatccaaaaaatgaaaagaggatattaattgaatctcctgtcgaaaaaacggatgaaaagaagccaggcgagaaaattgctacagatttgaatgaagatgcgagcgtgtctgataagaaagatggagatgaaaagtctacattgcattctgatgcagcccaacttacgggtaatgaaccagacagtgtaaacacggcaacaggaaagcccaaattaattgatgtttctctcaaaccgttaaatgaagcaaaaccaaaaattcccatcatatttcccttaaaaagaccgcaaattaagcctgaagttagcgttattaatttagttcaaaatttggtaaataccaaaatacccgaaataaagaatgaatccgttgatttgggaagtaatatcaccgacattctttcctctactatcactaatattctgcccgaaatcacagccactgatgttaaaaactaccagtatgaagatgaaaacgtaaaatacctgaaaaaaacaccaagacaggttttgaatttggatggactagtgcctccatcgggtagatgtattaccaaagctaaacgtgtccgccgcattaaaaagctttctgctgacgccactaccgcaccggaagccgatggaaaagcaaacagcgaatccatcacttacacattcgatataccatctccagaagaggtacgaagtaagcgtagtgtagtcctaaaatttgccaaggctagattgaccgaggcagagttgagttgtctaaagaaggagattaacaatgtgaggaaacggagatggagagagatgaactccaccaagaactgggaatacgacgtaaagtctagattaaaaaagcgtgcgaacgcattttttggggaaggagaatcagaaacgaagtctaaatggatcgaagaaagatttcaagaaaaggtaagtcaagaaaagtacaaggatcgccttgaaactactgagacgcaagcaaacaacacgaagattgtgattgacgacaaggagattttgaatattcttgcggtaaacatgaataaccttaacaaagcacgctgtattgaaaaagatattcaagagtcgttcagggaggagaagttagcctctttacaaccaaagaagaagagaaagaaaagcattttacactga

SEQ ID NO: 79746 - DNA, 696 bp, Saccharomyces pastorianus
atggcttatgatgaagatgatggagagataaattttaatgaacttgtggggaacttactaagctcacataaccaagagggacaagaggaaggagaagtgcaaggaggagaacaggaaggagatgagtttgaaaaaataaatcctaccagtgaaaatatagaaccaaagcatccagatgacagccagcatatacataattctcctgaccaaaatatcgaaataccacattttgtcgacgaagaagatgagctagtatctgtcgttgcaaatgcggttcaaaatatagacgatgagcaagccaaaccggaaaatcatctggaaaatggatcagaacatgtaacatcggatacagcggatgataatcacgaaaaagaacaacagcaagaatgggctcatatcctacagcaggaaatattaaaatcagacggagagcccttgcgggagaatacagaaaggcgtgtaagcactagtcagcaccatccctctcagcgtactgatgacgctctcgaccaagatgatgaaaatttgaggatggctatcctagagtctctacaagaattaaacacaaatgaggaggaagagaaagagccggaaaaacatgagcatgctgccccgaatgataagttgagcagcaaaaaatcttcaaagaaaaaggaaaaagataaatccaagaacagagaatcatcaaaggactaa

SEQ ID NO: 79747 - DNA, 102 bp, Saccharomyces pastorianus
atgttagaaggagcagaatacttttctctcgtagttgggaattccatttgcggaagtggaggtgaaggtgttggctgtcgatatcctgttgttttgatttga

SEQ ID NO: 79748 - DNA, 666 bp, Saccharomyces pastorianus
atggaggtcatcaactctcctgatatttctaagtccttcattttagccttaggcgcgggagtatttaccagtattatattattacctgtggacctgataagaactagattgatagttacatcattcaaaaaaaagaagaatgtcaagacagatggaaagaatatggttactaatactagaagcttgaggcagttaatcagatgctggtcatggcgtaaaaacggagtttccattccattagatatgtggtccctaactattcttcaatctatcaataatagctttttcaacaaattgtttgatttagtcatctacaaccaattccatatcgaaaaatactctcaaaccgtcatgtacaatactatgaagtttttttctaaatcacttgaactatttatcaagttaccattggaaaacctgttacgtcgttgtcaactaaactacttgttgaacgatcagcggttatcatttaaagtagattccactgaattgatagtaaagccaaaaaaatacaatggcatatgggatgtgataagaaacaattctaatacaaatagaggccaactttggaacggttggaaagttggagttattagtttaatttgcggatatgggttacaaatgatgaataaagttgatatcaacatggaacaagagaagttctga

SEQ ID NO: 79749 - DNA, 840 bp, Saccharomyces pastorianus
atgaacaacaataatgttacggaagcaacgtcaagggcacagatacggccttattatgatcccgattctttcaatgctgggtatagcgctgttttcaagcccgatgagggtgtagtagatccgcacggatacacaattgcttctaagctaaacgttatcaactcatctccaactacaaagagaatggctaatgcattgtttaaaagctccccaatgaagaaattgtcaaattcagttaacgatggattgtcactggagggaagtaatggcgaaataactggcctgaataattttgaatgggcggaattggttaacatccagaaatggcgaaaaatatttgaacaactgctggatatgtttttcagaaagtattttcaattgctcattcaacagccctttgatgtagcaagactacttatccaagtaggtgagtttaaaatcttcaaaactacagttgacacgaataaacctcaagcaccaataattttgcgggatgaagaaggagatggcgctgcgagagaaggagaagaagatgcttacgatgaggaggagatagatttctttcccatagaaaggaagatcgccgaggcaaactctactgcgcctattatggccgaagaaactgatcattcacatcatgaacctactgatatatccttgactattgcaccacagtccctacatacaattgacgtaatcaacgccctatttgatcaggagggtattcgtggtctatggaaggccaacaacacgacttttatttacaactttctttccctaagcatagatacttggttcacaggattactctcgtctttagagggtgtccctgacccatag

SEQ ID NO: 79750 - DNA, 204 bp, Saccharomyces pastorianus
atgaagtattttgagttgcacacttactctgggtatataaaaatggacatgcataataattcaatatcaaaaacttgggaaggctatttacaagattgtaaattcaaaggctggtttatgaaagtatgcaatgatcaggattctttattacgtacgctgggtcagtttgattcagagcatttttattcacctgttcaaacgtga

SEQ ID NO: 79751 - DNA, 1188 bp, Saccharomyces pastorianus
atgcccccaagaaatacctatgaaaaaggtaatccgaaacgccaaaatagtccatattataagccaagtttcttacggcgtgaagaaactaccaatgatgaggagaagtttcagggccatggtctgaaaaccgaacttcactcagcgttaaagtcttcaaatttgaatcttatccgaagaacttatcaaactggtgaaaatccctatcttagtgatccacacgatcgaggctcatcgagcagatttaacaggcgttatgaacggggtctgaagttttaccaaaagggagaaatcagtaaaagaattgcccaagaaagaacattacaaaaacagcaggaggaggaagaattaaaaagaaagttaaaacaagaagaagacgagaaagataaaagaaaattaattgagtcaggtgatttacccaatttagagttacatgaggataagttcctattagatttgtcaaagttcaagatatactatgataataaccatggctatgaatggtgggacacggcttatttagatgaaaagggtgagttgatggaaaaatatgacatgaatggcacatcgcctgccgaagaaaagctagcagaagatattgatgaagtagacgatgatgatgatgatgagcacccatctataagatatgtagcacatcccttacctgaaaagatcaacgaggcaaaagtatcaatcaaagcatatctaacacaacatgaaaggaaaagattaaggagaaatagaaggaaaatggcaagagaagcacgggagataaaaattaagttaggactattacctaagcctgaaccgaaagttaaactaagcaacatgatgagtgttttcgagaatgatcaaaacataacggacccaactgcctgggaaaaagtagtgaaagaccaagtggacctcaggaagagaaaacatctggaagaaaacgaaagaagacatgaagatgctattaaaagaaggaaagaagcagtcaatatgaacgttgaaaagccgacagtataccattgtaaggtgttccagttcaaaaacttacagaacccaaaaataagattcaagttgaaaatgaatagtaaagaactatcactaaagggtttatgccttcgtatacgtgatgacggaccaggaataattatagtcgtgggtaacgaaaaatcatgcaattttatgagaatttggtga

SEQ ID NO: 79752 - DNA, 591 bp, Saccharomyces pastorianus
atggcttatcgcggatctagctgtcgatccaatccaagtcagatcagctctaagtcaaggataagagacaaatcaaaaccaagctctcctactgctaccgatataaactcaagtgcgagtgcgtcgagatcacgttctccgcaaatcaagttcgcatcgagtgtcaagaatgtagatggtaatgctgcactgggtgctattaaatctagacactcgctagacagcccaggggaccagcaacaacaacatcatcatcactatcatcgtgacacagatcagttgtccgttccaggccttccccatttggcaccttcaaagtcatatagtgtgagttctggtaataaggattcatctttgaggaaagtcagtagctcatcttcgctcagaaaagtaaaatctaatgattcgaactctggtaaacgtattaaaaaaccggtcgtaacttcagcacacttgaaaccaagctcaggcggtggtggtttattctctttttttaagagtaaatcgagatccccgtcacctttcagaaaggaagatgagagtaaaaatacgcctaagcgtagcggattgtttgggttcggaaggctgtag

SEQ ID NO: 79753 - DNA, 1101 bp, Saccharomyces pastorianus
atgagagagcgaaaaagaatgctaatgatgatggatgatagcaggagtgttagctcagcaagaagatcacgaaccagatcgagatcacgatccatatgtacaagaaggacactttctctggggcctgaggaatctgacagcaaattaaagcaccaaaattttatcgagtggacatctggttatacgcagaacgaaatagaacgtaaattgcaagatctttttgattatgttacactcataattccgcaagatcgttctgtcaaggtcactgtcgagatcctaattggcaagactaaaaaaacgcttcttgaggcaataaacatctatttacctgatttctttgtatctagcactttgaggtgggagagaacagacagcttagttcgttggaaatcgaactttctgacagataaactgtgtactaattttccgattccaacgtttattgtaccggcaaagagaatgttcgatttggaaatagatttgcaaaaagagtttaaagaaccggaggtaacgaaacaaaaaaatactagcggtccaaagcctgggttcagccattctaaatcagcagatgctagcattccaactatctcaaatatcaaacggaagcaagataacgattattctatagattcactatgttatgccccagaagctaatggtgctaacaatagtagccgagaggaagcatctgatgatgagcttaacgcttttaaggatgatgagaatgatgtgatgtccgtgaaatccttaacctctaacatttcggtaaaggaaaagttatgtaccatggcaaggaaacgtagaaagagtatggctcagcagttaaatgacgccgatcatgattcatcaataccaccgggacagaggcatttgaaaaaactgaatattattttggaatcttcattaaagttttcattagaaatcgatagcatcactgatagtattgaaaatggggatgtagacgaaaagagagcacactctatggagtcgggctttgaagaactgaaaagagtcatcacaggtggtgctcctccaaggcatgtggctaccccgcaaaggtccatgcttgatgttttgggacaatgccaagattcatct

SEQ ID NO: 79754 - DNA, 1431 bp, Saccharomyces pastorianus
atgatggcagatatcctggtagagaagataatcagaatgtcattaccaccatcttccgaaacggctgttgatacaattcaccatcgtatggttgctggtaaagaaaggcctaagctgtctgtgcagatcacgagtaggaattttatacagatgaactcgagactaggggtaccattcatgattatggatgaattaataaagatattaaattggactaacccagcgtatacagtatctattatgttcttatacacgctcattatattgaaaccttttcaaatgctttcctcgctccctatattctatttgttattctgcgtaatggtcccgcaatacctttacattcataagccaaaccctacaagctatctagataataatcaaacaccagcacaaggcccacctttgcgaagacctgaggttcctaaaccagtccctgaactgagccaagaatttgtcttaaacctcacggatttacaaaaccatatgctgctatatgttaaattctacgattttactttactcatattacaaaagtttgcattcttcaccaacgaggctatttcgtcgttttattttattgtattgttaataatagcaacattaaattttctgtacatggataaatttatcaagctcattccaatgagacccgtactgatactgctaggttggggtttttttattgcctcgcatccgtccaatcgtgaatatttgttgactaaattgaattcggaggagacaagattaaaaactttgactataagtactaatctggaatctaagattttgcagcatttgaaactcattgaggctagggagcaccgacttgttatgatctttgagatccaaaagtatcttcctgaatacaaagaatggcgcccagttggattctctgatgacgattattctcttttctctagtttgagaatataccagaggcgtattgaggaaaattcagtgaagtcattagaagaaattgagccacctaaggattgggaatgggaagccaattctcattgggtgcttgatttggatccaaaagaatgggtagaggacgaatttattcagtatgtcgagatagattcagaaacaaaatgggtctatgacctcaatcttgatggacaaaggggctcatatagaaggcgaatgtggaccaacagttgcgtgcggaaaaaactggattctggtatttcttcaaaccttggtgaggaggaagtagttaatccattgagggaagaaacatataggcaaggcgtacatggcgtgacgaagggttcaatgagtggcggtctaactcacagtagtgatgatgaccgcgctgatgaggaaagtataaacggtactattcctaatctcaacaatatcgacgcggatgcatcttatccgtcaatcgaagagctaacagacactctcaattcaactatataa

SEQ ID NO: 79755 - DNA, 219 bp, Saccharomyces pastorianus
atggactcggtgacaaattttttctggaatgacacctataatgctggtactccaactagatcaactctcaaggggaagaaagtgcaaaatggcatagatggaaaaagtcaggcaaagaaagagagcatatctagtggttctagaactagtgatcctacgcgtggtagtctgccatcttccagtggacagccaactagtggtggcgttttccctcgacat

SEQ ID NO: 79756 - DNA, 294 bp, Saccharomyces pastorianus
atggtatcatttagggcccaaattggctggaccacgcatggtcacagcgcagtcgacgtcaacatatatgcatacgccaataagaaagctacatggtcatatgtcttgaacaatttacaaggcaatcacgaaaatacggaagttggccagttcttagaaaactttttagaattgaacctgagcgaagtcactgatttgattagggacaccaaacacacatcagattttgatgctacagaaatagctagtgaagtacaacattatgacgaatactaccatgagttgaccaactga

SEQ ID NO: 79757 - DNA, 1191 bp, Saccharomyces pastorianus
atgatgactcacacattaccaagcgaacagacacgtcttgttcctggatctgactcgagctctcgtcctaaaaagagacggatctcgaagagatcgaagataatagtatccactgtggtctgtattggtttgttgctgattttagtgcaactggcatttccaagcagttttgcattacgttctgcatcacacaagaagaagaatgtcatattcttcgtgacggatgggatgggacctgcgtctttgtccatggcaagatcattcaaccagcatgttaatgatttacctatagacgacatcctgacacttgacgagcattttatcgggtcttcgagaacaaggtcctcggactcactagtcactgactcagctgcgggcgccaccgcatttgcatgtgcattaaagagctataatggggccatcggtgttgatccgcatcacagaccttgtggtacagtgctcgaggcggctaagttagcaggttatctcactgggcttgttgttacgacaagaatcacagatgccactccggcttcattcagttcacatgttgattacagatggcaggaagatcttatcgctacgcaccagttaggcgaatatcctctggggagagtagtagacttactcatgggtggcggcaggagccatttctaccctcaaggcgaaaaggcttctccatatggtcaccacggtgctagaaaagatggaagagatttaatcgatgaggctcaatctaatggctggcagtacgtgggtgaccgtaaaaattttgattctttgttgaaaagccacggtgaaaacgttactttacctttcttgggtctctttgcagataacgacattccttttgaaattgacagagatgaaaaggagtatccttcccttaaggaacaagtcaaggtggctttgggtgccttggaaaaagcttccaatgaggacaaagattctaatgggtttttcttaatggtggaaggctccagaattgatcatgctggtcaccaaaacgatccagcttcgcaggtaagggaggtgttggctttcgatgaagcattccaatacgttttggagtttgctgaaaattccgatacggagactgttttggtctctacgtcggatcatgaaacgggtggtttagtcacttcaagacaagtcactgctagctatcctcagtatgtctggtatccatag

SEQ ID NO: 79758 - DNA, 663 bp, Saccharomyces pastorianus
atgtgtcgttaccaatctgggtttttctggagacatgaattattagaagagtacgattggtactggcgtgtggaaccagacatcaagttatactgtgatattaattacgacgtttttaagtggatgcaagaaaacgaaaaagtttacggctttaccgtttctattcatgaatatgaagtgacgatcccaacactatggcaaacgtccatggatttcatcaaaaagaaccccgaatacttagatgaaaacaacctgatgagttttctttcgaacgataatggtaaaacatacaatctgtgccatttctggtcaaactttgaaattgcaaacttgaatttgtggaggtcaccagcctacagagagtattttgacactttggatcatcaaggtggatttttctacgaaagatggggcgatgctcccgttcattctattgctgctgctttgtttttgccaaaggataaaatccattatttttcagacattggttaccatcatccaccttatgataactgcccattggacaaggaggtctataacagtaacaactgtgaatgtgaccaaggtaatgatttcactttccaaggttactcttgtggtaaggaatattatgatgctcaagggttggtaaagccaaaaaactggaaaaaattccgtgagtag

SEQ ID NO: 79759 - DNA, 582 bp, Saccharomyces pastorianus
atggccctctttctcagtaagagactgttgagatttaccgtcattgcaggtgcggttattgttctcctcctaacattgaattccaacagtagaactcagcaatatattccgagttccatctccgctgcatttgattttacctcaggatctatatcccctgaacaacaagtcatctctgaggaaaatgatgctaaaaaattagagcaaagtgctctgaattcagaggcaagcgaagactccgaagccatggatgaagaatccaaggctctgaaagctgccgctgaaaaggcagatgccccgatcgacactaaaacaaccatggattatatcactccatcttttgctaacaaagctggtaagccaaaagcttgttacgtcactttggtgagaaacaaggagttgaaaggtttgctaagctccattaaatatgtggaaaacaaaattaacaagaaattcccatatccttgggttttcctaaacgatgaaccttttactgaagaattcaaggaagcagtcaccaaagctgtttcttccgaagttaagttttgggtattttgcccaaggaacagggtcatatcctga

SEQ ID NO: 79760 - DNA, 1020 bp, Saccharomyces pastorianus
atggtaagtgctctcgagagcagggaaaatacttttgaaaactcatcacctgctgcccaagtggtctcacaaagggataattctgcaacacctacaccatcaaactccactggcactgaagatactatattgatctctccggatacggatataaaaggagagcctgaaccttgtctgaaaaccgaaggcatcgagaacttatctcataatgtaccacaagagaccaaaagcaatactgatgtttctttcttgaaacaagtaacgtttaccgaccatctgcaagtggccataatcgatactgaagagtcaccctcaaaaaaagatacagctaatgttgatgaatcttccgcggaaaactctttatcaacacagacctacgaagggcctgagcaattaacctcaaggaactttgttacactttatgattttcctaatgctcctccaaatctaaaagattttaacacaaacttatttggtggtcgatggtcatacacaaatgggttatccgccactcagcgtccacaagatatgaaaactgttttccactccattttaccatcacctcctcagtcttcagtaccgtctcctaccgtagatatatcacttgatctgtcagctctggcaaatttcccatcttttggggaatacgataagaaaatagtccatcaaatcaacacagagataaataaggatttggaaatcaaaatcaaaacacagcctccaacgggtgtcttcttagccaatggtataagaaaaaaatgtttaatcacaaataaagaatgtcagtactttgatccaaggactggtgtgccttattctgatgtggaagcttataaaattattcagcggattcaagatcctatttctaaggaggagggaaggtcagatatcaagcgtgatgaaacgacaaatgaggatagtgacgatcaagtgagattcaagtggtttgggttcaaaaacggcggtatttaccttgatttcagtcaaagacctgcaaaaggtgttcctgaaggattttaa

SEQ ID NO: 79761 - DNA, 213 bp, Saccharomyces pastorianus
atggcggtgtttttgcagagaagaggccacactgaggccggtgtcgatttgtgtaaactaagtggactaagtcccgtcgctgttattggcgaattggttaacgatgacgaacaaggaactatgatgagattaaatgactgccaagcgttttgtaagaaacatggcattcctttgatctccatcgaagaattggcccaatatttgaagaaataa

SEQ ID NO: 79762 - DNA, 120 bp, Saccharomyces pastorianus
atgacttgtagggctcttgcagactcttcctctacgccaaaatcatttttaaaaccagggcacatctgtcccttgagagccgctgatggcggtgtttttgcagagaagaggccacactga

SEQ ID NO: 79763 - DNA, 192 bp, Saccharomyces pastorianus
atgaacaatggctttcttgtcgccattcctcagacgtctgtgcctatacgaatgagtgataatggaccttccactatgagaacaggcatgaagtttgaatccaatgatgacgacaggcatggaactgcatacacaataactgtagatgtagccaggcactaccacaggtatctgctcacgacaggtcgatga

SEQ ID NO: 79764 - DNA, 2508 bp, Saccharomyces pastorianus
atgcttgtgtcgcaaacaaagtttgatgcagaatcaaattcgaagatagacaaaatccttcttttacctaaagtagaaggcgcactaatattatgtgataacgaactagttttatttattctcccagaatttgcaccaaggcccaacacaactagacttaaaggtattagtgatgtcgttatttgtaatttttcccgaagctcgaaggcttatagaatatatgcatttcacgcagaaggcgtaagactactcaaaatatctgcagattcattagtacttaccaaagcttttaatttcaaactaatagataaagcttgtgcgcacgaagaaacattaatggtttcgaagttaaatagttacgaacttataaatctaaagtcgtcacaggtaattccattatttcgaataagtgagactgacgaagacttagaacctataataaccagtttcaatgaacagagtgaatttttagtttgttctggaggagggtcatacgatagtggggcgatggccttagtggtaaatcatcatggcgacataataaaaggaactatagtgctaaaaaattatccaagaaatgtaattgttgagtttccctacataatcgctgagtctgctttccagtcggttgacatatattctgccttgccgagtgaaaaatcccagttgttgcaaagtataactacttctggatcggatttaaaaatttcaaaatctgacaatgtattcactaataccaataattctgaagaattcaaagaaaaaatattcaataagttgagacttgagcctctgacacatagtgataataaatttagaattgaaagagaatgcgcctttgttgaagagtcttatgaagaaaagacctctttaatcgtttataataatttagggattcatttattagttccaacgccgatggtcttacgttttacatcatgtgaagagtccgaaattgataatattgaagatcaattgaaaaagcttgcgaagaaggatttaacaaaatttgagcacattgaagcgaaatatttgatgtctcttttattgtttctaatgaccttacattacgatcacatagaagatgaggtaatgaaaaagtggtgtgacttttctgacaaagttgacatcagaatattattttatatgtttggctggaaagtctatagcgagatctggtgcttccatgggttaataaatatagttgaaaggttgaaaagcttgaagctaactaacaaatgcgagaatattctaaaaatgcttctgatgatgaagaatgaactaaagaaaaagaataaaactggactcttaacgaatgactttgatgatataatgaaaactattgatataactttattcaaattaagattggaaaaaaaggaaactataactgttgatatgtttgaacgcgaaagttacgacgaaattatcagagagattaatttacatgatgataaacttcctaggatagagttactaattgagatatataaagaaaaaggggaatatcttaaagcactaaatcttttgagggaagctggggattacatttcactagtttcattcattgaagaaaatctcaaaaaacttcctgaggattatatcaaagaaagaatagccgatgatcttctcctcactcttaaacaaggcgacgaaaatactgaggaatgcgccatcaaaaaggttcttaaaatattggacatggcatgtattaataaaaacgactttttaaacaaaatacccgcagaagaaacatccctgaaggtatcattcatagaacaactcggtgtccaaaacagcaacgattccaaatttctctttaactattatttggcgaaattgcgagaaataatcaaccaaagtaacatatggtccattcttggagattttatcaaagagtacaaagacgatttcgcgtatgataagacagatataacaaattttattcatatcaaattaaagcatagtcttcagtgcgaaaatttttccaaatattatgaaaaatgtgaaaacttgaaatcggaaaatgaaaaagatgatgagtttattaatttcaccttcgacgaaatttccaagatcgataaagaacacatattgagcttgttatttttccccaatgaattaacaaactgggtttcttccgaagaattgctgaaaatatatttgtcatttaatgatttcagaagtgtagaaaaatacataggcaagcagaacttggttgcggtgatgaaacaatacttggacatatcttctttgaattactcagttgaattagtgactaatttgctacagagaaattttgaacttttagatgatacagatattcaattaaagatcctcgaaactataccttccgtatttcccgtacaaacaatatccgaattgcttttaaaggtacttattaagtatcaagaaaagaaggaggaatctaatttgcggaaatgtttgttgaaaaatcaaatatccatttctgacgaactaagccggaattttgatagtcaaggataa

SEQ ID NO: 79765 - DNA, 564 bp, Saccharomyces pastorianus
atgatctatggagacgatgcgaccatagtaaatggagaaatgctcatccactcctctaaattcttatccagggagcaagcgttaatgatagaaaggtacgtgggacaagactccccgaacttggacctcagatgccatcttattgaacatactttaaccataatatataggctatggaaagaccatttcaaacaattgcgtgaagaacaaatcaagcaggtagaaagccaattgattatgtcactatggaggtttctcgtatgccaaaccgaaactgtgacagcaaacgaaagagaaatgagagatcatcgacaccttgtagatagtttgcatgatctgacgataaaggatcaagcctcttattacgaagatgcctttgaggatttaccagaatatatcgaagaagaattgaagatgcaattgaataaaagaacggggagaataatgcaagtaaagtacgatgagaaatttcaagaaatggcaagaactattcttgagtcaaaatcattcgatctaaccacactagaggaggccgattcattatatatctcaatgggactgtaa

SEQ ID NO: 79766 - DNA, 705 bp, Saccharomyces pastorianus
atggatttgcatgtagaacctcagattttccaatatgaactgatagactatttgataatttcgtattcctttgatctcctagaaggtatattaagggtactgcagtcgcatcctaagcaaacatatatggaattttttgatgaaaatattctaaaatcatttgaatttgtctacaaactagcactaaccatttcatacaagccaatggtaaatgtaatatttagcgcagtcgaggtcgttaatattatcactagtatagtattaaatatggacaattcctcagatctgaaatccttgataagcggtagttggtggagagattgtattacaagattatacgctcttttggaaaaggaaattaagagtggcgacgtatataatgaaaatgtggatactacaactcttcatatgtcgaagtaccatgacttttttgggttaatccgaaatataggtgataatgaattgggaggattgatatcaaagctgatttatactgaccgattgcaaagtgtcccaagggtaatttctaaagaggatattgggatggatagcgacaaattcactgcccctataataggttacaagatggaaaaatggcttttgaagttaaaagatgaagttttaaactatttccgaacaattatcaatgatctatggagacgatgcgaccatagtaaatggagaaatgctcatccactcctctaa

SEQ ID NO: 79767 - DNA, 909 bp, Saccharomyces pastorianus
atgagacaagaaacggtgggtgaattttcttcagatgacgatgatgatattcttttggaattaggcaccaggcctccaaggtttactcaaataccgccatcatcagcagcattacaaacacaaattcccactactttggaggttacaacgaccacattaaacaataaacagagtaaaaatgataaccaactggttaaccaactgaataaagctcaaggtgaagcaagcatgcttcgtgataaaataaactttttgaacattgaaagggaaaaggaaaagaatattcaagccgtcaaagttaatgaattgcaagtcaagcatcttcaagagttggctaaattaaaacaagaattacagaaactggaagatgagaagaagttcttacagatggaagcgagaggaaaatcgaaaagggaagttattacgaatgtaaaaccaccgtcaacaacattatcaacaaatacaaacactataacgccagattcgtcctcagttgcaatcgaagcaaaacctcaatcaccacaatcaaaaaaacgtaagataagtgataatttactgaaaaaaaatatggttcccctaaacccaaataggattattcccgatgagacgagtttatttctagagtcaatattacttcatcaaataataggcgctgacctgagcacaatagaaatattaaatagattgaagcttgactacatcacagagtttaaatttaagaatttcgtcattgctaaaggagcccccatagggaagtccatagtttctctacttttgcgatgtaaaaagacgttgaccctcgacaggttcatagatactttgctagaggatatagctgttttgatcaaggaaatatcagttcatccaaatgaatcgaaattagctgtcccatttctcgttgcattgatg

SEQ ID NO: 79768 - DNA, 78 bp, Saccharomyces pastorianus
atgagatatttgaagcatgtctccagaagatttaagaacggtttccaaaccggttctgctaaggctacttctgcttaa

SEQ ID NO: 79769 - DNA, 1143 bp, Saccharomyces pastorianus
atgatgataataatatttatagaattgtgtagaattgcagattcccttttatggattcctaaatcctcgaggagaacttctagtatatctacatacctaatattattgccttataaaaaatggaatcccaacaattacatcaaaatccacattctcttcagattccaattaattgtcctagaagccgacgggattatgattaaaccgttcattgtacaaacgataaatttagcggtcggacaaagatatacaattttggtcaaactaaagtctgacactagttttgttcgtatgattaatggctgtaacaaaatgatgggttatataacaaaacagcggtggctttacaaagaaggcgctcatttggacctaccaaagaaccccaatgacgtttcgatcgaacacttgcctggtttcactaaggccgagctttatcgtgtcatagaaccaacgcaagaagagaataaaaggttacgcacaaaggctgatcctgttgcggtttttgaattcgattatgcttattacaaagatgaaagcacgaaacaaaagtatgggactgggatgtataaggtgaacgaacggacattcagcgagtacgtaaaagacccggtaaggttcggattcaacgaaacatatgatattgtaatcaactcactggaccacatgagacacccatggcatatgcatggccatcacttccagataatatctcttggcaataaaggtgatggcccatttcacaaagacgtacaagagggcaaggcatggagccgctatcagaacgatttacgtcacctggcccgaaccggaaaggcaccgatggtaagggatagcattaacattgcaggaaattcttacgcggttttgagaattaacaccgagatgcccggaaaatggcttttacattgtcatgtggagtggcacatgatgaaggggcttggcattgtctttgaggttccgacaacaaccgaggacagtaccaaacaagcaactacagctgtattatcgtaccctaccaaggaacctgaccttaacactgttgtccatacagccgcacttgaacaaaataaatccaaggtaatagccgtctacatcctaatcatgtgtgcggttgatgctatcttctactggttgctcatgtaa

SEQ ID NO: 79770 - DNA, 474 bp, Saccharomyces pastorianus
atggagccaccattgaacaaatctgtgcaaaaaattaggggaaaaaatgctggctcgcaggcaaaggatcattcaaaagatcacttaaaagaacataagcaggataaaaatacagcaattggaaatggctccttctttagaaaattctcaaaatcttcggacaaaacaatggaattatatgccaagatttctgcaaaacaattgtttaatggtttagagaagctgttgcgtggttggactcagtatggtttaaaaaatataaaatcgcaccccaacaatctgaccttaacgggtaaactatcgagcgataatatattctcactacgttcaacactctttgaggttaatatttatccgagaggtaagatgagcgttgtgcagttcaagaaagtttctggttcattcaaagctgtcaaaaagttggtcaatgaagttgaaaacgtcctgaataaggaaggcgttctacaaaaatag

SEQ ID NO: 79771 - DNA, 2913 bp, Saccharomyces pastorianus
atggcaatcaatggtaatagtattcctgccataaaggataataccatcggtccatggaaactaggtgaaactctcggtctagggagcactggtaaagtccagcttgctcgtaatggatccacaggacaagaggcggcagttaaggtaatatcaaaagcagtattcaataccggtaatgtcagcggtacttcgattgttggctccaccaccccagatgctctaccatatggtatagaacgcgaaataatcattatgaagttgttaaaccacccaaatgtgttacgtttatatgatgtctgggaaacaaatacagatttataccttgttttagaatacgcggagaagggtgagttgttcaacttattggttgagagaggtcctctgccagagcatgaagctatcaggttttttagacaaattattattggtgtgtcgtactgtcatgcgttgggtattgtccatcgtgatctaaaaccggaaaatctattattagatcataaatataacatcaagattgcagattttggtatggctgctttagaaactgaaggaaagctactggagacgtcgtgcggatcaccacattatgctgcaccggaaattgtatctggtataccgtatcaaggtttcgcaagtgatgtgtggtcatgcggtgtgatcctattcgcccttcttactggtcggttaccctttgacgaggaagatggaaatataagaacactattacttaaagttcaaaaaggtgagttcgaaatgccttctgatgatgaaatttcgcgtgaagctcaggatttgattagaaaaatcttaaccgttgatcctgaaagaagaatcaagaccagagatatactcaaacatccgctattacaaaaatatccaagtataagagattctaaaagtattagaggcttaccaagagaagacacatatctcacgccattatcagaaagtaattcttctattgacgctacgattttgcaaaatttagtaatattatggcatggaagagatcctgaaggaattaaggaaaaactaagagaacctggcgctaatgcagaaaagacattatatgcactactgtatagatttaagtgtgacactcaaaaggagcttattaagcaacagcaaatcaagaagaggcagtcaattagtagcgtttctgtttccccatctaaaaaagtatcgacaactccacaacgcagaagaaatagagaatctttaattagtgtaacatcatctcgtaaaaagccaatatccttcaacaaattcactgcctccagtgcctcctccagcaatctaactacacccggttcttcaaaacgtctttcaaaaaacttctcttcaaagaagaaattatctacagtcgttaaccaatcttctccaacaccagcatcacgtaataaaagagcttcggttataaatgtagaaaagaatcaaaaaagagcctctatcttttctactaccaagaagaacaaaagatcttctagatctatcaagagaatgtcattgataccaagcatgaaacgtgaatcggtgacaacaaaattaatgtcaacatatgcgaaattggcagaggatgatgattgggaatacattgagaaggaaacaaagagaacgagctcaaattttgcaactttgatagatgaaatttttgagtacgaaaagtatgaacaaataaggaaagagaaggaagagctagaacgtaaagtgagagaagcaaaagcacgtgaagagctggaacgtagaagacgtaaacaagaagaaaaagaacgtgcaagaaaattactagaaaaggaagatctgaaaagaaaacaggaggaactcaagaagcaaattgaaattgatataagtgatctagagcaagagctgtccaagcacaaagaggaaaacctggatggtaatattagatctatctctgctcctatggaaaatgaagagaaaaatatcaatcatttggaggttgatattgacaatattctccgtcgccgtaacttttctttacaaactagacctgtgtcaaggcttgatccgggtataatgttctccagtccaactgaggaagtaagtccagtggaaccaaagagaacagaaaatgaaagacttacaacagaaaagaaaattttagaaaccatcagaagatcaaaattcttgggttcatcatttaatatcgataaagagttgaaattgtctaaaatggaatatccaagtataattgcaccacaaagattgtcagaggagcgagttgtgtcagattctaacgatggatatgaatctttgatcctcccgaaggatgggaatggcgtatctcaattaaaggatagtaccacaacaactgctcccgtctctgatggtaggttgaggaagatctctgaaattagagtaccacaatttactagaaaatcaaggcattttagtgagtccaataaaaggctatctgtcctgtcgatgtactctaccaaggagtcgtttaccaacttggttgatattttgaaaaacggtaaccttgatgtcaataaccaacaaagccaaagaattccaacaccaagaagtgcggatgattcagaatttctttttgaaactgtcaacgaagaagctgaatatacaggaaatagttcgaacgatgagagattgtacgatgtcggtgattccactatcaaagacaaatccgcgttaaagctgaactttgcagatcgttttaatggatcgaacgaagcgaaacaaactgataacttacatcttccgatccttcctccgcttaatggtgacaatgaattgcgtaaacagaatagccaagagggtgaccaggcacatccaaagattaaatcgatgataccagaatcaggctcttcttcacatactgaaaaggaagaagaaaatgaggaaaaggaagagaaaaagccagaacaacactaa

SEQ ID NO: 79772 - DNA, 468 bp, Saccharomyces pastorianus
atgagcaagtatcaaagaagcattctttcacgacgtgccacagagaacttcccgtcttcattcaccatgaacaacaagctcatatatcgttcggttagatttgcaacccataacagccagcttttactgccacctttggttctctacagaaggatactaaggcagcataagctgctacctggtccccaaagggagatgggtgaccaatacgtgcgaaacgagttcaagttgcacaaagatatcgataacccgttgcatatagtcggctttttagcttcctggcaagattatctccacatgatttccaacggtaaatggaaagatgccactttatcttcggaaaccctggagaaactatcccctgagcaaacagttcaactgtatgaattgatgaaggaaacacagaaacttcaccaagacaatgaaatagaatcaagtaaggacgtgaaacggaacaacaaggattag

SEQ ID NO: 79773 - DNA, 276 bp, Saccharomyces pastorianus
atgagtacaaaatatccgacaacgatgagttgccgagaggcatttgatcaattgacgagttgctattcgattggagggcaatttagaagctattacagatatggagattttacatcatgtgacaagcaggtgtccaaattcaagttttgtattatccacggcaatgaccctgtgaaagtgcaggaatggtataaagatcaggtttccgacaataaggcattggaaaataccagtggggttatatggcaggagagggagaccactgcaaataagtga

SEQ ID NO: 79774 - DNA, 282 bp, Saccharomyces pastorianus
atgataataacaattaaattcgagtcgaaggaaaaattggtctccatgaaacaatatataacagtagttggagtgtccgttaatcaagagggcaccttttcttggcgtcctgggactttttatatgaaaattcatgaagaaagtgcggcgggcccctttgcgaagggggccgaaatatcggatcttagtaatagttctgctattggatgtggtattagcataaatcaagagggaggcgatggttctattagggtaaaagagagcagcttgaggaagaaatag

SEQ ID NO: 79775 - DNA, 1839 bp, Saccharomyces pastorianus
atgatcgataaaaggctttcatctttagaagagcacataaaatctttacaccagaaaatggacttgataatcaccacagcaaagatgtcttataacagcgatatcaaaggccctggagatgatattcagaacgtggatttcagctcaaataagacgtacgatagtcgtctaacttcgggctcagagacgataaggaaaacaggggaatatagaaaagaaaatcttttcttaaatggatttaagttgaaggaatctcctttaaaattgctacatgatattgatgagaggctatttccatcgaaggctacatctaaagctgcgaagctagctggacagcaaaggccatatgctgttgcaagagtgaactttctccatttttatgagaataatcaggaattatgccataagcttgcaaaagaatttctggtgagatcccatttctggataattccaggtgggagaaaagagatagacgtggaatatgcccactcacacctatttattacaagtgtttttactattatcgctatgagttttgctgacaacgataaatacgctgcagaacaagaaatattgtatcctttagtggagagattactcactaatacgttaaccatgtttgaaaagttaacagcgtttgatattgaggctattttatattgctgtatgttccatatttcgcgaaaggcaaagagatataggcaactgaagtttaattctctggtactaagcaattttgcgctcaatagcttgttacatgtaatagatttttatcagataaaggatagggttttggtaaaagaagtgtataatcccgaagatctttatcatctaagaatactaaattcactaactgcctgctatttagaatattccattagttacggcgatattagggaacaggatgatatgcttaaagagtttaataaacttgtggcgaaatttcctcaggcgaattttggtgatgacattaaaatcagtgagataaatttaggtgacatcgtaaatggcatctttataaaccttaaaaattattttgcgcagtgtttggatgactttaacaatgacagatatggaggtaacgcagatacttttatctttgtttttccagagctaaattattggctgaaaaattgggaagagcttttagcaaaggatggcgcgggcgtgctattgttcacatttgatttttatcatatcatgatatgtcgcacttttatcacagaattttcttccacgctaaaaagcaaccaaaggtttttgaaactaattcttaatacgatgaaagaacattcattttcgctgttgaatgggtttttgagactaccgccaacgttaataaggggtgctccgatttttacttgtcatcaactagtctacgcctgtttaactctttgtgactatctttattggttcgattcttctgaacgtcaacgcgttttgagtctttgtacaaaagtgtactggcatttgagcactataggggaaaaaatgaatgaggctactgataacgttggaaaaatcataaaatctataattgacactagtaagactcgtattaattttggcagtttgtcaaaagagaatagtgataatgataaaatgtcgactaatgctaataactacacaggagcaggaaatctgcacgccgcgaaacccgctacttcgcctactaatgttggtactttgcacgagaacttgtccagtagtcacttcatgattcctgacgtcgaccaattcaattcctttgaagacttttttcaggatttttttgatagtttaaaaccaaattcccaaaaaatgtttaccagcgataagaagactgaacaaactacttaa

SEQ ID NO: 79776 - DNA, 96 bp, Saccharomyces pastorianus
atgactgctggatataattctgcttctggaaaggtgcaaaatagtatcagatccataataaaccaaccagaggatagtgcaagagccaaagagcgc

SEQ ID NO: 79777 - DNA, 219 bp, Saccharomyces pastorianus
gcgctctttggctcttgcactatcctctggttggtttattatggatctgatactattttgcacctttccagaagcagaattatatccagcagtcatcggaaaccatctggtctggggcttactgaggcatttgagtttatatccatttttttccctgatgttcagcaaaccgaaagaaatataaaatacaactgggaaagatgttttaatggtgagtaa

SEQ ID NO: 79778 - DNA, 126 bp, Saccharomyces pastorianus
atgaaaggttcaaaatcgcaccttgtcttcactctcctgcaagtatcacaactaaatgtttttcttttctttctaggttttttgtgccatatcttaggactgttcgtttcactgcgctcttggctc

SEQ ID NO: 79779 - DNA, 654 bp, Saccharomyces pastorianus
atgaccattaaggacgtttcagaaatcaaactagctaaactttcctctgtgaacagttctctagagttcatcgagaatcaattttcaagcttggaactaccacttttggcaaaagttcaaggaacgttggggttaatagataataaaaatctgaaaaagctaaacttttcgaatgtcaccgatattcaagggggtctaatgattgctaacaatacagagcttgccaaaattgatttcttccccaagttgaggcaaattggcggtgcaatatattttgaaggtagctttgataaaattgacctcccagagctaaagttagtaaaaggtagcgcttatatcaaaagttcatctgaggaattaaactgtgaagaatttacatcaccaaaagccggtcgttcgatcataagaggcggtaaaatcgaatgcacatctggtatgaaaagtaaaatgctgaatgttgatgaagaggggaatgtactaggaaagcaggaaactgacaatgataatggaaagaaagaaaaaggaaaaaatggtgcaaaaagtcaaggaagttcaaagaagatggaaaacagtgctccgaagaacatttttattgatgctttcaaaatgtcagtttatgcagttttcacggtattgttctcgataattttttag

SEQ ID NO: 79780 - DNA, 276 bp, Saccharomyces pastorianus
atgccaatttggaaaacacaaacattcttcactagtatttctgttattcaaatagtcaataaagaaaccaaagtttctacaaaaaaagaaaagaatagcatgttgaaccagttgaacacaatcttaagatttttattcttgtttctgcagttaattaaatcatccgctgcagttgaacctaatggtggaccgaatattctagatcacaacattatgttggttaacactaatgcaacgatccctaaaaaggaacaaactgatttagaggtgattctc

SEQ ID NO: 79781 - DNA, 378 bp, Saccharomyces pastorianus
atgtttttcaatagcttggcaatcagtttgggatctaaagagttatacagatcctcacgttcttgcacgatttgttcatcactcattccctgcagaactttaatattttcattatggatagattttgcctccgatagtggggcgtctgtactcgtttgttgcttttcagcatccttgccactagtttttttcttttgggctcttttttctcttagtctttccttccaagatgatattttcttgggtttgtacaactcgggaaatcccgttccacagttgttggtactaagagtgccattgtcattactttcaacggagtcagatgtatctttctccacgatatcgcccagtaagtccattacgatggtggcagagtga

SEQ ID NO: 79782 - DNA, 1137 bp, Saccharomyces pastorianus
atgaaattgtcttccgcttttgtattatctgctatcaccgttgccgctttaggcgaaagtattactactacgataactgctaccaaaaatgggcatgtttacaccaagactgtcactcaagatgctacttttgtctgggcaggagaaggcgctgcggtaacctccgcagtaactgaagcgtctactgtcgctgcaacgtctgttgccgctgaaacatctgttgccgctgaaacatctgttgttgagccttccacttctgctcagggcacctctgctgatgaagggtctggttcgagtataaccaccactattacagctaccaaaaatggacatgtctacacaaagaccgtcacccaggacgctacttttgtatggactggtgagggtgaacgtgctcctgcctccaccgttgcaacttctagtatttctgctattgaaattccctccaccactgaggcctctattgtggagacttcctctgctgttgagacttcctctgctgttgagacttcttcttcttcctctacagcagaggcttctagtgctgaagcttctaccgcggagacttcctctgctgttcatggtgcttcttctactaccactgctactgctaaggatcttgctacagaggcctcctctactatcgagaccacttctgttaaaagcttatctcccactcagacttctctttcatcttctgtccaggcttcttctcctattgagacttcttctgctgcaaaaacctcttctgttgtgcgaactttttcttctactactactgaaaatttctctaattctaaattcacgtttgcagttgttgcatctactaccacctcctctgagtcaagcgctactatcgttacccctactagaactgggcaagcttacacagagagttcttctagggatgcccaatctgttcgtacccatgaaagtaacaattggtcatcaagttcttctgcaagcacaaaaatggtatcctctattacaagagttcaaaccactaccgctggtattttcactaacggtaagtcgtccacaactcctcaaatcgtgaattacacgggtgcggctgattctatcgccgctggtacgggtctgatgggcgctgcgctcgctgctgttatctttttgtaa

SEQ ID NO: 79783 - DNA, 105 bp, Saccharomyces pastorianus
atgttggtatcgtgtttaaatgatggacgcatctacgtcaccttaagtgcgtttttgcctgtgagatttttatttcattgtgtccacttgctattgtctggttga

SEQ ID NO: 79784 - DNA, 1080 bp, Saccharomyces pastorianus
atgtttcagacggtggcaagtacttacaaacgtacggaatgtggattcttcaaactccagataaaaaaatggactaattggtcaattgctagaggtatggttgtagatgacaagcatatcactggtctggtaattaaaccacaacatattagacaaattgctgactcttgggcagcaattggaaaagcaaatgaaattcctttcgcgttatgttttggcgttcccccagcagctattttagttagttccatgccaattcctgaaggtgtttctgaatcggattatgttggcgcaatcttgggtgagtcggttccagtagtaaaatgtgagaccaacgatttaatggttcctgcaacgagtgagatggtatttgagggtactttgtccttaacagatacacatctggaaggcccatttggtgagatgcatggatatgttttcaaaagccaaggtcatccttgtccattgtacactgtcaaggctatgagttacagagacaatgctattctacctgtttcgaaccccggtctttgtacggatgagacacataccttgattggttcactagtggctactgaggccaaggagctggctattgaatctggcttgccaattctggatgcctttatgccttatgaggctcaggctctttggcttatcttaaaggtggatttgaaagggctgcaagcattgaagacaacgcctgaagaattttgtaagaaggtaggtgatatttactttaggacaaaagttggttttatagtccatgaaataattttggtggcagatgatatcgacatatttaacttcaaagaagtcatctgggcctacgttacaagacatacacctgttgcagatcagatggcttttgatgatgtcacttcttttcctttggctccctttgtttcgcagtcatccagaagtaagactatgaaaggtggaaagtgcgttactaattgcatatttagacagcaatacgagcgcagttttgactacataacttgtaattttgaaaagggatatccaaaaggattagttgacaaagtaaatgaaaattggaaaaggtacggatataaataa

SEQ ID NO: 79785 - DNA, 510 bp, Saccharomyces pastorianus
atgaggaagctaaatccagctttagaatttagagactttatccaggtcttaaaagatgaagatgacttaatcgaaattaccgaagagattgatccaaatctcgaagtaggtgcaattatgaggaaggcctatgaatcccacttaccagccccgttatttaaaaatctcaaaggtgcttcgaaggatcttttcagcattttaggttgcccagccggtttaagaagtaaggagaaaggagatcatggtagaattgcccatcatctggggctcgacccaaaaacaactatcaaggaaatcatagattatttgctggagtgtaaggagaaggaacctctccccccaatcactgttcctgtgtcatctgcaccttgtaaaacacatatactttctgaagaaaaaatacatctacaaagcctgccaacaccatatctatatgtttcagacggtggcaagtacttacaaacgtacggaatgtggattcttcaaactccagataaaaaaatggactaa

SEQ ID NO: 79786 - DNA, 219 bp, Saccharomyces pastorianus
atggcgcgtcagacagacaaacttctcccaaaatgtattaccccgccgaataagaaaacagacccattcaccaacgacgtatcaagttacttcacccacacccacacacacacaccatgctcaccttcacttgtatacacttatgttaatactacagaaaaatcaccatcaaaatcacctaaacataaaaatattctacctttcaacttcacgaaataa

SEQ ID NO: 79787 - DNA, 192 bp, Saccharomyces pastorianus
atggcaccaaccttgaaggcagccgcagttaagggcggtaaagatcctcacgaactgcttaacattgaggtgcttttcagtcctgagattcgtgacaacaaagaattcgttgcacaattgacccactccctagaaacagtttacgataaagggccaattgccgctattaaggaaattttagaccaagtgtga

SEQ ID NO: 79788 - DNA, 582 bp, Saccharomyces pastorianus
atggtcgtagacaaaattggccgtcgtaaatgtctactatttggtgcagctgggatgatggcttgtatggtcatatttgcaagtatcggggtgaaatgtctttaccctcatggccaggatggtccatcctcgaaaggtgcaggtaatgccatgattgtgttcacttgcttctatatattctgctttgcaacgacatgggcacctgttgcttatattgtggttgccgagtcgttcccttcgaaagtcaagtctagagccatgtcgatttcgactgcatgcaactggttatggcaatttttgatcggttttttcacaccattcattactgggtctatccacttctattatggttatgttttcgtaggttgtttggttgcaatgtttctgtacgttttcttctttttaccagaaacgattggtctatctttggaggaaatccaattactatacgaagaaggtataaaaccatggaaatctgcatcttgggtcccaccttctaggagaggtatttcttccgaagaaagtaagaccgagaagaaggattggaagaaatttttgaagttctcaaagaattctgattga

SEQ ID NO: 79789 - DNA, 843 bp, Saccharomyces pastorianus
atgtctagtgcgcaatcctctattgataccgatggagatattcgagatgctgatattcatgtcgcaccacctgtgggaaaggagtggtcagatggatttgatgacaacgaagttataaacggggataacgttgagccaccaaaaagagggctcataggttatcttgtcatttacttactgtgttatccaatatcctttgggggtttcctgcctggttgggatagtggtatcacagcaggtttcattaacatggacaactttaaaatgaacttcggttcttacaagcatagcactggtgaatattatttgagcaacgtgcgtatgggtcttcttgtggctatgttcagtattggatgtgccataggtggtcttattttcgcccgtcttgctgatactttaggtagaaggctggcaattgtgatcgtggtgttggtatatatggttggtgcaattattcagatcagttcgaatcacaaatggtaccaatacttcgttggtaagattatctatggtcttggtgctggtggctgttcggtgttgtgtccaatgcttttgtctgagatagctcccacagatttgagaggtggtcttgtctcattgtaccaactgaacatgaccttcggtattttcttgggttattgtagcgtttatggtacgagaaaatacgataacactgcacaatggagagtgcccctcgggctttgctttttatgggctttgattatcatcattggtatgttattggttccagagtccccaagatatctgattgaatgtgagagacacgaagaggcccgtgtttccattgccaaaatcaacaaggtttcaccagaggatccatag

SEQ ID NO: 79790 - DNA, 102 bp, Saccharomyces pastorianus
atgcaaacgggaactataactttctgctggacgttccatttccccatccccttacaacgcatagtaaaccaaaagcagccaccgcctcaatcctacgtttaa

SEQ ID NO: 79791 - DNA, 465 bp, Saccharomyces pastorianus
atggccttcaccacaattcgatcgttaaccattttttccggttcttcgtttgacatgcctacgttcttcgtgcttgcaaaaggtggagatgagtctggagtctttttcattagtctgcactcatctattttatatgcccgttttccgcttttaaatctcttgtcgcaacactctccagtatattgttcgcgaaggtttccgcctgataacgatttaataaccggattgggaaatatacgatgcggtcaattggtgaaaaaggccttacgcagagtatgcaatgtaccgcctgatcatcagctgatcgcttcagtgcgatcgattggatatgctagagtagcattcgtgttttgtacgtgtacgcctgaatgtcgggataatttgcagagtgtgacaagaacttcaggccatcaaacaacaattagtcaaccatgcacagatatacagtcaacaccgaagtgctag

SEQ ID NO: 79792 - DNA, 2754 bp, Saccharomyces pastorianus
atgaatgccaagagatacacagtggacaaagtcttcggtcccggcgcttcccaggatctaatttttgatgaagtggcgggcccattattccaggatttcattaaaggttataattgcaccgtactggtatatggtatgacgtcaacaggtaaaacatatacaatgacgggcgacgaaaagttatataatggtgaattgagcgatgcagcaggaattataccgagggttcttttgaagttgtttgacacattggaactacaacagaacgattacgtagtaaaatgttcgttcattgaactctacaacgaagaattgaaggacctcttggacagcaatagcaacggctctagtaatactggctttgacggccaatttatgaaaaaattgaggatttttgattcaagcacagcaaataataccactagcaacagtgctagtagttccaggagtaattctaggaacagttctccgaggtcattaaatgatctaacacctaaagctgctctattaagaaaaaggttaaggacaaaatcactgccgaataccatcaagcaacagtatcaacaacaacaagcagtgaattccaggaacaactcttcctctaactctggctctaccactaataatgcttctagtaacaccaacacaaataacggtcaaagaagttcgatggctccaaatgaccaaactaatggtatatacatccagaatttgcaagaatttcacataacaaatgctatggaggggctaaacctattacaaaaaggcttaaagcataggcaagtagcgtccactaaaatgaacgatttttccagtagatctcataccatttttacaatcactttgtataagaagcatcaggatgaactatttagaatttccaaaatgaatcttgtggatttagctggttcagaaaacatcaacagatccggagcattaaatcaacgtgccaaagaagctggttcaatcaaccaaagtctattgacgctgggcagggtcataaacgcactcgtagataaaagcggccatatacctttccgtgaatccaaattgacccgcctgcttcaagattccctgggtggtaatacgaaaaccgcactaattgctactatatcgcctgcaaaggtaacttctgaagaaacctgcagtacattagagtatgcttcgaaggctaaaaacattaagaacaagccgcaactgggttcatttataatgaaggatattttggttaaaaatataactatggaattagcaaagattaaatccgatttactctctacaaagtccaaagaaggaatatatatgagccaagatcactacaaaaatttgaacagtgatttagaaagttataaaaatgaagttcaagaatgtaaaagagaaattgaaagtttgacatcgaaaaatgcattgctagtaaaagataaattgaagtcaaaagaaactattcaatctcaaaattgccaaatagaatcattgaaaactaccatagatcatttaagggcacaactagataaacagcataaaactgaaattgaaatatctgattttaataacaaactacagaagttgactgaggtaatgcaaatggccctacatgattacaaaaaaagagaacttgaccttaatcaaaagtttgaaatgcatattactaaagaaattaaaaaattgaaatctacactgtttttacaattaaacactatgcaacaggaaagtattcttcaagagactaatatccaaccaaatcttgatgtgatcaaaaatgaagtactgactcttatgagaaccatgcaagaaaaagctgaactaatgtacaaagactgtgtgaagaaaattttaaacgaatctccaaaattcttcaatattgttattgagaaaatcgacgtaataagagtagatttccaaaaattttataaaaatatagccgagaatctttctgatattagcgaagaaaataacaacatgaaacagtacttaaaaaaccattttttcaagaataaccatcaagaattactgaatcgtcatgtggattctacttatgaaaatattgagaagagaacaaacgagtttgttgagaactttaaaaaggtcctaaatgaccaccttgacgaaaataaaaaactaataatgcagaatctgacaactgcaaccagcgcggttattgatcaagaaatggatctgtttgaacccaagcgcgttaaatgggaaaattcatttgatctgataaatgattgtgactccatgaataacgaattctataatagcatggcagcgacgctatcgcaaatcaagagtactgttgatacatcatcaaattcgatgaatgagtctatttcagtcatgaaaggacaagtggaagaatcggagaacgctatatcccttttgaagaacaataccaaatttaatgatcaatttgagcagcttattaacaagcataacatgttgaaagataacattaaaaattcgataacatcaacacactctcatataactaatgtggatgatatctataatacgattgaaaacataatgaaaaactatggtaacaaggaaaacgctaccaaagacgaaatgatcgagaacatattgaaggaaataccaaatctaagtaagaaaatgccgttaaggttatcaaacataaatagcaattcagtgcaaagtgtaatatcgcccaaaaagcatgcaattgaagatgaaaacaaatccagtgaaaatgtggacaatgagggctcgagaaaaatgttaaagattgaatag

SEQ ID NO: 79793 - DNA, 240 bp, Saccharomyces pastorianus
atgccagcggaaaaccaaaatacgggtcaagatagaagctccaatagcatcagtaaaaatggcaactctcaggttggatgtcacactgttcctaatgaggaactgaacatcactgtagctgtgcgatgcagaggaaggaatgaaagggaaattagtatgaaaagctccgttgtggtaaatgtccagatattacaggttctaaagaaatttccattaacacgacgggagatactggtataa

SEQ ID NO: 79794 - DNA, 165 bp, Saccharomyces pastorianus
atgagtggcatatacactcttctgcagaggattttcgtacacaacggtgtgtgtgctgtgaagctgtctgcttccttacttggctgtttgcttgcttgtgcgtcatggtcacttttgttagaagtgagccgcataaaatggcatgtcggcacagcctacagttaa

SEQ ID NO: 79795 - DNA, 324 bp, Saccharomyces pastorianus
atgagtctttctttccttctcttttccccttttctccccccctgtttctcgtccatctctatctgtctatctgtcttatctactgttagtttttttttcgctttcacgataccgcattacgtactgcggtgcggaagtgtggatgagtggcatatacactcttctgcagaggattttcgtacacaacggtgtgtgtgctgtgaagctgtctgcttccttacttggctgtttgcttgcttgtgcgtcatggtcacttttgttagaagtgagccgcataaaatggcatgtcggcacagcctacagttaaaaattaagcatatctga

SEQ ID NO: 79796 - DNA, 105 bp, Saccharomyces pastorianus
atgtgtccttctcgtctatcttgttctgtctggtatagagtaatacttacatacatatacgtacattgtttccgctggctagttcgtaaccacctcctttcctag

SEQ ID NO: 79797 - DNA, 309 bp, Saccharomyces pastorianus
atgaagtataataacagaaaactctcgttcaaccctaccacagtaagtatcgctggaacgttgcttacggtgttctttctcacaagactcgtgctttcgttcttctcgatatcgctattccagctggtaactttccaaggaatcttcaagccctatgttccagattttaaaaatactcccagcgtagagttctacgacctacgaaattaccaaggcaacaaagatggttggcaacagggtgaccgcatcttgttttgcgtgccactgagagatgcttctgagcatcttcccatgtttttaaccatctga

SEQ ID NO: 79798 - DNA, 1185 bp, Saccharomyces pastorianus
  modified_base (956)..(956): a, c, g, t, unknown, or other
atgttttttaaccatctgaataccatgagatatccgcacaacctgattgatctgtcgtttttggtgagtgactcttcggataacaccatgggcgtgttactatccaatctacagatggcgcaatcgcaacaagacaagtccaaaaggtttggtaacatcgaaatctatgagaaggacttcggccaaatcattggtcagtccttttctgatcgtcacgggtttggcgcccagggccccagaagaaagctgatggccagggctcgtaattggcttgggtccgtggccctgaaaccataccactcctgggtttactggagagacgtggatgtcgaaaccatccccactaccatcatggaggatctaatgcatcatgacaaggacgtcattgtccccaacgtctggagacctttaccagactggctgggaaacattcaaccctacgatttaaattcatggaaggaatcagaagggggtcttcaattggcggattccctagacgaagatgctgtcattgtggaagggtacccagagtacgccacttggagacctcacctggcatacatgagagatccaaacggtaatccagaagacgaaatggaattggacggtattggaggggtctcgattctcgcgaaagctaaagtgttcagaacaggctcacactttcctgcattctcctttgaaaagcacgcagagacagaagcattcggtagactctcccgcaggatgaattacaatgtcatcggcttgccccattatgtcatctggcacatctacgaaccttccagtgacgacttaaagcacatggcttggatggctgaagaggagaagcggaaactagaagaagagagaattcgcgaattttacaacaagatctgggagattggatttgaagatgtcagagaccaatggaacgaagaaagagattcaatattaaaaaacattggctccacttncgacaataaagtcactgtagactggtctgaagaaggagatggctcggaactggtggactcaaagggtgacttcgtctctccaaacaaccagcaacagcaacagcaacaacagcagcaaaagaaacaacaagacagcaacccgcaggggaaacttcatgacggcaacgataagaacaagaaaatgcttcctaaagaggttccattggacttcgaccctgatagaaactag

SEQ ID NO: 79799 - DNA, 1713 bp, Saccharomyces pastorianus
atgtctcagtctaaaattgatgatctaaaccgtgatgatgttgaatctgaattaacctttaatgggtttttgattttccattgtcctctgaaggatgacgctattgaaaccattaaaatgttaaatgaatcctcccatcgttctattatgattactggtgataatccattaactgctgttcatgtggctaaagaagttggcatagtttttggcgaaactttaatcttagacagagcaggtaaatctgacgacaatcagttgctgttccgtgatgttgaagagacagtttccatcccatttgatccatcaaaagacacttttgatcattctaaattatttgatagatatgatattgctgttactggatatgctttgaatgccttggaagggcattctcaattaagggatctattacgtcacacctgggtttacgcacgtgtttcaccatcccaaaaggagttcttgctgaatacactaaaggatatgggatatcaaactttaatgtgcggtgatggtactaatgatgttggtgctttgaaacaagctcatgttggtattgcattgttgaatggtaccgaagaaggtttgaaaaaattgggtgaacaacgcagattggaaggtatgaaaatgatgtatataaagcaaactgaatttatggctagatggaatcaaccacagccacctgttcctgaaccgattgcacacttattcccacctggtccaaaaaatcctcattatctgaaagctttagaaagcaaaggtaccgtcattacgccagaaatcagaaaagcagttgaagaagcaaattccaaacctgttgaagtcatcaaaccaaatggactatcggaaaaaaaacctgctgacttagcttctttgttgttgaactctgctggtgatgcccaaggtgatgaagcaccagctctaaagttaggagatgcatcttgcgctgccccttttacctcgaaactggccaatgtttctgctgttactaacattatacgtcaaggccgttgtgctttagttaacacaattcaaatgtacaaaatcttggccttgaattgtttaatcagtgcctactctttgtccatcatttacatggctggtgtcaaatttggtgatggtcaagccactgtctccggtttgttactatcggtttgtttcttgagtatttcccgtggtaaacctttagaaaaactatccaagcaaaggccacagtccggaattttcaatgtttacattatgggatctattttgtctcaatttgccgttcatattgccactttagtttacatcactacagagatttataaattggaacccagagagccacaagttgatcttgaaaaggaatttgctccatcattattgaatacgggtattttcatcattcagttggtacaacaagtctctacatttgctgtcaattatcaaggtgagccattcagagaaaacattaggagtaacaaaggtatgtattatggtttattgggtgtgacaggtttggcacttgcaagtgctactgaatttttacctgagctaaacgaagccatgaagtttgtgccaatgactgatgactttaagattaagttgaccctaacattattgctcgatttctttggtagttggggtgtcgagcattttttcaagtttttcttcatggacgacaaaccatcagacatttctgtgcaacaggtcaagattggctctaaatga

SEQ ID NO: 79800 - DNA, 1599 bp, Saccharomyces pastorianus
  modified_base (1583)..(1583): a, c, g, t, unknown, or other
atgacaaagaaatcatttgtgagcagtcctattgttagggactcgacattgctggtaccaaagtcattaatagcaaagccgtacgtattaccgtttttcccgttatacgctacctttgcccaactatatttccagcaatatgatcgttacatcaaaggacctgagtggacttttgtctacttggggacattggtatccttgaacatcctagtcatgttaatgcctgcttggaatgtcaagatcaaggcgaaattcaactacagtactactaaaaatgtcaatgaagctactcacattctcatctacaccactccaaataatggttctgatggtatcgttgaaattcagagagtaactgaagcgggctctttgcagacttttttccaatttcaaaagaaaagattcttgtggcatgaaaatgagcaggtattttcttcaccaaagttccttgttgatgaatcttcaaagatcggtgatttccaaaaatgtaagggccattccggtgacctaactcatttgaagagactatatggtgagaatagttttgatattcctattccaacatttatggagttattcaaagagcacgctgttgcgccattgtttgttttccaagttttctgtgttgccttatggctattggatgagttctggtattattctttgtttaacttattcatgattatctccatggaggcagctgcagtatttcaaagattaactgccttgaaggaatttagaactatgggtatcaaaccttataccattaacgtgtttagaaacaaaaaatgggtagcattgcaaaccaatgaattgttacctatggatttagtatctataacaagaaccgccgaggagagcgcaattccttgcgatttgatcttgctcgatggctccgctattgttaatgaagcaatgctttcaggtgaatctactcccttgttaaaggaatccattaaattacgtcctagtgaagataatttacaactggacggtgttgacaagattgctgtgttacatggtggtacaaaggcattacaagtaacacctcctgaacataaatcggatatccctgctccacctgatggaggtgccttagccatcgtcaccaaaactggctttgaaacatctcagggttctttagttcgagttatgatttactccgctgaacgtgtttccgtcgataataaggaagcgttgatgttcattcttttcttgttgattttcgctgttattgcatcctggtacgtttgggttgagggtacaaagatgggtagaattcaatccaaattgatcttggactgtatattaattattacatctgttgttcctcctgagttaccaatggaattgaccatggctgtcaacagttctctggctgcccttgccaagttctatgtctattgtactgaaccatttagaattccatttgctggtagaattgatgtttgttgttttgataaaactggtactttgaccggcgaagatcttgtatttgaaggtctagctggtatctctgcggactccgaaacattcgtcacttgtacagcgctgccgaagcaccagaaagcagttcttgtcanttggtgctgctcacgc

SEQ ID NO: 79801 - DNA, 417 bp, Saccharomyces pastorianus
atgccatacctcaaaattcggttacctaataagataatctcactggcggccatcccagatggatttcaaaaccttcaaatatgtccaaatttcaatagtcaaaggttggagggcgtcatacctctatttttactttgcggtactgagggccaaatttatataatatcggaattcattggtgagctgtggatgagaacgttgcatgattacaaaaagatcaagctcgaatgtaaaagagcttttcgaaggtctgagaaaagcatgcgaaatgttactaaacaatattccgtgagtaaagagactggaataaatgaaagcggctttgatgagctagctagaaattcaaagagaagacatatagatcattcaccatacaagaccatagattttttcgatcctgtaaaactaaaaaggtga

SEQ ID NO: 79802 - DNA, 918 bp, Saccharomyces pastorianus
atggcaagacaagatgaaacggactgcaaaaaattggatagcaattcggcctttttacctttatgcataacatcttatagatcaaaagataaggctgagaagctggtaagttgtcttcatcacgaaggaagttactttttatgttttagctatggattgtataccggaacgtccaacgaattgaaagcgaaggttgagttcgctttagatggaccgttcgttgttaactacgcaactgtaccgatgttcatgtcagcttccttctgtcacctgctaatgtttaacgacggttcgattaagggatttaaatgcgaaaataacaaatttgaaactatctacgactctaatgtggctccgaaactggatactatttctttattaacttccagctggttaaatgcctcttttgagggtgttttatacacttgcaataaaaacatatcatatgatagtgatttgcatacgttatgtacgacaatttactcctttgacttcagagaaggaatagtcgaaagattttatgccaccgatggcgaagaaattatctcctttgattttattagcagggaggatttgcttgacgacgccacatgcacaggtaaatcacacgtttattttctttgcctacttaagagttgctatagtgaaaacctgcttttaaaggaatacaatcttgctggaaagcatggaagtaggaaatttgatttaaatgagtaccgccaatacaatcttttgccgatatgtgataatgaattttgttatatgaaggtagtttgcgaccataccattgtagtgttgactaataactacactcaaataataaatatagaagcaagggggcttacaaacggggcttttttcaataataaaggtctcccacatgtagaaaactaccaatttctagaagatccttatgat

SEQ ID NO: 79803 - DNA, 1629 bp, Saccharomyces pastorianus
atggatgagccttatgattacggtctttttgtttctaggacgggaaaagttttgaaagccggtatggatggttctaccggagaatttaggcaggtcgatttcttgcagtcgaaccacaactcttccaccatgttttgttatcccgtacagaactccaagctcaggatttcgatacttgaggcaaaatctggttttctacgtaaaaaagaagaattttttatccatgggctcaattctaaagagagtattgtgagctgtttctcagatggtgccgagaaatatctttttgtcatttacttggacggtgtgttttcggtatggaatgccaatcaaaagaaagtggctacatcacatccagactattctttcatagcctatgatcaattgataaaaatatcttggctgggcaaaaagcataaacacgactcgatttatgtcatcgcatcatcatacactggctgcgtaagagtctacaaatcagaatcaaattttttgagagtggatttagagattcattcgttatacgatcagaaattagaactgttggatacgattccttccttacctttggttttcctttacaacgataaggaaataattttgttaaatcttcaaaacatgtcttatggttgcatacagttaggcttagttccaagacgaatgagaattcgacccggtaaagcactgttctctctttgtgttttagattatgattctcgaataagcatctttgagttcggtagcacgttttaccgtgaaggtttcattaagcagatgacttcattaaaacctcaattagaaaatcatatcttttacctccctagcattcccgtagagctctatactgttccaaataacctcaatcaggccgtggtgtgtttggtcgatagcaatagtaggcagtataagttgatgctattcaattatgcttcaatgaaggcagtttccacattcagtttctcggatgaaaagtatttacatgccgttgtgaagccactgtggccagaacaaaactcaatctacttatcacagagacccttttatggtaataagtttgttgtatgcttaggagttggtgaaaaacgtacaaaattctggctgtttgaaattagaaacaatagcattatccaattgtacgcgaattatctcgaagattgtatattctcggtgttcatatactatgagtgcaacttggttttattttctggtgatagtggcatagcagcatataaaataaacatgctaaaagagggcgcggaaattttagaggcctattccttcccagcactttcatcgattaaccatataggtcttccagcttatatgagtggtgattatctggttcaatttgagatcttgagagattttttgagaacccgctttccaattaggacgtccatagaatatccatcagagtaccctgaatgtccgtacttgggttttaagcggttgggaagcattacacaagtggcgactaaaataattcctaagaagctaagagaacctaaaaacgattgtttagcgagtgataagaactacctattaggtcgattatcagacctttcttgtgcaacgttgaaatattccaatagatcttatgtgccaccattggtattgataataccttga

SEQ ID NO: 79804 - DNA, 111 bp, Saccharomyces pastorianus
  modified_base (4)..(4): a, c, g, t, unknown, or other
atgnaacaaacaccagagtcaaacgacgttgaaattgaggctactgcgccaattgatgacaatacagacgatgataacaaaccgaagttatctgatgtagaaaaggattaa

SEQ ID NO: 79805 - DNA, 1320 bp, Saccharomyces pastorianus
atgtttaacaaaaaagacgtcttcgcacaattaaagcaaaatgacgatatattaccggaaaatagattacagggacacaacagaaggcaaacccaattgcagcaaaataattatcaaaatgatgaattggttattccagatgcaaagaaagattcatggaacaagatttcttcaagaaatgagcaaagcacacaccaatctcagccgcaacaagatgctcaagatgatctggttttggaagatgatgaacatgaatacgatgtcgatgatatcgatgatcccaaatacctaccaataactcagtctttgaatattacacatctaattcactctgcaactaactctccatccataaatgataaaacgaaaggtacagttataaatgataaggatcaggtactagctaaattaggccagatgatcatcagccagtcaagatccaactcaacatccttgccagctgcaaataaacaaacaaccatcagatcaaagaacactaagcagaacattcctatggctacaccagtacaactactagaaatggagagcattacgtccgaatttttcagtattaactcggcagtgctactagaaaattttgctgtaaacgcatcgttcttcttaaagcagaaactaggtggccgtgcacgtttacgtttacaaaattctaatccggaacctttagtagtaatactagcctcagattccaacagatctggtgccaaagctctggcgttgggtagacatctttgccaaacggggcatatccgtgtcataacattatttacatgttctcaaaatgaactacaggattccatggtcaaaaagcaaacagatatttacaagaagtgtggcggaaaaattgttaatagtgtatcgtcgctggaatctgctatggaaacattaaatagccctgtagaaatagtcatcgatgccatgcagggatatgactgtacattgagcgatctggcggggacgtcggaagttattgaaagcagaattaaaagcatgatatcatggtgtaacaaacagcgaggatctactaaagtgtggtctttggatattccaaatgggtttgatgcgggatccggcatgccagatattttcttttcagacaggattgaagcaacaggaattatttgttctggctggcctttgattgccatcaacaacttaattgcaaatttgccaagtctagaagatgctgttttgattgatgtaggtataccacagggcgcctattcacagagaacttctttgcgtaagttccaaaactgtgatcttttcgtcactgacgggtccctgctattagatttgtaa

SEQ ID NO: 79806 - DNA, 549 bp, Saccharomyces pastorianus
atgcagccactactccatcaagccaataataatagtgcaagctctgctacctctacagctccttatccggtgtattctatgaatgtgaatgttccttattacaattcttctgcttctgcatacaagagggcacaagaaaatactacttcaaatacgaatgcagaaccttctggtgctacaagcactaactcaggcaccatgctatcaaatcctgcatacgctaattctcagtacactccatcgcaagtgtattaccagggatacccccaatatgccatggcaagtgctcaaaatccgtctatgtatcaacaccagcaccaacatcctttgcctactgtatatccaatagcgacgcctcaacaaaatataatgagctctggtcacactttgagcactattggatctgatcctcaacatcatcactatcaacaagagcccaacgaccacaaaaacttcgctatgggtcacgcgaacaataatatcttaaacatcaccaataatgatacgatgaacaacctcaatacaaacacttcaactactacacaataa

SEQ ID NO: 79807 - DNA, 366 bp, Saccharomyces pastorianus
  modified_base (156)..(202): a, c, g, t, unknown, or other
atgggaaatacaaccttaggcaacgtgaaaaacaattccactaccaacggtaatggtcctaataatataaacaataaaagcaactcttccactcccctgaatactgttatttccacgaataacaatagtgctaatataaatgctgctggcagtaannnnnnnnnnnnnnnnnnnnnnnnnnnnnnnnnnnnnnnnnnnnnnngctctggatacccaatcactcaatttgctcccgcattaccatcaacaactttgatgtatacggcgaatccaccttatatcactcaatctcctgataacactaacgctactggtatgaatacacatgttagacctgcagcatgcaagctgcactgcgtcgtttac

SEQ ID NO: 79808 - DNA, 519 bp, Saccharomyces pastorianus
atggatatcgagcctactttcaaagggtacattgaagatgaagatgacgctttgcttattcttcaagcaactttggatggcaagttaaagcatataccaagaaggccttatgaaatagaaagaccttatttgatcgtatcaggtagtatattcgtttttattgaagagatatcgggcatcaagagatggactgatggcgtttcttggtctccatcaagaatatcaggcaagtttctaatatacaaggaactagacaaggaaaacgccgggtctaatgctaatgctacttcgagtggtagtactgattccgccgtcattacggatggaacttctggtgcgagaaataacccttcttcgtcgaaaatcaagctacctcctttgaagaatcaccagtttgatttgccacctactatgggccattcaagttttgagtcagagcaagacacctccatttctccatcaaaccgttcgaacttacctttaaagtatactggcctggtgaagaagacatatctgtga

SEQ ID NO: 79809 - DNA, 93 bp, Saccharomyces pastorianus
atgaagtctgaaacaaatcaaagaccttccaagaagagcgccactgtcaaaaaagttgatgaatcatggttgccagaaacctataaaaagtaa

SEQ ID NO: 79810 - DNA, 627 bp, Saccharomyces pastorianus
  modified_base (610)..(610): a, c, g, t, unknown, or other
atgaggttttctatgttaatcgggtttaatttattaactgccttgagcagcttctgtgctgccatatcagctaataatagcgacaatgtcgaacatgaacaggaagttgcggaggcggtagcgccaccttctattaatatagaggtgaaatatgatgtcgttgggaaggaatcagaaaatcatgattctttccttgagttttacgcggaggataccgctaccttagcctataatgttactaattgggaagatactaatatcacaatttttggtgtcaacggaacaattgttacatatccacatggttatcctgtggcggacattacaggtgcgagtattgggccttacgaaatggaggtcaacggaacttcaaaattcgggcaagacgttacgttaaatttaccggaaggacaatactttttaatcccatttttattagcttctaggttcgatgaaatcgtgagaattgcggcaccaccaaccctattcgaaattgttagcccacctatttcctttttcaacccacaatttttatcagttcaggtcatctttctagccatcatcggaggtgtaagttattactacatgaagtctaaaacaaatcaaaganccttggggatcctctag

SEQ ID NO: 79811 - DNA, 1143 bp, Saccharomyces pastorianus
atgggtacccacagcaagatgccttcctacaaccatgagtctaaggaatccctgagagatatcatctccaagaacccctctgccatgttaggtaaggacattattgataagttccacgccacaaatgaattgcccttccttttcaaagttttgtccattgaaaaagtcttgtctattcaagcacatcccgacaaagccttgggtaaaatattgcacgctcaagatcctaagaactatcctgatgataatcacaaacctgaaatggccatcgctgtgactgactttgaaggtttctgcgggttcaaacctttgcaagagattgcagatgaattgaaacgtattcctgaattacgcaacattgttggtgaagaaacttccaggaattttattgagaacattcaaccttctgctcagaaaggttccccagaagatgagcaaaacaaaaagctattgcaagctgttttcagcagggtcatgaacgcttcggatgacaaaatcaagattcaagctcgctccttggtcgaaagatcaaagaattctccatcagactttaacaaacctgatttaccagaattaattcaaagactgaataaacagttccctgatgacgtgggtttgttttgtggatgtttattgttgaatcactgcagattgaatgctggtgaagccatctttttaagagctaaggatcctcacgcctatataagcggtgatattatggaatgtatggctgcttctgacaacgtagttagagcaggcttcactccaaaattcaaggatgttaaaaacttggtctccatgttaacctatacatatgatcctgtggaaaagcaaaaaatgcagcctttaaagttcgacaggtcctctggtaacggtaagtcagttttatataaccctccaatcgaagaatttgctgtattggagactacttttgatgagaaacttggtcaaaggcattttgaaggtgttgatggtccaagtatcttaatcactacaaaaggtaatggttacattaaagcagatggccaaaaattgaaagctgaacccggttttgtctttttcatcgctccacatttgcctgttgatttggaagctgaagatgaggcgtttactacctatagagcctttgtggaaccaaattag

SEQ ID NO: 79812 - DNA, 219 bp, Saccharomyces pastorianus
atgtgccctggcctaacttctgcgggtgccgacctaccacctgctcctggttacgagaaaggtacgattgtagtcatcaatgccgaaaataaagagaatgcattggctattggtgaattgatgatgggtactgaagaaattaaatcagtgaacaaaggtcattccatagaattgattcaccatttgggcgaccccttatggaacttcagcgttgagtaa

SEQ ID NO: 79813 - DNA, 1959 bp, Saccharomyces pastorianus
atgtcatcgcataatccccactctctctttattcttgatggaaatgagcatttttctaatgatatcgaaaacgtagagagccaagataacggattacaagttgaaagtgctaacaagaaacttctatggaacacacttgatgaacttttgaaaactgtatctcttgatgaaatttccctaaatcagttattagaatgtccaataagagagaagaacttgccatggatggaaaaccaattgaatttattattaaaagcatttcaagcaataggcagcgatggaaatgaagtagaatataatctaagagaaatttccggactaaagcagaggctacagttttatgagaaagttaccaagatatttcttaacagaattgtggaggaaatgcagaagaaattctcaaatatacgtggacaagatatctcacacgatcaaatgattagaattttgacgactttattgatattttctcctttaatactgttctgtaaagaaatttcacaaaaatcgtatcaagcaattgtggaaaattggaacgtcagtattcaaccagtatacatggagttatggactaagaaaatatcacaattacaaggcattgacacaaatgatgaaaaaatgaatgagctgagcttaagccagttactaaatgaatgggacacatttagaaaagagagaaaaacaaatgatatcaacccggttttcaagaatagtttttctcttcttaccgagtgccttcaaaccatgaggcaagaatgtattgtttatcaaaattttgtcgaagtgttctttcatatatcttcaaagcataatttcgaagaatacattaaacatttcaatgatccagatgctcctccaatattattagatactgtgaaagtaatgcaatctgatagagaagcagccgttattgaaacccagttggtctcaagaatattccaacctattgtcactaggctgtcctcatattttgtagaattagtgaaagccgaaccaacggtagccccagccttaactttttacttggagaatgaaattaaaagcttagaatcatccaaccatgaatttttattgtctgcagtgactagaatgtacacacaaataaaacaagtgtggtctgataatgtagaagagcaggttttgcacttcgaaagaatttctaacgcaaccaccaatggagaaattcttccaggtatacttgatttaccagtaggcttgaagaattcagaagatttgttccaatttgctaagaggtctatggatattaaagataccgatgaaggctacgagtccatcgaattaatgaattcgagcttcaggaagctaagcatagctgccacacgatcgataactcacaaagaagttaattcaagcattaatccaaacctttcagatactgctgctttaaataatgactatatggaaactatttctctcctagtgaacagtaactggctaactgaaatgctttccatgttaaacttcaataaggatggtatatttgatacgtcattgcaaaacgttaagaaagttttcgatgtggaaaaagaatcttatgcttcctttctactccgcgatactatgcctaaactaacagcctttgtttatggtgtgagcaacatcattgaaaataccaacaatgtgaacatgaccaatccttcaagatgggccgcatatagcaggcagaacctagagaacattcttttagcatacacttcccatgaaattgaaactctagtaaaaaggctgcacactcatatggtaaatgacttcggttaccaccaagaaaatgccataaacaacgtcctatgcgataagttgtggtcgtgcattcaaggtcaaaccgtctcactatacttgaaactatacactgtaattgataaacactatagagggacaaacatacgcttcacgaagaacgatatcataagtgcgttcgaggaatacaagaatgcctaa

SEQ ID NO: 79814 - DNA, 1803 bp, Saccharomyces pastorianus
atgaggtcctcgaagtctccttttaaaaggaagtctcacagtcgtgagacatcacacgatgaaaacacatcgtttttccacaagagaacaatatccggtagcagtgctcaccattctagaaacgtcagtcaaggtgcagtaccctcttccgcaccacctgtttctggtggaaattattcgcataagagaaacgtgtcgagagcttcaaattcctctcaaacttcgaattttttagccgaacaatatgaaagggataggaaagccataattaattgctgcttttccagacccgaccataagacaggtgaaccgccgaataattatattacacatgtccggattatagaagattcaaaattccctagttcaagacctcctccagattcaaaattggagaacaaaaagaaaagactccttattttgagtgccaagcccaacaatgccaagctaatacaaattcataaagcaagagaaaactcagacggctcttttcaaattggtagaacttggcagttgaccgaactagtaagagtagagaaggacctggagatatctgaaggcttcattcttaccatgagtaaaaaatactactgggaaacgaattctgcgaaggaaagaactgttttcattaaatctctaattactctatacattcaaacattcgaaggtcatgtccctgaattggtcaattgggatttatcccttttttatcttgacgagaggagttatcaaagagcagtcatcacaaatcgccccggttccgtatctccaataaagtcacctacaagtaatttcacgacaaacactacccaatcggtgggctctgtccccttttcagcacctactgagaggacaagaaggtctgaaacagaaagcgttaatccagtgtcaacgcctgcaagcgtggaatatcatgcaggaatgaaatctctaaataaggccccctattcttccaattcgacattgaatgaagtgaataaaagatacgagttagagcaacaacagcaacaagaagaggctgaactgagacgattagaagagcaaaaaagacttcagttacaaaaggaaaatgagatgaaaagattagaagaggaaagaagaataaagcaggaggagaggaaaaggcaaatggaattggaacaccaacgacaactcgaagaagaggaacgaaaacgtcaaatggaactggaggctaaaaagcaaatggagttgaaacgtcaacggcaattcgaagaagagcaacgcctaaaaaaagagagagaactattggaaatacagagaaaacaaagagaacaagaaacagctgagagattaaaaaaagaagagcaagaagcgcttgctaaaaaggaggaggaagaaaaaagtaaaagaaacaaagtagacaatgaaagttatactcaagaaataaatggtaaggttgataaccttttggaggacttaaacgcagttttggcggaagaaacagaaaccacccctactatgcaaaatggtacttacgtacccgagagaagtacagctagagctcatgaccaattaaaaaaaccactaaatattgccaaagttgagtcactcggtggaagcgatttgaatgactcgatcagtttgagtgacgagatagcaggtttgaatacatctaacttatcaggagaggaccaagatgagaagaacgatctttcgttcgagaagggagatgaggttaggtatagcaataattttgaaggtgaagctcctcacgtgtaccatgaagtatcaattattcaagaagaagcacctgccgtttcgcagaaattaatccttccggaa

SEQ ID NO: 79815 - DNA, 177 bp, Saccharomyces pastorianus
ggtgacaataatggaatagtacgcactcctgttcaagagactgacatttcaaaattagttacctatatcgaaaagtcaattgaagtggatttacttgtctctgaagatattaagaatggtattcccgccaaacaagctcaaaatgatcgaagatcagtattaaagaaatacatttaa

SEQ ID NO: 79816 - DNA, 1704 bp, Saccharomyces pastorianus
atgactgatggtatgttacagagagaggcgttgttagatcccgagatgtcaaaatattcagttatcatgttagatgaagctcacgaaagaactgtggcaactgatgttttatttgcgttgttaaagaaagcggctattaaaagaccagaattaaaagtaatagttacatcggctactttgaactctgctaaattttctgagtactttttaaattgtccgattatcaatatacctggtaaaacttttcccgtggaagtactctactcacagacgccccaaatggattacatagaggcagctttggattgtgtaatagacatccatattaatgaaggcccaggcgatattttagtctttttgactggacaggaagaaatagactcatgctgtgaaattttatatgatagggtgaaaactttaggtgacagcatcggcgaattactgattttgcccgtttattctgctttgccaagtgaaatccaatcgaaaatttttgaacccactccaaagggcagtcgaaaagtcgtatttgccacaaatattgcggaaacttcaatcactattgatggaatttattatgtcgtggaccctggatttgcaaaaatcaacatttataatgcaagagcaggtatcgagcagttgatagtgtctccaatctctcaggcacaggcaaatcaaagaaaaggtagagctggaagaacaggccctggaaaatgctatcgactttatacagaatccgcattttacaatgaaatgttagaaaacacggttccagaaattcaaaggcagaatctttctcatactattttgatgctaaaggccatgggaattaatgatttattgaaatttgacttcatggatccccctcccaaaaatttaatgcttaacgcactgacagaattataccacctgcagtcactagatgacgagggaaaactaacaaatttaggtaaagagatgtccttatttccaatggatcccactctatcacgctctttattgtcatctgttgataatcagtgctcggatgaaattgttactataatctcaatgttgtcagtacagaacgttttttatcgtccaaaagataggcaattggaagcagatagcaagaaggcaaagtttcatcacccatacggtgatcatttaacattattgaacgtttatactagatggcagcaggcaaattactcggagcagtattgcaaaacaaactttctgcattttagacatttgaaaagagcaagagatgttaaaagccaaattagcatgatatttaaaaagataggcttaaagttaataagctgtcatagtgatcctgatttaattcgtaaaactttcgtgtcagggttcttcatgaacgctgctaagcgagactcacaggtaggttataaaaccatcaatggtggtacagaggttggaatacatccctcgagttcattgtacggaaaagagtatgaatacgtaatgtatcatagtatcgtattaactagccgggaatacatgtcgcaggtaacatccattgagccccaatggcttctcgaagtagcgcctcatttttataaagctggagatgctgaaagccagtctaggaagaaagcgaaaatcattcctttgcataacaagtttgccaaggatcaaaattcatggagactaagctcaataagacagtcaagggaaagggcattaggtatcaagaggtaa

SEQ ID NO: 79817 - DNA, 1134 bp, Saccharomyces pastorianus
atgtctgatatatcgaaactcatagaagctattgtgggatctgatgaccccgtgatcattgaatttgtgctgaatatcataaataaatccggcaatttacaagagtttatacgaaatattcaaaaattggatgccggtatatcctacgaagacagtattaagatgtataatgcgtttttgggaaagcaggaagaagaaaagatacgaaataaagttacaagttcaccgttaagtcaaaaaattaatcaggtactgaaagatgacgttaatttggacgaccctgttgtgactgaatttgtccttagcattttgaataaatctaaatcaataactgagttccaggaacaactgaacttgatgcaaagcggactcgataatgaaacaattttcaagatatatcaaattgcatcaccaccagtaatgaaagaagaagtctcagttcttccaagcaccaagataccagcaaagatagaagcaaagattgaagaagaggcacaaaaaatagaaagtttagaccctagccctgtccttcacaaagtttatgaaggtaaagtgagaaacataactacttttgggtgtttcgtccaaatttttgggacgcgaatgaagaattgtgatggcttagttcatatttcagaaatgtcggaacaaagaacattagatccacatgatgtggtgagacaaggccaacatatctttgtcgaggtgataaaaatacaaaataatggaaaaatatcgctctccatgaaaaatattgatcaacatagtggagaaatccggaaaagaaatactgaaagtgtcgaagacagaggtaggtccaacgatgctcatacaagcagaaatatgaaaaacaaaattaaaaggcgtgctttgacttcaccagaaagatgggaaattcgccaactaattgccagcggtgctgcttccatcgatgactatcctgaattaaaggatgaaatacccataaatacttcctatttgaccgcgaaaagagatgacggcggtatcgttaacggtaatacagagaaagtggactcaaaattggaagaacaacaacgagacgagacggatgaaattgatgtcgagctgaatacagatgagacctgcaggcatgcaagcttgcactgccgtcgt

SEQ ID NO: 79818 - DNA, 333 bp, Saccharomyces pastorianus
atgaaatcttggcagacatctatcggcgatagtgaattcccactgaccagcttccagatccttgttactgatgccgaggtggttgttcagcgcatccttgactgcactaatggttacctccctggatggcactacaggaacaccgtgttcattgagcatacaacctcctatcatcgcagtcacttttgtatatttgttgagggcgtttgggtttgtggagagtttgtcaaaaagtggtttgaaattcctttcgataacagaatcgaaaattacaccaagcaatttccctggattcttattggatttgggaaccaagtatccaaagccttgtag

SEQ ID NO: 79819 - DNA, 114 bp, Saccharomyces pastorianus
atgattagattattgggtccaaggccattcaaggaaaggaacgaggcttttgaaaaatatttggatccaaagagcaataccgaaccgcctgaggcacctgcagcaacaaattaa

SEQ ID NO: 79820 - DNA, 2049 bp, Saccharomyces pastorianus
atgatgatgtggcaacgatatgcaaggggtgcgccacgctcattgacatcactctcatttggtaaagctagccgcatatcaacagtgaagccagtgcttcgctcgcgcatgccagttcaccagcgtttgcagacgttatctggtctggcaaccagaaacacaatacaccgttctacccaaatacgttccttccatatctcatggacaaggttaaatgaaaataggccaaacaaagagggtgagggcaagaacaatggtaataaagataataatagcaataaagaagatggcaaagacaaaagaaatgagtttggttcattatcagaatacttcagatctaaggaatttgctaatacgatgtttttgaccatcggattcacaattatatttactttgctcacaccttccagtaacaactcaggagacgactctaaccgcgtcttgactttccaggatttcaaaacaaaatacctggagaagggtcttgtgtccaagatttacgtcgttaataagtttctcgtagaggccgaattagtcaatacaaagcaagttgtatcgttcaccattggttcagtagatatttttgaggaacagatggaccagatccaggacctcttgaacattcctcctcgggatcgtatccccatcaaatacattgagagatcttctcccttcacatttttgttccccttcctgcccaccatcattctgcttggtggcctttacttcataaccagaaaaataaatagttcaccaccaaatgccaatggtggtggtggaggaggcctcggtggcatgtttaatgttggaaaatccagagcaaagctcttcaataaggaaacagacattaaaatttcatttaaaaatgttgccggttgtgatgaagctaaacaggaaatcatggaatttgttcactttttgaagaacccaggtaagtacactaaattgggcgccaagataccacgaggcgctattctttctggacccccaggtaccggtaagactctcttggccaaggccaccgcaggtgaggcaaacgtgcccttcttgtcagtatcaggttctgagttcgtcgaaatgttcgttggggtgggtgcttcacgtgtaagagacttgtttactcaagcaaggtctatggccccctcgattatctttatagatgaaattgacgctatcggtaaagaaagaggcaaaggcggcgctctcggtggcgctaacgatgaaagagaagctacactgaaccaattattggtggaaatggacggattcactacttccgaccaagtcgtagtccttgcgggtacaaataggcccgatgtgttggataatgctttgatgagaccgggaaggttcgatagacatatccaaattgattctcctgatgtcaatggtaggcagcaaatatacctggttcacttgaaaagactgaatctggatccccttcttacagatgatatgaataatctttctgggaaattggctacgcttactccaggttttactggcgcagatatcgctaatgcttgtaatgaggctgcattaatcgctgccagacataatgacccatatatcactatccatcactttgagcaagccattgaaagagtcattgcgggactagagaagaaaacaagagtcctttctaaggaagaaaaaaggtcagtggcctatcatgaggcaggacatgccgtttgtggttggtttctaaaatatgcggatccacttctgaaagtaagcatcatcccgcgtggacaaggtgctttaggctatgcccagtacctaccaccggatcaatatttgatatctgaggagcaattcagacatagaatgatcatggctcttggtggccgtgtttctgaggagctacattttccatcggtgactagcggtgctcatgatgatttcaaaaaggttacacagatggcaaatgccatggttacatccctaggaatgtcacccaagattggctacctgtcgtttgatcagaatgatggaaacttcaaagttaacaacccttcagtaataaaacggcaagaaccattgatttag

SEQ ID NO: 79821 - DNA, 834 bp, Saccharomyces pastorianus
atggatagggacagtgaaagtgaagaagctgaaacgaaagatatcagaaagcaaatccaacttttgaaaaagatcatttttgaaaaagaactgatgtaccaaataaagaaagaatgcgctttgttgatttcctatggtgtcagtattgaaaacgaaaacaaggtaataattgaactacctaacgaaaaatttgaaatcgagttgttgtcccttgacgatgactccattgtcaatcatgaacaagacttaccaaaaatcaacgacaagagagcaaatttaatgcttgttatgttgagactattattagtcgttatattcaagaaaacattacgatcgagaataagctcaccccacggactgatcaatttgaatgttgacgatgatatcttaataatacgtcccattcttggtaaagttcggtttgctaattacaaactgttactaaaaaaaatcataaaggattacgtgctcgatatagttcctggctcaagtataacagaaacggaagttgagagagaacaacctcaagaaaataaaaacattgatgatgaaaatataactaaattaaataaagagatccgtgccttcgataaactattgaatatacctagacgtgaactcaaaataaatctaccattaactgagcacaaaagccctaatctaagtttaatgctcgaaagtcctaactattgtaatgcactcattcacatcaagtttgcagctggtacggaagccaacgcagtgtcctttgacacaacattttctgattttaaagaagtagaggacttcctacattttattgtcgctgaatacatccagcaaaagaaggtgtaa

SEQ ID NO: 79822 - DNA, 591 bp, Saccharomyces pastorianus
atggctggcgacaaccctgaaaacaaggatgcttccatgttagatgtcagtgaggcagctagcaacactacgattaatggtaaacatagcgcagattcaactaatgaggcttccctggcgtacactttttctcaaatgaacgtagataatcctaatgaattagagcctcagcatcctttaagacataaatcgagtttaatttttaacgacgatgatgacgatgaaatacctccatattcaaaccatgcggaaaatggttctggggagacctttgattctgatgatgatatcgatgctagcagcttgagtagtatcgacagcaacgaaggcgatatccacgatgcagatatgacaggaaataccttgcaaaaaatggattatcagccatctcagcagtctgactcacttcaaaatcaaggctttcaacagcaacaagaacagcaacagggcactgtggaaggcaagaaaggaagagctatgatgtttccagttgacatcacttggcaacaggggggtaataaagtgtacgttactgggtcttttacgggatggagaaagatgatcgggttagtaccagtcctggacagcctg

SEQ ID NO: 79823 - DNA, 1152 bp, Saccharomyces pastorianus
atgaccaaagaccctttagatgtgaaatttgttcacgaggtttccacagacttgaacataaaaaaaaggcacgtaagaacgcatactggcgagaagcctcaccaatgtaccgttcagggctgtccgaaaagcttcagccgaagcgatgaactaaaaagacatttgaggacacatactaaaggcgtccaaaggcgcagaataaaatccaagggctcgcgaaaaaccgttgtgaatactgctaccgccgcccctaccaccttcaatgaaaacactggtgtttcgcttacggggataggtcaagctaaagtgccacctattcttatctccgttgctcagaattgcgatgacgtgaatatacgaaatactggaaataataatggcattgtggagacacaggcacctgcaattttagtgcctgtgataagtattcaaaatgaccctcatccgattccaagtaacctctccactacttctatcacctccattgcatcagtatatccctccacttctccattccagtacctgaaaagcgggtttcctgaagatcctgcatctacaccgtatgtacattcgtccggaagttctttagccctgggtgtattgtcttcaaactcctctatattttcgaaatctaggaggaatttggccgccatgagtggtcctgattctttgggtagttctaaaaaccaatccagtgcttcgcttctttctcaaacttcacatccatcaaagagcttttcaagaccgccaacggacttaagtcctctgcgaagaatcatgccttctgtaaacacaggagacatggaaatttcaaggacagtatccgtttcgagcagttcatcatcacctacttctgttacgtatgatgacaccgcggctaaagacatgggcatgggaatattttttgataggcaacctgtaacacagaaagcttgcaggagcaatcataagtacaaggttaatgctgttagcagagggagacaacatgaaagggcacaatttcatatatccggagatgatgaggacagtaacgttcaccgccaagaatcaggagcatccaacacaaatcccaaggtatcattgcctccgataaagagcattttgcgacaaattgataattttaacagtgctccttcttacttcagtaaataa

SEQ ID NO: 79824 - DNA, 183 bp, Saccharomyces pastorianus
atgaattacctgcgagatagatttcctccggataatgaccaaagaccctttagatgtgaaatttgttcacgaggtttccacagacttgaacataaaaaaaaggcacgtaagaacgcatactggcgagaagcctcaccaatgtaccgttcagggctgtccgaaaagcttcagccgaagcgatga

SEQ ID NO: 79825 - DNA, 555 bp, Saccharomyces pastorianus
atggattcaaagtctacaattggggttgagtttgccaccagaactttggaaattgatggcaagaggatcaaggcgcagatttgggatactgcgggccaggaacgttacagagccattacttctgcttattatagaggagctgtaggtgccttgatcgtttacgatatcagtaaatcaagctcatatgaaaattgtaatcattggttatcagaattaagagaaaatgcagatgacaacgtcgcagtggggcttatcggtaacaagtctgatttggcccatttacgtgctgtacctacggaggagtccaagacttttgcacaggaaaatcagttattattcacagaaacaagtgctttgaacagtgaaaacgtggataaggcttttgaagagttaatcaataccatctatcaaaaggtcagcaagcatcaaatggaccttggtgactccagtgccaacgggaatgccaatggtgcgtccgctcctaatggaccaacgattagtctgacaccaacaccaaacgaaaacaaaaaggcaaatggaaataactgttgttaa

SEQ ID NO: 79826 - DNA, 264 bp, Saccharomyces pastorianus
atgagtagcgaggactacgggtatgattacgacctactatttaaaattgtactgatcggtgattccggggtagggaaatccaatctattgtcaacgatttacgaaagaacgaattcaatatggattcaaagtctacaattggggttgagtttgccaccagaactttggaaattgatggcaagaggatcaaggcgcagatttgggatactgcgggccaggaacgttacagagccattacttctgcttattatagaggagctgtag

SEQ ID NO: 79827 - DNA, 1248 bp, Saccharomyces pastorianus
atgttaatagacttgcaaaaatctccgacgaataataatccgaggatacataaacataggagaagcaggagcgttcataatattgatgacatttccttaaatttcgaggcaacctccacaccaccagctccgacctctgctccgtcaattcctgttgaacattctaacccatgtacttccattgaaatacctaagagatcacccttacggttcacgtcatctccaaaaacatctgatattcctcctgaagctcaatcacctaaaaatgggtccttcctccaagaaatctcggtaccttcgattcaaattataccagatgaaagtatctctcatacaagagaaccatcaccatcacttattgaatgcccagaggatgaaaacgaagctttttctactgaagttgctgaccattctattgcaataattagtgaaacaaaaagtgttccatcgatagagccattcaaaccgctatcttcattcaattcatttggtcaagaaattcaaaacaaggaaccaactcctttgaaccaaactcctacagacttaattggtaaacaaagaaactgtgtgaatccgcattcaattccatttagcgttttatcttccaatagccaatcgtcacaatcgggtagtagtaaatcttcctacaattctgagttttcttccaatactgccattacggatacaacatctcaaccttctgtgaccattaacaggtcaactttagaacataactttatagaagaaaaacgatcaattaaaaatttaggtcatggtcctccatcccagaagaacaactattcgttccccaggaataagaatactccttcaaatagacacgatttggaatttaataccatttacgaaaaaagagatggtaaaatggttgaggttattcttttagatcaggatgaagatgtaggcctcaaaaataacgatatatcacgaacaagagtctgccatgctcaaaaagctaaaaatgagcaacagaagaaacgtctaagccattgcaacgaaattttgggcatgtgtgataaaactgcagatgatgcaaaaagaattatttatcaactggtaaatgagaagcataaattctcagaaaaaggacaacaaacaaagccaaaaaaatcaagagtacttccgccgttgccttttccactgtatgatgaaaaagggaattgtttgatcccgaacaagtatcagtccagtattcataacgacattccatctcatcgcaaactaaaataa

SEQ ID NO: 79828 - DNA, 630 bp, Saccharomyces pastorianus
atgctaccactaataacgttattctacttaaaacgagcaaaacaaaaaaaaaccaagacaattgaaaacgcaatggatgcattcagcttaaagaaggataatcgaaaaaaatttcaagataaacagaaattgaaaagaaaacatgccacacccagtgatagaaagtaccggctattgaaccgccaaaaagaagagaaagctaccacagaggagaaagagcaagaccaagaacagcccgccctgaagtcaaacgaggacaggtactatgaggacccggtactcgaggacccggattctgcagtcgctaatgcagagttgaacaaggtgctaaaagacgtcctcaaaaatcggctccagcagaacgacgacgccacagcggtcaataatgttgctaataaagatactttgaaaatcaaagacctcaagcagatgagtacggatgagctcaatcgttggctcggacggcagaatacaacatcggctataacagcggctgagcccgaatcattagtcgttcccattcacgtacaaggtgatcatgatcgtgcgggcaagaagatcagtgccccttcgaccgatctaccggaagaactagagaccgatcaggatttccttgatggactgctctaa

SEQ ID NO: 79829 - DNA, 1674 bp, Saccharomyces pastorianus
atgatgaagttgcaacaagataaggatggtctttcagatcgtgttgtcactggtgttttgagttcattggagacttcccgtgatatcaagctatcttctgtttctttactgttccacggtaaagttttgatccaagattctggtttagaattaaactacggccgtagatatggtcttctgggagaaaatggttgtggtaagtcaacattcttaaaggctcttgctactagagaatatcctattcctgagcatattgatatttatttattggacgaacctgcggaaccaagtgaattgtcggccttggactacgttgtcactgaagctcaacacgaattgaaaagaatagaagacttagtcgaaaagactatcttggaagatggtcctgagtccgagttattagagcctctatatgaaagaatggactctttggatccagacacctttgaatctagagctgctatcattttgatcggtctaggtttcaacaagaagaccattttgaagaaaaccaaagatatgtctggtggatggaaaatgcgtgttgcgttggcaaaagctcttttcgttaagccaactctattattgttggatgatcctactgcgcatctggatttggaagcttgtgtttggttagaagaatatttgaagagatttgacagaactttagttttggtgtcccactctcaagatttcttgaacggtgtttgtaccaatatgattgacatgagagctcaaaaactaactgcttacggtggtaactacgattcttatcacaagacaagatccgaattggaaaccaatcaaatgaaacaatacaataaacaacaagaggaaatccaacatattaaaaaattcattgcatctgctggtacttatgctaacttggtgaaacaagctaaatctagacaaaaaattttggacaagatggaagcagatggtttagtccaacctgtcgtccctgacaaagttttctcatttagattcccacaagtggaaagactgccaccaccagttttagcattcgatgatatttcatttcattatgagagcaacccatccgaaaacttgtacgaacatttgaactttggtgtcgatatggactcacgtattgcccttgtcggaccaaatggtgttggtaaatccacattgttgaagattatgaccggtgaattgaccccacaatctggccgtgtttctagacatacccatgtcaagttgggtgtctactcgcaacattctcaagatcaactggacttgacaaaatctgctctagaatttgtccgtgacaagtactctaacatctcacaagatttccaattctggagaggccaactaggtcgttacgggctaaccggggaaggtcaaaccgttcaaatggctaccttgtcagaaggtcaacgttctcgtgtcgtctttgctttattagctttagaacaaccaaatgtcctactattagatgaacctaccaatggtttggatatcccaaccatcgactccttggccgacgccatcaacgaatttaacggtggtgtcgtcgtcgtttcgcatgatttcagattattagacaaaattgcccaagatattttcgttgtggaaaacaagaccgctaccagatgggacggatccattttgcaatataagaacaaattggccaagaacgttgttttgtaa

SEQ ID NO: 79830 - DNA, 135 bp, Saccharomyces pastorianus
atgccaccagtatctgcgtcaaaggccaagagagatgctaagaaagctgaaagagaggctaagaaagccgctgccggtaaaaccatcagaaagctaggtagaaaaaaggaggctgctgctgagaatcggaggtag

SEQ ID NO: 79831 - DNA, 1026 bp, Saccharomyces pastorianus
atgagcaagcataagcatgaatggacggaatcagtggccaactctgggccggcttcaatcttatcttactgcgcgtcctcgattttgatgacagtaacgaacaaattcgtggttaacctggacaactttaacatgaactttgtgatgttgtttgtacaatcactggtgtgcactgtgacgctatgtatcctacgaattgtaggcgttgctaattttcgatctttgaacaggacagatgtaaaaaactggtttccaatttctttgctgctcgtattaatgatttatacgtcgtcaaagagcttacaataccttgccgtgcccatctacacaattttcaagaatctgacgatcattctcattgcctatggcgaggtcctcttctttggcggaaaagtcacttctatggagttgacgtcatttattatgatggtcctttcatctgtagtggccacctggggcgatcagcaggccattgcaatcaaagcatcatctttggagaatctcgatcaggaacttgttgagtcaaccatctttgtgttgaatccggggtacctctggatgttcaccaattgtatttcgtctgcattgttcgttttgattatgcggaagagaattcggctgactaactttaaagactatgatactatgttttataacaacgttctggcattgcctttgctgctagtcttttccttcattatggaagattggtccacaaagagtttgtctgtgaacttgtccgccgactcactggcagcaatggtcatcagtgggctcatgtccgtggggatatcgtactgttccggctggtgtgttcgtgtaacttcctctacaacgtattctatggttggtgctttgaacaaattgcccatagcgttggcgggattggtgttctttgacgctccaaaaaactttttgtccttcttttctatctttctaggatttctgtctggcctgctgtacgctgtggctaaacagaaaaagatacaacagcaaaaagttctagcagctactcttgagaagtag

SEQ ID NO: 79832 - DNA, 879 bp, Saccharomyces pastorianus
atgaacagccaatcgtataatagtagtaacgcaaattttaatggagcaagcaatgcaaatttgaattctaataacttaatgcgtcacaattcgaacactgttactcctaattttagaaggtcttcaagacgaagtagtacttcatcgaacacctcaagttccagtaaatcttcatccagatctgttgttccgatattaccaaatccttcacctaatagcgctaattcacagcagttcaacatgaacatgaacctaatgaacacaacaaataatgtaagtgcaggaaatagtgtcgcatcctcaccaagaattatatcgtccgcaaactttaactcaaatagtcctctacagcagaatctattatcaaattctttccaacgtcaaggaatgaatataccaagaagaaagatgtcgcgcaatgcatcgtactcctcatcgtttatggctgcgtctttgcaacaactgcacgaacagcaacaagtggacgtgaattccaacacaaacacgaattcgaatagacagaattggaattcaagcaatagcgtttcaacaaattcaagatcatcaaattttgtctctcaaaagccaaattttgatatttttaatactcctatagattcaccgagtgtctcaagaccttcttcaagaaaatcacatacctcattgttatcacaacaattgcagaactcggagtcgaattcgtttatctcaaatcacaaatttaacaatagattatcaagtgactctacttcacctataaaatatgaagcagatgtgagtacaggcggaaagatcagtgaggataattccacaaaaggatcttctaaagaaagttcagcaattgctgacgaattggattggttaaaatttggtatatga

SEQ ID NO: 79833 - DNA, 525 bp, Saccharomyces pastorianus
atgcaagacgaccccgaaaattcgaagctgtacgacctgctgaatagtcatctggacgtgcatggtcgaagtaatgaagagccgagacaaactggtgacagtaggagccagagtagtggcaacaccggtgaaaacgaggaggatatagcatttgccagtggattaaacggcggcacattcgactcaatgctggaggcactgcccgatgatttatattttacggacttcgtgtctccttttacagcagctgccacgaccagcgtgactactaagacggtcaaggacaccacaccagctaccaatcatatggatgatgatattgcgatgtttgattcacttgccacaactcagcccatcgacatagccgcatccaaccaacaaaatggtgaaattgcacaactttgggactttaacgtggaccaattcaacatgacgcccagcaactcgagcggttcagctactattagtgctcctaacagctttacttccgacataccgcaatacaaccacggttccctcggcaac

SEQ ID NO: 79834 - DNA, 348 bp, Saccharomyces pastorianus
atgtcgtccacgtccctggccaatttcaaaagagctgcctcagtatcttccagtatatccaatatggaaccatcaggacaaaataaaaaacctctgatacaatgtttcaattgtaaaactttcaagacaccgctttggaggagaagcccagaggggaatactctttgcaatgcctgcggtcttttccagaaattacatggtaccatgaggccattatccttaaaatcggacgttatcaaaaagaggatttcaaagaagagagccaaacaaacggacccaaacattgcacaaaaatactccaagtgcacctgcaactgcctcaacttcagtaaccactacaaatgctaa

SEQ ID NO: 79835 - DNA, 1341 bp, Saccharomyces pastorianus
atggaattttatgacattttcaaagatttcaatttagaagatttgacatcagaaagtctgaggaagtctcggtatagattgtttcaaaaaagattatatttatactgcaaggatcattctgtcgagctatttggaagaaattatcctgttttattgaatcaaggttcatttgaaggctggccatcaactgtcgcaatcatgcactattttcaccccattgtccaaccatattttgatgaagaagttctcagtgataaatacataaatatggctggaaacggacactacagaaacttaaatttcaatgaactgaaatattttttacaaagtttgaatttgcctcaaatttctagcttcgacaagtggtttcatgattctatgcacgagatgtttctattaagagaatttttatcaattgatgagtccgataatataggtaaaggtaatatgaggattaccgaagaaaaaattatgaacatagatggtggaaagttccaaataccatgttttaaaatacggtatacaacattcttgcctaatatacccatttcttctcaatctcctttgaagcgcagtaattctcccagtagaagcaagagtcccacacgacgtcagatggatataatggaacacccaaatagtctttggttacccaaatacttgatacctcaatcgcatctattagtaattcaatattatgagacacagcaacttatacagaaagaaaaagagaagaaaggtaaaaaatcgaataagtctcggctaccacggaagaataacttggatgagtttttaagaaagcatacttcgccgattaaaagtatcggaaaggtaggcgaatcgagaaaggaaatcctggaacctgtgagaaaaaggctttttgtagatacagacgaagacactagtctggaagaaataccggctcccacaagactgaccaccgtcgatgaacacagcgataatgacgatgattcgttgatttttgtagatgagattacaaacagccaaagcgttttagatagttcacccggtaaaagaattcgggatcttacacaggacgaacaggttgacgtttggaaggacgtaatagaaatatcaccaataaaaaagtcaagaactactaatgctgagaaaaatccgcctgagtctggtttaaaatcacgctcaagcatcacaatcaatgctcgccttcaaggtactaagatgttgcctccaaacttgactgccccaaggttagaaagagaacactcctctgtccttgaccaacttttcacagacgcacaagatacagtcgaccggtttgtagcctgtgacagtgatagcagtagcactattgaatga

SEQ ID NO: 79836 - DNA, 894 bp, Saccharomyces pastorianus
atgggtgtctcacaaatatgggaatttttgaagccatatctgcaagattccagaattccgttgagaaagtttgtcatagactttaataaatcgcaaaaaagagctccaagaatcgcgatcgacgcatatggatggctatttgagtgtggatttatccaaaatatagatataagcgccagatctagatcaagatcaaggagtcctacccgttctccgcgtgatagtgatatcgacagtagtcaagaatattatggtagcagaagttatacaactacaggaaaagctgtgataaacttcatatctcgattaaaagaactactgagtttaaacgtcgaattcttgcttgtatttgacggagttatgaaaccctctttcaaaaggaaatttaaccacgaacagaacgctactacttgtgatgatgagaaagagtactattcaagctgggaacagcatgttaagaatcatgaagtttatggcaattgtaaaggattgctagcgccatctgaccctgagttcatcagtcttgtacggaaattattagacttgatgaacatttcatatgtaatcgcatgtggggagggagaagcccagtgtgtttggctgcaagtttctggggctgtagatttcattttaagtaacgattcagatactctcgtatttgggggagaaaaaatcctgaaaaattactcgaaattctacgatgattttggcccaagttcaataacttcccacagtcccagtagacatcatgatagtaaagaatcttttgttactgttatagatctacccaaaattaataaagtagcagggaagaagtttgatcgcctgtctctcttatttttcagcgtgctattaggtgccgatacaattcgtggagtcacgggtgttgggtag

SEQ ID NO: 79837 - DNA, 831 bp, Saccharomyces pastorianus
atgtttggaaaggaagatgaggagggtacagcagccactgaaaccgaaaaagcagatgagagcactgatggtggaatgattaagcatgacactaataaagctgaatctttgaaaaaagataaattatcgaaggagcaaagagagaagctaatggaaatggagaaaaaaagacgggaagatatgatgaaacaagtcgacgagttggcagaaaaactgaacgaaaaaatctctaggtacttaattgctgtgaagtccaataacttggaggaatttacgcgaaaactagatcaagaaatcgaggatttgaaattagaaagttttggtctagagttattgtatttattggccagggtttacaagacaaaagcgaataattttatcatgtccaagaagacttacggaatttctaaaatattcactggtacacgcgacaatgctagatctgttaaatcagcatataatttattgtctacaggcttagaagctcaaaaagccatggaaaaaatgagtgaagtcaatactgacgaactggaccaatatgaacgtgccaaatttgagtccacaatggctggtaaggcacttggtgtcatgtgggctatgtcgaaatttgaactggaaagaaaactaaaagacgtttgcaataagattctaaacgataaaaaggttccttccaaggaacgtattacaaaggcaaaagcaatgctgtttattgcccacaagtttgccagtgctagaaggtcaccagaagaagctgaagaagctagagtttttgaagagctaatcctaggtgagcaggagaaggaacacaaaaaacatactgtggccagataa

SEQ ID NO: 79838 - DNA, 246 bp, Saccharomyces pastorianus
atggtaaaggagacggagtattatgatattttgggcatcaagcctgaggccacgcccactgaaatcaaaaaggcctatcgtagaaaggctatggaaacacatccggacaagcatcctgatgacccagatgctcaagcaaagtttcaagccgtaggcgaggcctaccaagtcttaagtgatccagggcttcgttccaagtatgaccagtttggtaaggaggatgctgttcctcagcaaggattctga

SEQ ID NO: 79839 - DNA, 528 bp, Saccharomyces pastorianus
atgagtccattattaacagtgttacagtttctaaccaaaaaggcaaggttctacacaaaacttcggatgttcaagatgaatgccaccacaggcataaaaattcaaaatggtatgcaacctatcatcaagggagcagtaagctccacatttaaacgtgctctatacaatttcggtatcaaagaaaagaagagtgtcaatattgaaatggggagaacgcaacaaactaagaaaatcgatcagtctttgtccaaaaaacttcccaaaggtactatctacgatccatttgacttctctatgggacgaatccatttagatagaaaatatcaggcaaacaagaactcaaacaggaacgatataatgaagtccggtgcaaatccactagaattttatgcaagaccaagaatactttcaagatatgtgacctccacgggaagaatccaacatagggatatcacaggcttatcggcaaagaatcaaagaagactatcgaaagccattagacggtgccaggcaataggattaatgtga

SEQ ID NO: 79840 - DNA, 234 bp, Saccharomyces pastorianus
atgttctattatgcctttaaattgcattgtagggtaacctgttgggggaaaaaatatctaggattactttacatacttaaatatgagtccattattaacagtgttacagtttctaaccaaaaaggcaaggttctacacaaaacttcggatgttcaagatgaatgccaccacaggcataaaaattcaaaatggtatgcaacctatcatcaagggagcagtaagctccacatttaa

SEQ ID NO: 79841 - DNA, 663 bp, Saccharomyces pastorianus
atgccaccatcaaaatcaaataaaaaattcgttaatggtggcggtgctcatgaaatttcagatcgtaattcaaaaaattaccatgttgttggattatacagcaagaacttccccattttaagcaacaagaatcctaaaagtttaaagctgaacatttttatcaatttatcacaaaataagaaagtttttctacaagaattgtcattatacatccatagagacaacaattacttttcaaattcctcctcatttaataatattcccaatagccacaatggtaatgactgtaatggtgtggccaagggttataacgctggctgtacaagattaattgctggaaggatactagtgaaaaacattttatatgataaaagagtggtggtacgatatacgtgggatagttggagaacaacacatgaagtggaatgcgtttacatcagtgatggcgatggaatattgccgggcactaacatggacattttccacttcattatcgatgatgccagcaaagtggatcctcgcggcaagttagaattttgcattcattattctacacgtaacgactatgagcgcgaagagtactgggacaacaacaacgggaataattataaggtggatgttgtaatggatggctttaacgatcccttcacggcggcagcatga

SEQ ID NO: 79842 - DNA, 843 bp, Saccharomyces pastorianus
atgtatataaaggcagaacagaaaccccaacagtttgagaggaagagtgaaaaactagacagaaataaaaaccagcagctaccagatcttgaaacagatttcaagggttacagagtgaattcggacctatacaacaaagaacgagatgggagtacggaagagactttaaactctttgaagtttttacataaacctcagagagtaactcaaatgagagcgaacaggttcccagaggaagaagtacaaagaaacactgatttaaacaaaagaattttctccgcagggaatgatgaaaacgttgataatgagagcggctggtcaaaaattgccgctgccaagaatcacacttccgtagaatcattaaatggcagtacgagacccccattcaaaatagagctgcctcccctttcccccaaatccaccgtaccaaaatcttttcaagcagaatatcccgaagctaagtcacctggcaatgatatgaattttgaatatgatgaagaaattctaattccatttgcgccacctgtatataaaaagtcaggtgaactattgaagagctcattgaagagaagatcaaaatcattacctacaaccccaggtataaggagcgggaatggtgtccaagcaagagacggtagtccgatgttgattaggagtaagagtgttcactttgatcaggcggcacctgtaaaatattttgctgaggatgaaagccctataaacgttaataaaactgaacaacacgataattgtctaagctttaagcataagccagtgaatttaatggtggacccggaagaagagacaaaaatgctatcatctggattagaaacgactccatag

SEQ ID NO: 79843 - DNA, 729 bp, Saccharomyces pastorianus
  modified_base (5)..(5): a, c, g, t, unknown, or other
atggnggaagaacatgattatccattagtctttcatacccctgaggagaacccatattttgttggtgttttaagaggacatacggcgactgtaagaactgtctcaggccacggtaatattgccattagtggctcctatgataatacattgattgtgtgggatgttgcgcaaatgaaatgtctatatatcttgagtggacatacggatcgtatttattcgacaatctacgatcatgaaagaaaaaggtgcatctctgccagtatggataccactattagaatctgggatttggaaaatataaggaataatggagaatgttcctacgcaacaaattcagcatcgccatgcgccaaaatacttggtgctatgtacactttgcggggtcacagagccctagtcggtttattgggattatccgataaatttttagtcagtgcttctgcagacggttcaataaggtgttgggacgctaacacttactttctgaagcactttttcgatcacacgcagttgaatacaatcaccgcattgcacgtttctgatgaggtattagtgagtggatctgaaggtttgctcaatatttatgatttaaatagtgggctgttagtccgttcagatacattgagtggtgctgataatgtttggaacgttagttttaaggacaacacacttgtggcagcggtagaacgagacaagcgaaatcttttagaaattttggactttagttga

SEQ ID NO: 79844 - DNA, 753 bp, Saccharomyces pastorianus
  modified_base (105)..(105): a, c, g, t, unknown, or other
atgcttgattttaccagacgattaggattaactgcaaatggtactgtacctgagtccttcaacaagcgtgatgctactgaataccctaacattatcagtaatatnactacccaagcagccaacttcactcagcatattctcgtcgagcaacttcaaaatgacgtcacggcaataagtatcagtaatgccattaatgtagccgtcgatggttctgtggaaacaccagcagacctgcaatacaaccgcaaccaggaaacaggtgaatctaccctctgtagagccaagttttacggagtggaggtaagaacttggtctaggttgtacaatagggccgtctcttccacaactcttacgactaatttgaacagctacatagcgcaatgggtagcatgggccgttcacgggagcggtgacaagaagttttgcggcagccaggagttcacgaatatcttttttgatgggcaagagggttggagtttgtttgtcaagacgtggtcaacaaacagtagctgtgatattacagcctctgaaggaaatttaacatgtgctgttcgtgtttcaatatccagtatgcacaatcacggcaagacagcgttttgtgttacctatagccacggtgattcttggcgtgccgagctgagagtagttgccaatgatgcttggtctcattattatccctggagtattgactgtccagaagttgataaaaataatatggctattaatgattgttttgatcaggcgcaaggttaa

SEQ ID NO: 79845 - DNA, 297 bp, Saccharomyces pastorianus
atgcgcataacaataagatcgcataaaaaaatgagacggtatagtatcctgaggtcatttttctcccttggattgattgcttgcttttgtatctttcttataatagttctttcagaagagcccaatatgcggttattatataagttaagttacggctatgtgaagattttgaataatgtaaaactgttagaaagcattgcctcttgtataagatgtggtcgcattacttcagttaatgacttgaaccagtttgtttttcaatccacggctgtattcttcactaataaaaccgattag

SEQ ID NO: 79846 - DNA, 1008 bp, Saccharomyces pastorianus
atgattcttgcaccaaattccgtgtcaaacatattcaatgtcaacaatagcggcagtaacactgcttctacttctaataccaactcaagaagggaatctgtcatcaagaaggaatttcagcaaagattaaacaacttaagtaacagtggaggccctacctccaacaacgggcccattttccccaactcttatacctttatggatctcccacattcttcatcggtgtcatcgtcatccactttgcataagtctaaacgaggttcgttttctggccattctatgaagtcatcgtgtaatccgactaatctatggtcaaaagatgaagacgctttgctaatggaaaacaaaaagagaaacctatccgttatggaactatccattcttttgccgcagagaactgaggtagaaattcaatggagattaaacgccttgtcaagtgatgcggatatgttgtctcctacacattcacctcaaaaaactctgtccaagaaaactcgtccaagaatgttcaaaactggttctaccactgatgatgacaaaggtagcgacaaagaggacgttatgagtgatggtagtaacgatgatgacgaagataatgtagacccgctgcatcgtgctaaacaatccagtaacaagactgtcttttcatccagcagttccaacatatcctccaaagacgtttcaccggatccgatcttttcaccggatcccgcagatgattcatcgaatacttctgatgatggttctaggtgcaccataacctccgataccagctcctcggctgcaaccatgaatcgcacccctaattccaaaaacccgcaagatattgctttgttaaacaactttcgttctgaagccattactccgagaccgaagccttcttccacaactacatccatcactaccgaaaacaccaataacatgataaaccattctagttctacaactactaccacaaacaacagtccgctgccaagcataaacactatcttcaaggatatgctgtga

SEQ ID NO: 79847 - DNA, 285 bp, Saccharomyces pastorianus
atggacatagacgacacggacgctgacacagatgcagaaaatcttgacccttccagccaatccaagagcaagacctccggccccagtgatctagcatccttggaggcgctacttggtgctacaggaggagtgaagacagacagcaacgggaacaaagtcacctacactcttccccagtctgccttggcccaactgctccaaaccataggccatgacccggcttcctcccatcccgagaatgacagtaacactgaccacaaggccggccgttcccacttgcaatga

SEQ ID NO: 79848 - DNA, 987 bp, Saccharomyces pastorianus
atgggacaaattctatcaaacccggtaattgataaagagagccactccggtgctgactccttgaccgcgtttggactgtgtgcaatgcaagggtggcggatgtcaatggaggattcacacattctagagcctaatgttttgacaaagtccgataaggaccatattgcattttacggtatattcgatggtcatggtggcgctaaagtagcagaatactgtggtaataaaatagtggagatcctgcaagagcagaaatcgttccatgaaggaaatttaccaagggctttgattgatactttcataaacacagacgtgaaactgttacaagatcctgtgatgaaagaagaccatagcggatgtacggctacatccatattagtatcaaagtcccagaacttgttagtatgtggtaacgctggtgacagtagaaccgtactcgccaccgacgggaacgcaaaggcattatcatacgatcacaagcccactctagcaagcgaaaaatcacgtattgtggcagctgatggcttcgtagaaatggatagggtcaacggtaacttggcgctctctcgtgccattggtgattttgagttcaaatccaaccccaaattgggccccgaggagcaaatagtgacatgtgttccggacattctcgagcattctctagattacgatagggacgagtttgtaatcttagcctgtgatggtatctgggattgtttgacttcccaagattgtgtggacttggttcatctcggccttcgcgaaggcaagacattgaatgaaatttcttcgcggatcatcgatgtctgttgtgctcccaccacagaggggacgggtattggatgcgacaacatgagtatagtggttgtcgcgctgctgaaagaaggtgaagacgtcgctcaatggagcgaccgtatgaagtccaaggcccaccgcacatcagtgcgttcttttgcagacaagagaagaagggtgtttagttactaa

SEQ ID NO: 79849 - DNA, 228 bp, Saccharomyces pastorianus
atgtcagcgttaacgtatgtatccgccgcttcaataggtacgttcagcacattgatattcggcttttgttgggcacttgacatttcaaccgcaagagagtttgtatttaagactagagagttcatgggcgttccacaagccttagaaaccgacacgagcatggacgaagaaacctccaaactaaccaagcaattgcaagacctcctgtcgagcgaaaacaacaagtag

SEQ ID NO: 79850 - DNA, 180 bp, Saccharomyces pastorianus
atgatcgaagagaagaaggaacgtaagaaacgcagggttcttcaaatggccagattttatggtgcggccgccttcaccctgattaccatgaggcttatctccagggccataaaagtacgaaaatgtatgtattttgtcctagttcagtggcaaaaactaataataggatatagttactaa

SEQ ID NO: 79851 - DNA, 1308 bp, Saccharomyces pastorianus
atggatatcgacgcttcgccctcattgattgaaaaatataactcttttcccacaagaaagattcttcctgagcaggacgagtttgagaacgacgttgaggacgatgcttcttcctcactgaaggaaaaatcacaaggttcttgtgaaattgaaattgcttctgaaatttcatccgaaattttaaatggcacatcggcagacggtaattccgagtttcacgacttcgctgagccccctccctctcagaatgaatctgtcgctctgtcttttagtcaatcgaatgatttggactttttgaataatccaagcggatcaggctcttcaaacgatatcaatagaagcacgagttccatttcacttcctagacatgtgtcactagattttaacgtttacaatagtctttgcctcacaaatgaggtgactgcatcagaatcacataatgtggccaaatttcaccttggcaaggaaaacaagaagagcttgctaccaagatggaaaaccattgaaatgtacggggaggtagttaagaaaactcaagacatatattctaattttcagtatgcacaatacattttaagggtagggttggataccgaaaaactacacgaacttgttaaggaactggaggatgaaagcaatagcttcactgtagattctttaaaggaatatttagtgaacgatgccaaagttattttgaagaaactaagtgccgttggataccctgatgcacagtaccttctaggtgacgcctactcctctggagttttcggtaaaataaagaatagaagagcatttcttttattctccgctgcagccaaaagattgcacatcgaaagtgtttacagaactgccatttgctatgagtgcggcttgggtgtaaccagaaatgcaccgagggcggttaactttttgacttttgctgcaactaagaaccatcctgcagcaatgtacaaattaggagtatattcgtatcatggtttgatgggtcttccagatgatattctaaccaaaatggatggttatagatggttgcgaagggctacatctatggctagcagctttgtttgtggtgctccttttgaattagccaatatttatatgacgggatataaagatcttatcatttcggatccagattatgctatggcattgtatgagaaggcggcggctttagggcatactgaatcggcaagaatactagaagacgctcgcagaagtggagggtttgtttcgcgaggacatcctccttcggcacagaaatatcataaaacctcccatgaagctgtggcagccaaaaagttgatttaa

SEQ ID NO: 79852 - DNA, 744 bp, Saccharomyces pastorianus
atggaattacttatcttaattcacgcttgtaagacggcatcagtcagaagaattacggcagtaataccaaatttcccttatgctagacaagataagaaggataaatcgcgggcgcccatcactgcgaagctgattgccaatcttttggaaactgcgggttgtgatcatgttattactatggatctccatgcttcacaaattcaagggttttttcatatcccggttgataatttatacggtgaaccaagtgtgttgaattacataaggaccaaaacagatttcaataatgcgatactggtatcgcctgatgctggtggtgcgaaaagggtggcttctttagcggacaagctggatatgaattttgccttgattcataaggagaggcaaaaagctaatgaagtttcgcgaatgctgcttgtcggtgatgttgctggtaagtcatgcttgttgattgacgatatggctgacacgtgtggtacgctggtgaaagcttgtgacacattaatggatcacggtgctaaggaggttatcgctattgtcacacatggtatattttctggctcagctagggagaagttaataaatagtaggttatcaagaattgtttgcaccaacacggtacctgttgatttggatttggacattgtcgatcaggtggatatcagccctacgattgcagaagctatcagaagattgcataatggagaatcagtctcatatttatttacacatgcgcctgtttaa

SEQ ID NO: 79853 - DNA, 144 bp, Saccharomyces pastorianus
atgtctacaaacagtattaagttgttagctggtaactcacatcctgggcttgctgagcttatttcccaaaggcttggtgtaccgttatctaaagtgggggtatatcagtattcaaataaagagacgtctgttacaatagggtaa

SEQ ID NO: 79854 - DNA, 411 bp, Saccharomyces pastorianus
atgaccagtgatgaagccacgacaggatcaattacaacatcagaccatcagaagaagacattagcaagaaattccataagttataacacttttcaaaatgttagattcaaattgatttttccggaagttgtacaggaaaatgtagagacattagaaaagagaaaattggatgagggggatgcggcaaatacaggtgatgaaacagaagacccttttacaaaggctgcgaaggaaaaagtcatctcgttggaggaaattctagaccctgaagacagaatacgcgctgaacaagcgttgagacaatcagaaaataattccaagaaagatggcaaagaacctaatggtagttcttcaatggtttatattggtatcgctatttttttgtttttggttggcctttttatgaaatga

SEQ ID NO: 79855 - DNA, 324 bp, Saccharomyces pastorianus
atggctacaaagcaggctcacaagagattgacgaaagagtacaagttgatggtggaaaaccctccaccatatattcttgctcgccccaacgaagataatattttagagtggcactatattatcacaggacctgcggatactccttacaagggcggtcaatatcacggtactttaactttcccgtctgattatccatacaaaccaccggctatcagaatgataacaccgaatggacgtttcaagcccaacacacgattatgcctttctatgagtgattacaccctgatacttggaatcctggctggtctgtctcaaccattttga

SEQ ID NO: 79856 - DNA, 750 bp, Saccharomyces pastorianus
atgccatcattggaatcgccttcttcccttctgccgatacagatgtctccactaggaaagtactcaaaaccgctttcgcagcagatcaacaaattaaatacaaaagtttctactctacaaagaataatgggtgaagaaattaaaaatctggacaacgaagtagtagaaaccgaatcctctatttctaacaataagaagagattgattacaatagcacatcaaatagaggatgctttcgattccgtatcaaacaaaactcccataaattcgatatcagatttacaatcaaggattaaagaaacatcgtcaaagttgaattctgaaaagcaaaattttattcaaagcttggaaaaatctcaagctttaaaactggctacaattgtccaggatgaggaatcaaaggttgatatgaatactaactcaagttcacatccagaaaaacaggaagatgaagagccaattccaaagtcaacgtcggaaacttcttctcctaaaaacaccaaagcggacgccaaattttctaatactgtacaagaatcatatgatgtaaatgagacgttgagactagcaacggaactaactattctacagtttaaaagaaggatgacaacattgaaaataagcgaagctaaaagcaaaattaattcatcggtgaagttagataaatacagaaacttgattggtatcacaattgagaacattgactcaaaattggacgatatagaaaaggatttgagggcaaacgcataa

SEQ ID NO: 79857 - DNA, 114 bp, Saccharomyces pastorianus
tcccgtccactagctcggtttagttgtgaccagctgctgtacttgggtcgcgctgcctcctccacacgggtctatgacagtatagccgatgagttttcatccctatatttttaa

SEQ ID NO: 79858 - DNA, 348 bp, Saccharomyces pastorianus
atgaactgtgctgacaacagtggtgccagaaacttgtacatcattgccgtcaaaggttctggttctagattgaacagattaccagccgcctctttgggtgacatggttatggccactgttaaaaagggtaagccagaattgagaaagaaggttatgccagctattgttgtccgtcaagctaagtcttggagaagaagagacggtgtctttttgtacttcgaggacaatgctggtgtcatcgctaatcctaagggtgaaatgaagggttctgccattactggtccagtcggtaaggaatgtgccgacttatggccaagagttgcttccaactctggtgttgttgtttaa

SEQ ID NO: 79859 - DNA, 183 bp, Saccharomyces pastorianus
atgcactttgctactaaaaccattctattcaccttgcgaaaacaacaagcgaaaaaaaaaagcgagggcgaaagagtaagatcaccacgcacgtttaggggatcggagagcttatctatacagcaactagaagtatatagaacaacaatggtcgaacgatgggttagtttcacagctcaataa

SEQ ID NO: 79860 - DNA, 267 bp, Saccharomyces pastorianus
atggtttggtctgaattgttggaaatactagcgtattctgtcgattgctccgttaatggagacttatacaccaacacgtcaggggaaatttcaacagcagacatacttaggttcgcggagattgtagaatacccttctgctacactattaacacagaatgtgcgtcaaaccacaccacacaataaacaatgcactttgctactaaaaccattctattcaccttgcgaaaacaacaagcgaaaaaaaaaagcgagggcgaaagagtaa

SEQ ID NO: 79861 - DNA, 213 bp, Saccharomyces pastorianus
atgttatcattatccaatgagagtgaccatagtatgacagaaacatctgatgatatgttctcaaattctggtaattgggattgttcttcagcaaatactgttagcgaaggtagattgaatgatgaccaagaggatgtcgtcttcacaaagaggatgtattctgtaaatgatgtgcatttaagtggatctactattgatactactgtggtctag

SEQ ID NO: 79862 - DNA, 1380 bp, Saccharomyces pastorianus
atgcaagataccaaatactacgaaccaacaaatatttttcgtcagcctgctattaatataaagaagagatcagataaaaagaggattttacaatcgatgatgactttatccacgtataaaaaaacgtggcaaaacaatacttcgaaaatgaattcaccgattttgcgaaaagcatcagacaacttcaatgactattatacaactaaaaaattaaaatcagattattggaaactgtacggtgttgatgaaagtgagttatccataccttcagacatgtccattgtggataatatacttctagtatctacaatgaacgagaaagacaacttgaaactttttgaaatttccgctgagaaaaagctgaaggaactacagacgattactgttcccggtaaacccattacttgtatctgcttattgcccatggtagattttccgccacagattttccccagctctcaaataaatcctaaccacaaccaattaatattgacaggtcatcaagacggtatagtcaatctgatagcaacttcaacatataagggatgtgctaaaataataaaaaggtttaaccacaacaagtttctaaaatctactgtatcaacgtcgattccgattctggaaataacgccaaaaacagcacctattttgaaggtttcgccatggaacaagactggttttgtttcccttctaaatgactccctctttatatatgacttgaaatcaaatcttgattgcataaaaacacctatttttttgcaatcatatccaggtataaattcttttgccgttaatgaattccatgatcccttcttactggccttagttggctcaaaatttggaccaaatggcatttcgctgcttgatttgagaacaaatctctatattccagatattttagataatagcatatctgcaggatgtggaaaaggccatttgcaaagaaagaacacaagtttggattgcgtatggataagtaatcatcacgttgcacagagcttgaacgataaaattcaaatttgggacattcaatcctgcgacggtaaaccagtttgtgaattatatgctaagaaaggatacattgaaagtctaaaatttaacgaaaaaacaggcgcgttatatagcagtgatgaccaaggctttgtcatttgttgggatttacaaaacctacaaaacatgaaatatggtgagttagtccatggatttaactcaattagcctagatagtgaaagtgaactactattaaccaagcaagtcttccaatgtggaaacattattgtgagtggtatgagtgataaaaatatttgcttgaagagcaatgacactaaggccaatggaaaaggatgtggattttattccttgatatggcaaacgatggaa

SEQ ID NO: 79863 - DNA, 1617 bp, Saccharomyces pastorianus
atggttaatttgcctatcaattcctcatttgcatccttggacagcttctacatagataattttgcgatggctagaatgggaatgagttctccagaagcgggagattcggtttcttctgtaccaaaccttccttctgcaccgtcttcaacaaggcttggacgatcaccagtctttagtggagtcaccaaccaaccaagtccaattcgccccgttttgccacaacaaaagtcatcgttttgtgcaacaggtcggtatgataagagtcacaatagtcttcttagaaattcttcatctcatctaacgtcatacaactccggcagaccatcttcaaggactggccgaatgaattcacgcaaccaaaacttaccgaaaataccaaatagcctttcaaaaatctcaacaacgaaattgactgaactaagagttccaaaggattcagaaatgccatcacctgcaaaaaaccctaacgctgatcatttgagaaggtttcccgtaaagaaaaataccaaaacacccgccataaaagatcctccgagaagaaacattaatagcagcgataagtcaggctccaaaaattctcctataaaatccttataccaacggatgaaacagtctaaggataattcaaaaaccttcgaggtacgtagaggaaactttttcagtcattttaatggagatgatgatgatagcagtagccagtcgtccgtaaccagttctggttcagaatctgattcagaattatcatccacttcatcgtcctgtacatctggaacccaatctcggaatagctccaacaataatgcatattcagaaacggagtcattacctttcgagtttggtgttgattcagaagatggaagtggagtattattaagagatttacctaacgaagatcaaataaggccgtttctggatatacaaccatgtcgacgcatgaaagttaaaagctcattgaacctcgaaccaccttctgtctcatcttcttcatcttcatcctccgacgaagatgagctaattttaaatgtcgggactgcaggtcatcgaagaaggcataattcttcaaaacttagtgaactatccaacagtccgcagaagggatcaaataacttcatgtattccaatggaagtgttcatgacagtgagacgacgataacgccgcaaaatatggatgacctgacgctgcatcgggcactgagccgtagccaacccattagtaagcctggcccattagtattaccaaagcgtttagaccaaaagaaagctacgacggaaacctcaaatttgacagatatcgttgaatttaacggtaataacgatcatcgaaaggacaaaaatttcggtaaagttctttattcaagggacttgttaaaagatgctctaagttcaactaatgcaggcagaaggagatccataccttcaaataaaataagaggacgaaaggacgcaagtattaccatgagtactaatgttggtaatgatgaacatgctagaaataccagctgcaatggtgataaaggacaagaaaacggcgctataaaacaaaggacccatgaaagatcgcgatctttaacagtcgctgaactaaatgaagagaagagaaggagtgcacttccatga

SEQ ID NO: 79864 - DNA, 1560 bp, Saccharomyces pastorianus
atggataggagtgataaaaaagttaacgtcgaagaggtcgatgtaccttcaaacttacaaatagaattagaaaaatcaggcaccagtagcagtgtatcactccgaagcccgactaagagtagcgctaccaatttggcgggcatggccgaaggtgcaagagataatgcatcaatagcgtcttcatcggtagattccctcaacatgctattagagcggcaaagagtaaggcaattaaaccatccacagcaccaacagcatataagtagttcactagctaagaccccgacaacgacttcatcattttgttcgagcgggagttctaagaataaagttaaggaaactaatcgaatatctctaacatacgacccggtgtcaaagaggaaagttttaaacacttatgagatcatcaaagaattaggccatggacaacatggaaaagtaaaattagcaagagatatattgagtaaacaattagtagcgattaaaatagtggatagacatgaaaagaagcagaggaagtttttcacgtttatcaaatcaagtaaaatatccgaaaatgataaaataaaacgagaaattgccattatgaaaaaatgccatcacaaacatgtcgtacaactgatagaagtcctggatgatttaaaatcaagaaaaatttatttagttctagagtattgttctcgaggcgaggtaaaatggtgtccaccggattgtatggaatcagatgctaagggtccctctttactaagttttcaagaaacgcgagagattttaagaggcgttgtgctcggcttagaatatctccattaccaaggaatcattcaccgagatattaagcctgccaacttattaatatcaggagatggcactgttaagatttccgattttggtgtttctttagctgctagcagcacgaatagttccgatagtagcgaatccttagacgagttagaattagccaaaacagtgggcacgcctgcattttttgctcccgaaatgtgcttgggtgaagatgcattcaccaggtataacttaacaaaggaaaatttatttcgtggttcttgcatctcattcatgatagatatttgggctgtgggtgtgaccttgtactgtcttctttttggaatgctgccttttttttctgattttgagctcaaattatttgaaaaaattgtaaacgacccgttaaaatttccaacatttaaagaaatacagtccaacaaggtatctaaagtatcttgtgaggaggaatacgaaatggcaaaggaccttttattgaaattgttagaaaaaaatccccaaaaaagaatgactatacctgccattaaaaaacatccttttgtttcatgggattttgaccacgtaccggagaacaatgaaaagttactatcttctgtccttgagcaaaaattacgtttccaatgtaaccaaactgatcaatttgaacccatttctatttcaaagcacgaattgaaaaacgctgtctccggtgtcgggaaaaaaaatcaaagaatccgtactaaaaagtatcccgctaaaggatccgtcagatctctctaa

SEQ ID NO: 79865 - DNA, 429 bp, Saccharomyces pastorianus
atgcatggtggtctctcaccagatttgaatagtatggaacagatcagaagggtgatgaggccaacagatattcccgacgttggcttattatgtgacttgttgtggtcagatccagataaagatatcgtaggttggagtgaaaatgatagaggtgtttctttcacttttggtcctgatgtagtgaacagatttttacagaaacaagatatggagttgatttgcagggcccaccaagttgtggaagatggttatgaattctttagtaaaagacaattggtgacacttttcagtgctccgaattattgtggtgaattcgataacgctggtgcaatgatgagtgttgatgaaagtttattatgttcttttcaaattttaaagccagcccaaaaaagtctaccaaggcaagctgggggtagaaagaaaaaataa

SEQ ID NO: 79866 - DNA, 186 bp, Saccharomyces pastorianus
atggactcacaaccagttgacgttgataatatcatcgatagattattggaagtaagaggatctaaacctggtcaacaagttgatctagaagaaaatgaaatcagatacttatgttcgaaagccagatctatattcataaagcaacccattttactagagttagaagccccaattaaagtatgttaa

SEQ ID NO: 79867 - DNA, 393 bp, Saccharomyces pastorianus
atggatgtcctggctaagttgatcatttcaaagcaaaaagatggatcacaattacaagttgagtacgagcataagttgaaagaattggagaaattcattaacctactactgggattgcatgaaagcactgtgggaagtataatgaatactagtgttcttgacatggtactgcggaatggaatagagatcatagaaaaagacgatcaaaaatatgccctgataccgattaaagcaaaggaagaggcagataaaactacgagcactattcagggagtaaccagcaaaaagagtagtaaaaagaaaaaaaataagataaaatgttcattttgtcacgaggctggccacacaagagcacactgcggtgcgagactgacagttatacccaagaaataa

SEQ ID NO: 79868 - DNA, 2253 bp, Saccharomyces pastorianus
atgccaggatataaccatgcaggccctaaagaagatgcaaaccggttgtcaaaggggtttctccgattgaatgaaacagcttttttatattacatgatcgtatatacgctcttggaggatactctaccaagactaaaggaattttcgagcaacaaggaccagaatgttagaaatttgtacggggagagaatccagcttttgcataatgacccaaatattgagcggattcgaaatgtcattgaaaattaccctaaatttatacagttgcaaactatagagcctggaaaattaagttcaatgttgcattttcatggtgacgctctcttgcttatcgatgtacggcccaggtctgaattcgttagggcccatatcaaatgcaaaaacattatatgcatcgatcctgcctcatttaaggattcttttacagaccaacaaattgaaagtgtctctttgatcacttcgccgcactcagatatcactctcttttcaaatcgagacaagttcaagttcattattttatatactgacactcaattgcataataatttccagcaaaggcaaactcgcatccttgcgaagattctttcccaaaattcagtaattaaaccgctgagtgggacgaaaatactcattttggaaaatgggttctcaaactgggttaaattaggtggggcgtatcaatcatctgtcagtgaaacagcgcctcttacatcctcgtcttcaacgccagcttttggtagtccgcaagtcccaacaggcttgttcaatcagaaatctctatctccaaataaagataagagtatgccgatggtatccatgaatacgcagcctttgctaacaacggtgcaaaggcctcaattacccttatactattcagatttgcccattataccgcagccaagccccaacagaaattctcccaccgttcaaaaatttagtccacatccaccaaccactctctcaaaactcaatacaccctcgaccattcaaaataaagcaaacactgtggaaagaatatcgccagatatccgcgctgcacaagcccatgcctatttgccccctgcatcgaatgtattctcgccacgtattccgcctttaccacaacagaacttgtcttcgtcaaggcagaccatcctaaacaactcacaagtgcttgatctagatcttatagtaggattggaaaatataggtaactgttgttatatgaactgtatacttcaatgtttggtgggaacacacgatttggttcgaatgtttttggataacacatatctgaattttattaattttgatagttcaagaggttctaaggggttgctagctaaaaatttcgccatcttggtcaataatatgcacagacacggtgcattcacacctcctaacgtaagaacgataccagttcagactattcagtttaaaaaaatttgcggccatatcaaccccatgtatagtgattcaatgcagcaagattgtcaagaattttgtcaatttttgcttgatggcttgcacgaggatttgaaccaaaacggcagcaaaaagcatcttaaacagttatcagatgaggaagaacgaatgagagaaaaaatgtccatacgcaaagctagtgctctcgagtgggaaagatttttgcttaccgacttcagtgcgataattgaccttttccaaggacagtacgcatctaggctacaatgtcaagtttgtgaacatacctccacaacttaccaaacattctctgttctttctgttcctgtcccacgcgttaaaacttgtaacatattagactgtttccgggaattcaccaaatgcgaaaggttaggtgtcgatgaacaatggtcatgtcctaaatgcttaaaaaagcagccttccactaaacaactcaagattactagattgcctaagaaactaattattaatttgaaacgatttgacaatcaaatgaataagaataatgtgtttgtccaatatccttacttcttagatcttacaccatattgggcgagagattttaatcatgaagctattgttaatgaggacattcctaccaggggccaagtaccaccatttagatacagactgtatggggttgcatgtcattcggggagtttgtatgggggacactatacttcatacgtttataagggaccaaaaaaaggttggtattttttcgatgactcgctttatcgtcctataacgtttagtactgaatttatcacacccagtgcatatgttttattttacgaaagaattttttga

SEQ ID NO: 79869 - DNA, 234 bp, Saccharomyces pastorianus
atgggctcagaacaagccttaagtgaggttgtcgaatctgctaaagagcggttcggcaggcttacgcatttagttcagaagtttcttgatgatgacgacgtgccacaagagtgtctgcctttgctccaagaatgcgcagaaatatggtctagttatgtggacgcatgccaggatataaccatgcaggccctaaagaagatgcaaaccggttgtcaaaggggtttctccgattga

SEQ ID NO: 79870 - DNA, 1452 bp, Saccharomyces pastorianus
atgctcagggcttgtaatgttaacgcacgacttatcatgtcatgtcaaccgccagattttaccaatatgaagattgacacttctttgaatggcaacaatgcgtacaaagatatggtcaagtatccgattttttggtgtgaagtgtgggacaaattctctaagaaatggataactgttgacccagtaaatctcaaaaccattgaacaggtcagacttcattccaagttggcaccgaaaggcgtggcgtgctgcgaaagaaatatgttgaggtacgtgattgcttacgatcggaagtatggctgtagagatgtaactcggagatatgcccaatggatgaactctaaagtaagaaaaagaagaataactaaagatgactttggtgagaaatggttcagaaaagtgataacagcacttcaccatagaaagagaaccaaaattgatgattacgaagatcaatatttttttcagagagatgaaagtgaaggcataccagattcggtgcaggatttgaaaaaccacccatattatgttttagaacaagatatcaaacagactcaaactgtaaagccaggatgtaaagagtgtggatatttaaaagtacatggaaaagttgggaaggttttgaaagtttatgcaaaaagagatattgcggatttgaaaagtgctagacaatggtacatgaacggccgaattttaaaaactggtagcaggtgtaaaaaggtgataaagaggacagttggaagacctaagggcgaagcagaagaagaagatgaaagattatatagctttgaagacacagaattatacatccctccatcagccagtgcgagcggtgaaataaccaagaatacatttggaaacatcgaagtttttgcaccaacgatgatacctggtaactgttgtttggttgagaatcctgtggcaattaaagctgctaggtttttgggggtggaatttgcacctgctgtaacttcttttaagtttgaacgcggcagtacagttaagccagttttaagtggcattgttgttgcaaagtggctcagagaagctattgaaaccgctattgatggaatagagtttattcaagaggatgataataggaaggaacatttgcttggtgctttggagagttggaatactttactgctaaaactgcgtattcgtagcaagctgaactccacatatggtaaaattgccgaggaagaacctaacgttacgaaggaacagaatattgcggacaatcacgataatacggagacttttatgggaggtgggttcctaccgagtatagcaaaccaagaagcaaggccgtatagtgaaccttcagagccagaagatagtttagattatgtttctgttgacaaagcggaggaaagtgctacagacgacgatgtcggggagaattattcggattttatgaaagaactagagatgtcagaggaatcagactga

SEQ ID NO: 79871 - DNA, 1404 bp, Saccharomyces pastorianus
atgactcccgacaataatcccctctggtatagcgagaagcaacttcagcttcttaacggcaagaacttttttatgtttgtcgcacctgtagcttcacaaaagttggatacagcaataagaaaggaaaccacatttgtgccaatgcttgctgcttcattcaaacgccaaccatcacaattggtccgcgggttaggagctgttcttcgcactcccaccaggataggtcatgttcgtaccatggcaactttaaaaacaactgataagaaggcccctgaggacatcgagggctcggacacagtgcaaattgagttgcctgaatcttccttcgagtcgtatatgctagagcctccagacttgtcttatgagacttcgaaagccaccttgttacagatgtataaagatatggtcatcatcagaagaatggagatggcttgtgatgccttgtacaaggccaaaaaaatcagaggtttttgccatctatctgttggtcaggaggccattgctgtcggtatcgagaatgccatcacaaaattggattccatcatcacatcttacagatgtcacggtttcacttttatgagaggtgcctcagtgaaagccgttctggctgaattgatgggtagaagagccggtgtctcttatggtaagggtggttccatgcacctttacgctccaggcttctatggtggtaatggtatcgtgggtgcccaggttcctttaggtgcaggtttagcttttgctcaccaatacaagaacgaggacgcctgctctttcactttgtatggtgatggtgcctctaatcaaggtcaagtttttgaatctttcaacatggccaaattatggaatttgcccgtcgtgttttgctgtgagaacaacaagtacggtatgggtaccgccgcttcaagatcctccgcgatgactgaatatttcaagcgtggtcaatatattccaggtttaaaagttaacggtatggatattctagctgtctaccaagcatccaagtttgctaaggactggtgtctatccggcaaaggtcctctcgttctagaatatgaaacctataggtacggtggccattctatgtctgatcccggtactacctacagaactagagacgagattcagcatatgagatccaagaacgatccaattgctggtcttaagatgcatttgattgatctaggtattgccactgaagctgaagtcaaagcttacgacaagtccgctagaaaatacgttgacgaacaagttgaattagctgatgctgctcctcctccagaagccaaattatccatcttgtttgaagacgtctacgtgaaaggtacagaaactccaaccctaagaggtaggatccctgaagatacttgggacttcaaaaagcaaggctttgcctctagggattaa

SEQ ID NO: 79872 - DNA, 672 bp, Saccharomyces pastorianus
atgacaatgagtatcactgaagtatttggtgaatttaggtgtggtaagacacagatgtctcatactttgtgtgttaccacgcagcttccgagggaaatgggtggtggtgaagggaaagtagcatatattgatacagaaggcactttcaggcccgagaggattaagcaaattgcagaaggttatgaattggatcccgagtcatgtttggcaaacgtttcatatgctagagccttgaatagtgaacatcaaatggaacttgttgaacaattgggtgaagagcttagttctggagattatcgccttatcgtggtagattctataatggcaaacttcagagtagactactgcggtagaggtgaactaagcgaaagacagcaaaagctaaatcaacatcttttcaaattgaatagattggcagaggaatttaatgttgcagtatttctaacaaaccaagttcaatcagacccaggtgcttctgcattatttgcctcggcagatggtaggaaaccaattggagggcacgtcctggcacatgcgtcagcaacaaggattttgttgagaaaagggcgtggtgacgaaagagttgccaagttacaagattccccagatatgcctgaaaaagaatgtgtctacgtaattggtgaaaaaggtattaccgattcaagtgactag

SEQ ID NO: 79873 - DNA, 273 bp, Saccharomyces pastorianus
atgtctgttacaggaactgagatcgatagtgatacagcaaaaaatattcttagtgtagatgaattacagaactatggtattaatgcctcagatcttcaaaaattgaagtctggtgggatatacacagtcaatgtatgttattataacatttttaaaacctctgctgtagaggttctttccccctttcttttactaactaataatttggaaaggaacttttatagaccgttttgtcaacaacaagaagacatctatgtaaaattaaagggttaa

SEQ ID NO: 79874 - DNA, 744 bp, Saccharomyces pastorianus
atgtatatgaaaaatttaaaaataacgatgcccatctatctaagagtgttaatgtggatatatttttttactatcttaggactagcatgcgcttacaacgttacagaacaggtagagtttgacaagttcaaatcagattaccttgcctgtctcgcaccagaacacaggaacatagtagttgatttggctagtaacggattcataacaatttcaccaatggcgaacgcaacaattgactttgaggatgtaactagtgactactttaactgcactgacgtcaatactaacatacaggttacgatcgcgtctttttacaataaatacggatttgggcccgacgataacggctattatcacgctgtggcaggaccctcagaatttgaacagcatcatatggaggttaggctttacagaccatattatccaggtgagttttccatggggaagcgttcagacgcactcggtgtaactggttttgaccgaaaagactgtgcaggtgagggtttctatgacgaacaaactgcagctacttcttgtcagaatataggctccactcagtacgctaagtcggtcaggtcctataactatggttgctgcggcggagcggtctggatcaggatttggccgcatcacaattgtttacaaggacatgatcaccattttaagataaggccaggccagatgctatgttggaatgtcaacgcatattcttggatgcaaccagaatccggatggaacccgtaa

SEQ ID NO: 79875 - DNA, 921 bp, Saccharomyces pastorianus
atgaaagccaggccaagggatgcagtccctgagatgagtaagatcgaattagcaggagatttttggattggagttaatgatttggacttctccaaaaaattacctcggggttcgtttaagcctttgattcttggaatgactttacagttattggttcaatttagcggtataaacattatccttggttatattacatacatttgcgagattgtagggcttgaaggcaatgtaaaactattcaccagttccattccatatttcatcaacatggttttgagcttgttaccgattacattcattgattacactagcagaaagctaattaccttgttgggtggctttcccattagtgggttgctcattacaatcggcgcattatttgtgaagtatggtcaagacaccaagcccatcgacggcaataggagtttagtttggtcaattggagaaaacccgtttgtgggaggatggattctaactttatgctttctaattgttggaatatttgccatgagcctttccagtataccttgggtttacacgaatgaaatgttgccctcacgagtgaaagttaagggatttgccatttgcgtaacgtttggatggttgggcaattttattttaacgtttctatgccctgtgatgattgaaagattaaaaggcacaacatttataatatttggatctttgacattcttgatatcactttcagttttgatttggttcccagaaacaaagggtatgagcatagaagatattgataaattcttcgaatttgagagtaaagagggcaccaatttacatggggaaaagggtatcaaaacgccggactcaaattctaatggcggttctacaagatcctcccaagaagggcaattgcataaacctataaaactgaaaagcgatgaagagatgatcatatga

SEQ ID NO: 79876 - DNA, 132 bp, Saccharomyces pastorianus
atggctagctacgctctacctgaatcttatcactggctagtactacatgggaagatgagtgaagctcaggaaattcagcacaatttagccaaaaagtttaatgaaagccaggccaagggatgcagtccctga

SEQ ID NO: 79877 - DNA, 1083 bp, Saccharomyces pastorianus
atgtgtaaagccggttttgccggtgacgacgctcctcgtgctgtcttcccatctatcgtcggtagaccaagacaccaaggtatcatggtcggtatgggtcaaaaagactcctacgttggtgatgaagctcaatccaagagaggtatcttgactttacgttacccaattgaacacggtattgtcaccaactgggacgatatggaaaagatctggcatcataccttctacaacgaattgagagttgccccagaagaacaccctgttcttttgactgaagctccaatgaaccctaaatcaaacagagaaaagatgactcaaattatgtttgaaacttttaacgttccagccttctacgtttccatccaagccgttttgtccttgtactcttccggtagaactactggtattgttttggattccggtgatggtgttactcacgtcgttccaatttacgctggtttctctctacctcacgccattttgagaatcgatttggccggtagagatttgactgactacttgatgaagatcttgagtgaacgtggttactctttctccaccactgctgaaagagaaattgtccgtgacatcaaggaaaaactatgttacgtcgccttggacttcgaacaagaaatgcaaaccgctgctcaatcttcttcaattgaaaaatcctacgaacttccagatggtcaagtcatcactattggtaacgaaagattcagagccccagaagctttgttccatccttctgttttgggtttggaatctgccggtattgaccaaactacttacaactccatcatgaagtgtgatgtcgatgtccgtaaggaattatacggtaacatcgttatgtccggtggtaccaccatgttcccaggtattgccgaaagaatgcaaaaggaaatcaccgctttggctccatcttccatgaaggtcaagatcattgctcctccagaaagaaagtactccgtctggattggtggttctatcttggcttctttgactaccttccaacaaatgtggatctcaaaacaagaatacgacgaaagtggtccatctatcgttcaccacaagtgtttctaa

SEQ ID NO: 79878 - DNA, 350 bp, Saccharomyces pastorianus
atgtgtaaagccggttttgccggtgacgacgctcctcgtgctgtcttcccatctatcgtcggtagaccaagacaccaaggtatcatggtcggtatgggtcaaaaagactcctacgttggtgatgaagctcaatccaagagaggtatcttgactttacgttacccaattgaacacggtattgtcaccaactgggacgatatggaaaagatctggcatcataccttctacaacgaattgagagttgccccagaagaacaccctgttcttttgactgaagctccaatgaaccctaaatcaaacagagaaaagatgactcaaattatgtttgaaacttttaacgttccagcctt

SEQ ID NO: 79879 - DNA, 350 bp, Saccharomyces pastorianus
ctacgtttccatccaagccgttttgtccttgtactcttccggtagaactactggtattgttttggattccggtgatggtgttactcacgtcgttccaatttacgctggtttctctctacctcacgccattttgagaatcgatttggccggtagagatttgactgactacttgatgaagatcttgagtgaacgtggttactctttctccaccactgctgaaagagaaattgtccgtgacatcaaggaaaaactatgttacgtcgccttggacttcgaacaagaaatgcaaaccgctgctcaatcttcttcaattgaaaaatcctacgaacttccagatggtcaagtcatca

SEQ ID NO: 79880 - DNA, 780 bp, Saccharomyces pastorianus
atgaacaccatttattcaagcccccacagcagcaattccagattatcgttaagaaataaacatcattcgcctaagaggcattctcaaacaagtttccccgcacaaaagtctacgccgcaatcacagcaattgacatctaccacaccacagtctcaacagcaagaagctagtgagagatcagaatcacaacagataatgtttctcagcgaaccgttcgtaagaactgctttagtgaaaggttcatttaaaacaatagtacaattgcccaaatatgtggacctgggagagtggatagcgttgaacgttttcgaattcttcacaaacttgaaccaattttacggagtagtagcggagtacgtaacgcctgacgcgtatccaacaatgaacgctggccctcacacggattatttatggctggacgcaaacaatagacaggtttcactgccagctagtcagtacatagatttggccctcacgtggataaataacaaagtgaacgataaaaacttgtttccgaccaaaaatgggctaccattcccgcagcaattttcgagagatgtgcagagaatcatggtacagatgttcaggatattcgcacatatttatcaccaccactttgacaaaattgtgcacttgtcattagaagctcattggaattcatttttctctcatttcattagttttgcaaaggagtttaagatcattgacagaaaggaaatggctccgctgctaccgttaattgaaagctttgaaaaacagggcaaaattatttataattag

SEQ ID NO: 79881 - DNA, 246 bp, Saccharomyces pastorianus
ctagaggatcccgccgtaggaaacttagggaacgccattgaggttagtgaagatggttctatagtcactgtagtatccagtgccaaattttctggtaaatacttgaaatacctaacaaagaagtatttgaagaagaatcagctaagagactggatcagattcgtctccataaggcaaaaccaatacaaattggttttctatcaagtcactcctgaagatgctgacgaagaagaggatgacgaataa

SEQ ID NO: 79882 - DNA, 1737 bp, Saccharomyces pastorianus
atgactagcttggaaatttgtgaatttgaaagacgagtaacagattccttagacatggaacaatctacagaagatcaagtatgggatgaacaagatcacatgagaaatagacggagaagcaaaagaagaaagaaaatggcatatgtcgcacttgccatggtaggtggttctttggtccttggactaagtggtggtttactagcccccgtcattggcggggggattgctgctggtttgtcaacaataggtattactggtgctacaagtttcttgaccggagtgggtggtaccactgttgttgccgtttcaagtactgctattggtgccaacatcggtgctagaggtatgtcaaaaaggatgggaagtgtgagaacttttgagttcaggccactgcataataatagaaggattaatctaatcctaacagtgtcaggctggatggttggtaacgaagatgatgttagattgccattttctacggtggaccctgttgaaggtgacctgtactcgttatattgggagcccgaaatgctaaagtctattggtcaaacggtcagtattgtagctaccgaaatttttaccacctcgcttcaacaaattttgggtgccactgttttaacagccttgatcagttctatccaatggccgatggctttatcgaaattgggttatattttagataatccgtggaatgtttctttggacagagcttggtctgcaggcaaaattcttgctgacaccctaattgcaagaaatttaggtgcccgccccattacactggttggcttctcaataggtgcgagggtcattttttcttgtttaatcgaattgtgcaagaaaaaggctctaggtttgattgaaaacgtttatctattcggtacaccagctgtcatgaaaaaggagcaactagtcatggcaagatctgtagttagtgggaggtttgtaaatggttattcggataaagattggtttttagcatatttatttagagctgctgctggtggatttagtgctgttatgggtatttctacgatagaaaacgttgaaggtatcgagaatattaattgcactgaatttgttgatggtcatttgaattatcgtaaaagcatgcctaagttattaaaaagaattggtattgctgttttaagtgaggagtttgtcgagatagaggagatgatgaacccagaagaagtgaaaagaaaaaggaaattaataaatgatgtcgatgcagcccaaaaaaaactaagtgaaagaaaaaagcataacagttgggtgccgaagtggttgaaaccgaagaaatccaaatggaaggtcatggtcgaagaagctgtcgaagaaggaagagatatgcaagacctaccagaaaatgacgtcaataacaatgaaaacgaaaatccagatgaacatgaagggatagcaaggcaaaaacgcagagatgctgctcttgtcgatcatggggcattaatgcatgagttacaacttataaaacaagcgatgcacgaagacgaaataaagaataaagcatgccttccaggagaagacaaggaagtggaatcatcaaacgacttcttgggggagtcgcattacaaaccaccgtcaacaccaaaaattaatccaccacaaagccctaataacttccaattgttaagtgctgggagaactattcttccagaggatgatgatttcgaccctcgaggaaaaaaaaaggttgaattctctttcccagatgatatctag

SEQ ID NO: 79883 - DNA, 1407 bp, Saccharomyces pastorianus
  modified_base (1389)..(1389): a, c, g, t, unknown, or other
atgtccgattcggaggaagatttaggtatacagttgaaaggcttgaagatagcgaggcatttgaaggagtcaggggagcatactgatgaagaatccaactcaagccccgaacatgattgcggcttgagtaatcaagatgatttaactgttatgcatacacaggctaaagaagaagtttttaaacgaagagaagaagacggaacacgaaccgaagaagacggaacacgaaccgaagatgctttacatgagggagaagcaggaaaagagggcacaggttttccctcatcacagtcagtgtgcagtcctaatgaagcagatagcggtattgatcgggccgataaacctagtttgctggacccttttaaatctgtgcacgatacggatcctgttccaggtacaaagtccaggagcaattcagactccgactctgattcagatgatggaggctggcaagagatgcccgctgtctcatcgttcaatatatataaccacagaggcgaactagagttgacttccaaggttagaaactcagaacaagcctctgagacgtctcccacagttcctccaggaaaaaattgcaaaagtgtcaatgattctagatttgactatacgaaaatggccgctgagcagcaagcccaacgatcctatcgaacaaataaaaagacagatttcctttttgaccacaaagtactgaaaaagaaaattaacagttcgcaaacttccgtaaatttgacttcttccccttcgactacatccttgaacaatgaaaaaaataatgatgacgatgatgatgattcttatgacgaatatgaggacgacgtggaaccagtgaacgacttgaatcgggactcgcagttaaacataacgaaaaatctgctatctgatatggagaagtttgcctacgtaggtgcaataaacattttggcaaatcaaatgtgcacgaatttggctacgctgtgtctttgtattgacattaaatcccacaagaaactagcacatagattacagtttacccagaaggatatggctgcttggaaaactgtggttttatcacggctatatgatcatttggggatatctcaagaagaaattgttatgattgagaagctttctctgcacaaaatccaattggaagatttgtgtaaatgtttgaaaaccactcagagcattgataatccatgggagaatgatagagaccacgaagaagacggtatagaggaaactacggaacgaatgagtccaaatgaacaaaatggctcagtacaggctagtactcccgacccagaacaatccgcaacacctgaaacaccaaaggctaaacaatcaccgttatcttcggacgttccaggaaaagtactcgatccggaaagacctgcaggcatgcaagcntgcactgccgtcgtttac

SEQ ID NO: 79884 - DNA, 963 bp, Saccharomyces pastorianus
atggagaaacggaaaattgaagacgcagatgtctttttcaacttaacggacgatccctttaatcctgtatttgacatgtcgttgcctaaaaatttttcgactagtaatgttccctttgcatctatcgcgtcatccaagtttcagatagatagatctttttattcttcacatttaccagaatacttgaaggggatatctgatgacatcagaatatatgattcaaatggccgttcgagaaacaaagataattacaacttggataccaaaagaatcaaaaaaactgaactgtacgacccattccaagaaaatttggaaattcattcgagagagtatccaataaaattcaggaagagagttggtagatctaatattaagtatgttgatcgtatgccaaattttacaacatcgtcgaccaagtctgcatgttctttaatggattttgtagatttcgattcaatcgaaaaagaacaatattcaagagaaggtagtaacgatactgactcgattaatgtttacgattccaaatacgacgaatttgtcagactttacgacaagtggaagtatgattctccacaaaatgaatatgggatcaagttttcagatgaaccggcaagacttaaccagatttcaaatgatactcaggtgattagattcggaacaatgttgggtacgaagtcctacgaacaattaagggaagccaccataaagtatcgtagggactatatcaccagactgaaacaaaagcatatacaacatttacaacagcaacaacaacagcagcagcagcaacagcagcaacaacaacaacaacagcagcaacaacagcagcaagcacaacaacaaaagcagaaatcacagaacaataattcaaattcttcgaactccctaaaaaaattaaatgattcgttaatcaattcagaagcgaaacagaactcttctataacccagaaaaattcatcatga

SEQ ID NO: 79885 - DNA, 690 bp, Saccharomyces pastorianus
  modified_base (52)..(52): a, c, g, t, unknown, or other
atgaaaaaaaaatttgatcccaaaattctcgaaaatataagtgatgacgatnatgatgatgacgatggtaataagaaacttttatccaacaaaagtaaaaataacactgacgagcaagataaatttccttcaaaaatccaagaggtgtctaggtcgatggctaagacgggcgccacagtagggagtgagccggttagaattacaaatgtcgattatcacgccctaggtggaaacttggatgatatggtcaaggcatattcattggggttatatgacgacgatttagaggaagatccaggaaccatagtggaaaagctcgaggatttcaaagaatacaataagcaggtggagttgctgcgtgacgaaattcgagactttcaactagaaaaccagccagtgacgatggaggaggaggaaaatgatggcaatgttatgaatgatatcattgagcatgaatttcctgaaagttacacaaatgacgaggacgaagtagcactacatgcgggccggctacaggaagaggttgctatagagtacagacggttgaaggaagctacggcgtcgaaatggcaatcatcatcacccgccgcacatactgaaggcgaattggagcctattgataagttcgggaacccggtcaagacaagtcgtttccgctctcaacggctccatatggacagtaaaccataa

SEQ ID NO: 79886 - DNA, 723 bp, Saccharomyces pastorianus
atgtcgttgagcaggtctgagtgcacaatggagtgcgtctccacgtcatcatcatcgtcatcgtcgtcaaacacattttcaaaaacagaagatccgttgaggttcatgtctgaaaggaagaattgctggttatcagtatcggtgtcatcgaggtcgttgttgcctgggccagcggcgttcacgccgctggcaaagggcgaggcggagaagtccataatagagttagaatgttgcattatgcggttaattcgatggaaagacgtgcggttatgcaaacgccaagaaaggttcaaaatacggttagaatcgggcaatattttctgggcgctcgagtacaggtcccagatttctttgtttaaattcaagtccgggtcgaggttcgggactctgttcgtgctcatagttatgttcactaccgtgcaccgtgtacaatgtatatatatatctatatatatatatgcacatgcgatgaacagaacaggggaagggcggaaaagcaaaggaaagaaaacgtgcatgctaataccggggccgggagtggcacacacctatatatatgtggctgggccgggcaccgcaagtgtgcgactcatagtgctgttattattgttgctctgtattgtggtggctgttaataccagcggtagctgcaccggcactaacactatgctgcgctgcttcacatcgttctgctatgtgtcggcctgtggtcggacgcaatga

SEQ ID NO: 79887 - DNA, 111 bp, Saccharomyces pastorianus
atgctattattatttaaaaatggtaagttattggtgaaaataaagtggtcatcgaaggaggacgagcaggaagtgtccaagaaaattagggaaaccagaagcattatgtga

SEQ ID NO: 79888 - DNA, 492 bp, Saccharomyces pastorianus
atgttatgtttagagtatgatataggacttctctctctttttttttttttgtccaggtggagtgcgatttgttcgttatatgcctcattccgtaagtgtgatcagtcaggacgttatttcgcgctgcaagttccttacttttccatagagttccacaggatggaaggagaaataatgataaaggaaagcagaacatattacccttcttttggagcgtactcccatctgttacccgctcatccaaatgcacattgtgttaccctcttgttaggtatttttcggagttctccttttctccttcttttcctcttgatacacagaaaagtgggagaaggtagggggggtcagagaatgaagaaaaaaaggggacgcgcaaatccaagtgaaaatctccgggagcgggcggatcccactaacggcccagccgaaaatggaaaaaaagggtcggtgacgtgtgggtgccagctggcggtagcaatgacgacgtgttga

SEQ ID NO: 79889 - DNA, 735 bp, Saccharomyces pastorianus
atggcggttgcttcttcgtcatcaatttccgcgcgttcgattttatttaaaagtactttctttgaagcgccgagatttttcatgaaatccgtctcaaatccaagcaaattatctttgaatttctttctctttttaccgcgaatcccaagcactgacgctacggggatgtcttcaaattcattgaatatcttgattaacccaatatcgcgtcttttcaacctgtttggcacctgggattttttcaaatcggcgagaaactcctcttgtgtcttaccattttctgacacatgcttgttcagatctagcgatattagcttgtcgaccttgtttaccgtagctgaactattgtattttttcaatggtgttagatttaaatcgtttttgtcaatgatagcagcggaggtgatttcttcttctgtttctgttggtgctgctggcgttactttgggcagttgtggtgtgacttttttcctgttcaatgtcatgggtgaagaagattccagtatgggcgtaggcgtcaaaagtgatctagtctcctctacagtctcttcgctcttgtcatcttccccttcaccgtcctcttcactcttgtcaccaccgatactgggctttttcacctctgtaacattggtacgctcgcgcttcctaccttcctccatcttactcatgaattctcttctcttgatgcgttggttggctccgaactctaattcatcttcaggatccgtgtcgtaa

SEQ ID NO: 79890 - DNA, 2859 bp, Saccharomyces pastorianus
atgaaatcattacaacgctcaaaatcttcctttgttaaagaaagcgcagtaatttctaagcaaaaaagtaaattagattatatcttcaaggataaggaaaaattagtctcggatttacggctcataaaagttcctcaacaggcagcagggaagcgaatttcccatatagaaaaaagaatcgaaagtttacagaaagatcttcaaagacagaagacttatgtggagagatttgaaacacaactaaaagtggtgaccagatcaaaggaagcttttgaagaggaaatcaaacaatctgctagaaattatgacaaattcaagctaaatgaaaatgatttaaagacatataattgcttacatgaaaaatatctgactgaaggtgggtcaatcctagaagaaaaaattgccgttttgaacaacgataagcgagaaatccaagaggaattggagagattcaacaaaagggcagatatttctaaaagaaggataacggaggagctttctataacaggagaaaaattggacacccaattaaacgatttaagagtttctttgaatgagaaaaacgcccttcatactgaacgtttgcacgagctgaaaaaattacaatctgatattgaatctgctaataatcaagaatacgacttaaatttcaagttgagggaaacgttggttaagatcgatgacttgagtgctaatcaaagagaaacaatgaaagaaagaaaactaagagaaaatatagcaatgttgaaaagattcttccccggagtaaaaggtcttgttcatgatctttgtcacccaaaaaaggagaaatatggcttggcagtgtctaccatcttaggtaagaactttgattccgtcattgtagaaaatttaaccgtagctcaagaatgcattgcatttttgaagaagcaacgtgcgggcactgcatctttcataccactagacacgattgagacagagttacctacattatcattgcctgactcacaagactatattttatcaattaatgctattgactacgagccggaatatgaaaaagcgatgcaatatgtgtgtggcgattccatcatatgtaatacgttgaatattgctaaagatctgaaatggaaaaagggcataagaggcaaattggttacaattgaaggtgctttgatctacaaggccggtttgatgacaggtggtatatcaggagatgccaataataggtgggataaagaagaatatcaaagcttaatgtctttaaaagacaaattactaatccaaatcgatgaactttccaacggtcaacgctctaattcaatcagagcaagagaagttgaaaatagtgtttcactattgaactcggacatagcaaatttgagaactcaagtaacacaacaaaaacgctccttggatgaaaatcgtttagagattaagtaccataatgacttgatagagaaagaaattcaaccgaagataactgaactaaagaagaagctagatgatttagaaaatactaaagataatttagagaaagagaaggaggctttacaaaataatattttcaaagaattcactagtaaaattggctttacaatcaaagaatatgaaaatcattccggtgaattgatgagacaacaatctaaagaattacagcagttacaaaaacaaattttgaccgttgaaaataagttgcagtttgagacagacagactaagtactactcaaagaagatatgaaaaggcgcaaaaggatttagagaatgctcaagttgaaatgaagtctttggaagaacaggaatatgcaatagaaatgaaaatcggatcaatagagtctaaattggaagaacacaaaaatcacttagatgagttacagaagaaatttgtaacgaagcaaagtgaattaaattccagtgaagatattctagaggacatgaacagcaacttacaagtcttaaaaagggaaagagacggtataaaggaagatattgaaaagtttgatttagagagagtaacagcgttaaagaattgtaaaatttctaatataaatatacctatatcatctgaaacaacgatagatgatttaccaatatcttccactgataatgaagcaattacaatttccaacagtatcgatataaactataaaggactacctaaaaaatacaaagaaaacaataccgattcggcaaggaaggagctggagcagaagattcatgaagtggaggaaatattgaacgagttgcagcccaatgcaagagctttggagagatacgacgaggcggaaggaaggtttgaagtgattaataacgaaacagaacaactaaaggccgaagaaaagaaaatattaaaccagttcctaaaaattaagaaaaaaagaaaggaactgttcgaaaagacatttgattatgtgagcgaccatttagacgcaatctacagggaacttactaaaaatcccaactccaatgtggaattggccggtggtaacgcttctttaaccatagaagacgaagatgaaccgttcaatgcgggaatcaaatatcatgccactccgcctcttaaaagattcaaagacatggaatatctttctggtggtgaaaaaaccgtagctgcattagctctattatttgctattaattcctaccagcctagtcccttcttcgtgctggacgaagtggacgcagccctagacattactaacgtccagagaattgctgcctatataagaaggcaccgtaatccagatctccaattcattgtcatttcattgaagaacaccatgtttgaaaaatctgacgctctcgttggggtttacagacagcaacaagaaaactcgtcgaagatcataactttggacttgagcaattacgcagaataa

SEQ ID NO: 79891 - DNA, 507 bp, Saccharomyces pastorianus
atgggacgtttagttggcttagaactaagtaatttcaagtcctatagaggcgttaccaaggtaggattcggcgagtcgaatttcacaagtattatcggtcctaacggatctggtaaatcgaatatgatggatgctatctcattcgtactcggtgtgcggagtaatcatttgaggtcaaacatcttgaaagatttaatctatagaggtgttgtaaacgatgagaatagtgatgattatgataacgagggcgctgcctcttcgaacccacaatccgcatacgtgaaggcattttatcaaaaaggtaacaaactggtggagctgatgagaataatttccagaaacggtgacactagttataaaattgatggaaaaactgtctcctataaggactattctatatttcttgagaacgaaaatattcttatcaaagccaaaaattttctagtgttccagggtgatgttgagcaaattgcagcacaatctcccgtagaattatcaagaatgtga

SEQ ID NO: 79892 - DNA, 306 bp, Saccharomyces pastorianus
atggcatacgtatattttggtctaacgatattctgtgctttatggtcctattccatttatatgaaaagagttgatattattcaacaaagaagcggtcaacatctagatgcaccacttggtccagttttggttgctatagttttatttgtcactttagtggttaattttgttatggcgtttagaaatgcagcaaagtctcgtcaagagttgcaaatacagaatttagaagttcctgaaagaataccagaagtattaaggccacttcaaaattatctattcaagttaatggggccaagcagtgattag

SEQ ID NO: 79893 - DNA, 1611 bp, Saccharomyces pastorianus
atgaaatcattgcctgatctagataagttattttcaaggttattatgcattaatcattctgcaataaaacctgaccaaagaattaattacgttttgttgctaaaggaaactttacaaagcgtgaagtcattgaaagacgcacttaatgatcagttaattcaaagccgtttaattagcgagaccaaaaaaatattcaataatgacgcaattatggaaattgaaaaattaattaatagttgtataaatgaagactgtgtttgggcatcctcagctatacaactacttaaccaacgttcatatgctgtgaaaagtgattccaatgggcttttggatgtttctagacaaatctacaaagaggtaaaagaggaattttttcgtgaggtagaagatcttaccgctaacaacaaaatcaatttagatcataattacgattctgcacgaggcttttatctcagaataaaaagacaggaatttaccgatgacgtcgctacacttccagacgtattcatttcaagaacaataaaaaaaaattatattgaatgtacaaccctaaatataataaaaaaaaatgcgaggttgaaggaagttatggaagagattttacttttaagtgaagagacagttgatgaactgctcgataaaattgcaacccatatttctgaactatttatgattgcagaagcagtggctatcctggatttggtttgttcattcacatataatttgaaagaaaataattacacaataccgatttttacaaacaatctactaattcgagattcaagacacccactacttgaaaaggtactaaaaaattttgtccctaacaccatatcaagtacaaaacatagctccagcttacaaatcataaccggatgcaacatgagtggaaaatctgtttatttaaaacaagttgcccttatttgcataatggcccaaatgggatcaggtataccggcactttatgggtcttttcctgtctttaaacgtctacatgcaagagtctgcaatgacagtatggaattaacctcatcaaattttggttttgaaatgaaagaaatggcttactttttagatgacataaatacagaaacactgttaattttagatgaacttggtcgtggttcaagcatcgctgatgggttttgtgtgtctttggcagtaactgaacatttacttcgaacggaggcaacggtatttctttctacacacttccaggacattcctaaaataatgtctaagaagccagcagtttcccatcttcatatggatgcagtccttctcaatgacaattctgtcaaaatgaattatcagttgacccagaaatctgtcgcaatagagaatagtggaataaaggtggtaaaaaaaatattcaacccggatattattgcagaagcgtacaatatccattcgcttttgaaaattgcaaaagcaaggactgaaaacgaagattcaaatggcgttgttgatcaaaagaccataaaccaaatgaagagaatacacaatcttgtagcgatattgaaagaatgtgcaggaaatgaaaaagagcccttgactttagggaaattaaaagaaataaactccgacttcatcgaaaattttggagaataa

SEQ ID NO: 79894 - DNA, 1011 bp, Saccharomyces pastorianus
atgagtgaatctaatctatctagttttatcagtacaaattatttcaatttaaggtcggcggctaattcttcaaactctatttcgaagccaagtacgaaaaagagtatcaggaaccaaaaatcgccaactaacataagtggttgggctctcaaaaagaaaacgctacaaatagcagagacaacatgggaaaacaatgaaaaagattcaacacatagccattacttaatgactggatcaatggcctctaggaccgcaacctccttaagtcgatacagcaccaacgcttcactcctcggtcctagtattgactgtgttctttgttgcatatacgaagtgccaagagacataagtacgcggattgggttatgtattatcaactgtaacacgggacagatgtatctttcagatttcatggattcacaaatttacattcgtgtagttcataaactccaaatttaccaacctacggaaatactgattccaagcagttctctagctccaacagtatcaaaattagcgacaatgataaaatttaatgtggccgagacagttaaaattgaagagggttcacggaagtgcttcaatagccaagatggactggcggcgattacaaagtatttaatggatgatacaaaaaaggacttgaaaatcgaggagattatagataaaacgtttgctctttgtgctgcatctgctgcgataagctacatggaagagattatatccaaaagcagccgaaatttgaatgcgtttcgaaaactacgtatacagtttgaaggaacagaaaatacaatgctgattgattctaaaaccgtcagaggtttagaacttgtagaaaataaattggataagaatggcatatcactatggaagttcttggataccacgtccactaaaatgggacaaagatcacttcggaacagtatactgcagccattaactgataggggcagtatcgaaatgagactagaggccctagaagaattgaaagccaatgatgaccttctataa

SEQ ID NO: 79895 - DNA, 1350 bp, Saccharomyces pastorianus
atgccagcagtaaagacgtcagcatgcagtatggtagttatggatgaagcagacagattgttggatatgagttttattaaggataccgaaaaaattctgaggctattgcctaaacaaagaagaacgggtttattttctgcaactatgcgtagcgccggatcagatatctttaagacagggcttagaaatcctgtcaggattaccgttaactctaagaaccaggcgccctcctctttgaaattaaattactgtgtcgtaaatcctgccgaaaaactacaacttttggttagcgttttgaataactacaaattcaagaaatgtattgtatattttccaacatgtgtgtcagtctcctacttctactcatttatccagtatttgggaaagagaaatattctcgtgaatgaagtagaagtattttccttgcatggaaaacttcaaacatcggcaaggacaaaaactctaacagcttttactgattcgctaagtaattctgttttattcacaacagatgtggctgctagaggtattgacatacccgacgttgatctcgtcatccagcttgatcctcctaccaatactgatatgttcatgcatagatgtggtagaactggtagagcaaatagagtgggtaaagcaattacgtttcttaatgaaggcagagaagaggattttattcctttcatgcaagttaaaaatgtggaacttgaagaacttgatttggaagtaaagggcataacaacaaacttttacgaggactttagaaattggatactagaagatagggatagatttgataaaggtgttaaagcatatgttgcctttattaaatactactcaaatcattccgcaacttcaatttttaggcttcaatctttagattatgttggtattgcgaaattgtatggtcttttccgcctacctagaatgcctgagataacaaagtacttagccaccgaaaaacaagaagggattttcccagggaattggttggtcgatcccccagttaatatggatgaatataaatacaaggacaaaaaacgtgaaaaggagagacaagaaacattaaaaaatataagcctgattaatgataagaagaagctgaaaagtgagttgaagaagaagaatttagcgtggtcagataaaacattgacgaaagaacggaaactcgagagaaaggaaaagatgagtttaaaaaggaaggctatagaggaagaattgaaagcagaagagctcgatgaaaatgctgaagaagagcgtattaaagaggattggaaagaaatcgttttacagaataaacggaagaaagtttccagcaaagctatccaaggcaattttgaccacttataa

SEQ ID NO: 79896 - DNA, 213 bp, Saccharomyces pastorianus
atgtcaaagtcattggaatgggataatctcgggttttctttacttccttggataaggacaggactggatgttatgggttttgagaccatgactccagtccaagcatcgacaattcccatgcttgctggcaacaaggatgtagtagttgattctgtaacaggctcaggtaagaccgctgcgtttgttgacctgcaggcatgcaagcttggcact

SEQ ID NO: 79897 - DNA, 168 bp, Saccharomyces pastorianus
atgattcatatcttgaacgaaagtaagtatcaatcgtccacaaaaggtcaacaaattgattccttaaaaaatgttgcgagacaatgtatgatttatgctggtatgattcaatacagaatgccaagggaaacgtacagcactttaattaatataggggtctctctatga

SEQ ID NO: 79898 - DNA, 249 bp, Saccharomyces pastorianus
atggcgtccatatattttgataatgctggtatatcgagacagattcatgttaaaaacaaagaaatttgtatgctgctcttaaatatctcctctatcagggagctatatttcaataaacaatggcaagaaacactatcccaaatggagttattggatttacttcctttctcagacgagctatctgctagaaagaaagcacaagatttctctaatttagatgacaacattgtgaaaaatattccaaattag

SEQ ID NO: 79899 - DNA, 900 bp, Saccharomyces pastorianus
atgatgaatagtaaggtggggtccgcggacaccggccgtgacgatacgaaagaaactgtttatatttcttcgattgcgcttttaaagatgctaaagcatggtagagctggtgttcccatggaagtcatggggttgatgttaggtgagtttgtcgatgattatacggttaacgttgtggacgtgtttgcgatgcctcaatcgggtaccggagtttctgttgaggctgtcgatgatgttttccaagcgaagatgatggacatgttaaaacaaacgggcagagaccaaatggtcgttggctggtaccactctcatccagggtttggctgttggctatcttctgttgatgttaatactcaaaaatcttttgaacaactaaacagcagagctgttgctgtcgttgttgaccctattcaatccgttaagggaaaagttgtcatcgatgcttttagattgattgacacgggcgcattgataaataacttagagcctagacaaacaacctccaacacaggcttattgaacaaggccaacattcaagccttaattcacggtctgaataggcactactattctttaaatattgattatcataaaaccgcgaaggaaaccaagatgttaatgaacttacataaagaacagtggcaatcaggtcttaagatgtacgattatgaagaaaaagaagaatcaaatttggctgctacaaagagtatggttaagatagccgaacagtactctaagagaatagaagaggaaaaggaattaaccgaagaagaacttaagacaagatacgttggtaggcaagatccaaagaagcacctttccgaaacagcagatgagacactagagaacaatattgtttctgtgctgacggcgggtgttaattcagtggcaattaaataa

SEQ ID NO: 79900 - DNA, 1905 bp, Saccharomyces pastorianus
atgctgggtgtgaacggtgacatcgaacatgctggtagaaagatggaaacaagagttgatttgaaaaaactggccaaggctgaacaaaagatcgcaaagaaagtcgccaagagaaataacaaatttgttaaatacgaggcttctaaattgatcaatgaccaaaaggaggaggattacgattctttctttttgcaaatcaaccctttagaattcggttcatccgctggtaaatccaaggatatccatattgacactttcgacttgtacgttggtgacggtcaaagaattttgtccaacgcccaattgactctaagttttggtcacagatatggtcttgtgggccaaaatggtattggtaaatctactttgttaagggctctatctagaagagagctgaacgtccccaaacatgtttcgattttacacgtggaacaagagttaagaggtgatgatacaaaggctttacaaagtgtgctggacgcagacgtttggagaaaacaactattaagtgaagaagccaagatcaatgaaagattaaaggaaatggatgtattaagacaggaattcgaagaagacagtttagaagttaaaaaattggacaatgagagagaagacttggataaccatttgatacagatttctgacaaattagtcgatatggaatctgacaaggctgaagctagggcagcatcaatcttatatggtttagggttcagtacggaggcacagcaacaacccactaattccttttccggtggttggagaatgagattgtccttggcaagagccttattctgtcaaccagatcttttgttgttagatgaaccttccaatatgttggatgtgccatccatcgcttatttagcagagtatttgaaaacatatccaaatacagttttgacagtttctcacgaccgtgcattcttgaatgaagtggctacagatatcatttatcaacacaacgaaagactagactattacagaggccaagatttcgataccttttacaccacaaaggaggaacgtagaaagaatgctcaacgtgagtatgataaccaaatggtttacagaaagcacttgcaagagtttattgacaaatacagatacaatgctgccaaatcacaggaagctcaatcaagaattaagaaattggaaaaattgcccgttttggagccacctgaacaagacaaaaccattgatttcaaattccctgaatgtgataaattgtctccaccaattatccaattgcaagacgtttcctttggttatgatgaaaacaacctattattgaaagatgttaacctggacgttcaaatggattccagaattgcccttgtaggtgccaatggttgtggtaagactacactgttgaagattatgatggagcagttaagaccactaaaaggctttgtatcaagaaacccaagattacgtataggctacttcactcaacatcatgtggattctatggatttgaccacgtctgcagtggactggatgtccaaatccttcccaggtaaaactgatgaagagtatagacgtcatctaggttcatttggtatcactggtaccctgggtctacaaaagatgcaattattatccggtggtcaaaaatctcgtgtagcattcgctgcattgtgtttaaataatccacacattttggttctggatgaaccttctaaccatttggataccactggtctagacgctttggtggaagccttgaaaaatttcaacggtggtgtcttaatggtttcccatgatatctctgttattgactctgtttgtaaagagatttgggtttcagagcaaggtactgtcaagaggttcgaaggtacaatttacgactatagagattacatcttgcagtctgctgatgctgcaggtgtggttaaaaagcattga

SEQ ID NO: 79901 - DNA, 168 bp, Saccharomyces pastorianus
atggcaagcatcggttcgcaagtgagaaaagctgcttctagtattgaccctatcgtcacggattacgcagtgggctactttaaccacttgtccggaataacttttgatgctgttcaaagtaagcaagtagatttgtccactgaagtgcatttgtgtccgatttattga

SEQ ID NO: 79902 - DNA, 147 bp, Saccharomyces pastorianus
atgcaccgtggtcctgttacaatttcatccttatacgacttggtgtggctggctaactcttccctgttccctttgctcgttattggcgtgcattttctcagttttaggtttgatacgtctgcgcagtcagacagaaaacatagctaa

SEQ ID NO: 79903 - DNA, 249 bp, Saccharomyces pastorianus
atgctaaattataaattgattttactgttttcctctttcctacaattaatctctttttctggctttatgatatgttgtttaacttcaccaataattagaaactgggggctggctcaagctgctggagtttcatatggtacctttggttactgtaaaactttgaattctttttcctgctctcgagtacgtttaatatataacacctcgaaagaaaaactacctggccttttcttaaacgttggtggctaa

SEQ ID NO: 79904 - DNA, 453 bp, Saccharomyces pastorianus
atgtggaaatgcctactgaaaaaaaaaatggcaaatattttatattatgagggaatctcaagccattcacaagataactacgaccctccttggttatttggcgttgaggctacccaatcagccgatcgctttaaaatatattcaaaaaaaaatcattgtctcacagagccccgccaatatcaactacaacaaccaaataattaccaggatcaaagtgaggttcctcataactctttcattccttggtattcccgaagaagaccagtaggatacaaccacaattacaatcgctactactcacagacaactcatggtaacagcgaacactcccgacaaacattgccacagacctacaacatacacagcatgctccccagaaagtacaagcccgcctacaaaaaacaggcacatcgtgtgaagagtaatccacaaccagcttatactttccaatga

SEQ ID NO: 79905 - DNA, 567 bp, Saccharomyces pastorianus
atgggtgtcccatctatcacaacaaacgtttctgggttcggtgcctacatggaagacttgattgaaacagaccaagcgaaagactatggtatttatattgtagaccgtcgtttcaagagtcctgatgaatctgtcgagcaattagcagattacatggaagagtttgtaaacaagaccagaagacaaagaatcaaccaaagaaacagaaccgaaagactatcagacttgttagattggaagagaatggggttggaatacgttaaggctagacagttaggtcttcgtagggcctatccagagcagttcaagcaattggtgggtgaaacaattagtgacgccaatatgaacactcttgccggtggcaagaaattcaagattgccaggcctttgagtgtacccggatcccccaaagtaaggtccaatagtactgtttacatgactccgggcgatttaggtacccttcaagatgctaataatgcagatgactattttagtttgagcacgaatggagccatcgacaatgacgatgatgacaacgatacgtctgcatactacgaggataattaa

SEQ ID NO: 79906 - DNA, 1368 bp, Saccharomyces pastorianus
atggctcgtgacttacaaaatcatctactgttcgaagtagcaacagaagtagctaacagggttggtggtatttactctgtcttgaagtccaaggctccagtcactgtggcacaatacggagacaactatacgctgcttggacctttgaacaaggcgacttatgaaagtgaggttgaaaaacttgactgggaagatgaaagtatctttcctgaagagctgttaccaatcccaaaaactttgatgtccatgcgggaaaagggtgtgaactttgtctacggtaactggttgattgagggagcaccacgtgtcattttatttgagctggattctgtaagacactttttgaacgaatggaaggctgacctatggtctctcgtcggaattccatcaccagagcatgatcacgaaacaaacgatgccatattgttgggttatgttgttgtgtggtttttgggagaagtttcaaaactggacagtagccatgccatcattggccatttccatgaatggctagctggtgtagccctgccattgtgtagaaagaaaagaattgatgttgtaacgattttcaccacgcacgcaactttattgggtagatacttgtgtgccgctggtgatgtagatttttataacaatctacagtattttgatgtggaccaagaagctggtaagagaggcatatatcataggtactgcattgagcgcgctgcggctcatactgccgatgtttttacgactgtgtcgcaaatcactgcattagaagcggagcatttgttgaagaggaaaccggatggtatcttgcccaatggtttgaacgttgttaagtttcaagcagtacatgaatttcaaaatctgcatgccctgaaaaaagacaaaattaatgatttcgtcagaggccatttccatggttgttttgatttcgatctagacaacacagtttatttctttatcgctggtagatatgaatacaaaaacaaaggtgctgacatgttcattgaatcattggctcgtctcaattacagattgaaggtttctggatccaagaagactgtggtagcgtttttgatcatgcctgccaaaaccaattccttcactgtggaggcactgaaaagccaagccattgtaaaatctttggaaaatactgttaatgaggtcaccgcatccattgggaagagaattttcgagcatacgatgagataccctcataatggcctagaatcagagttgcccactaatttggatgagctgttgaagagttctgaaaaggttttgctgaagaaaagggtattggcgctgagaagaccttacggggaactgcctccggtagtcacgcataacatgcgcgatgatgctaacgatccattttaa

SEQ ID NO: 79907 - DNA, 852 bp, Saccharomyces pastorianus
atgaaaaattctaagattgctgaggcgctcaaagatgtcaccggagatcaagagatcgacgatatcaacatttcagacgaatttcaaaggacagttgaattgccagaattggaaaaacaagatataaaggataataaaggggaagacaaggaattggaagtagaagaaacagagaaagaaacttctcttcctgatcttgtagtggaagaaaacatcacggaggaaaagaatgaaattaagcaagaagaagaggaggtatcccagttagacttcaatgaaacagagtcaatcagtaaagaagccccaaacaatgacgaaaatggatttgaagatcaaagtacaagggaaaatcccaagaaagcaagtgcagatgacattttcaaagatattttggacgaaacgaatgagtttttagagcaactaaaaattgttgatgattccgaactaaacgctctactccaatcactagatgcgaaagactccacaactcaaactactgagcaatccaagaaaaacaatgacaagccgcaagacgtaataacgactagcgagatccggaagctgaatgaaaaggaagctgtatatatatacacgtcactagccggaggcggtttccatatgatccccagaacaaatcgcttaagcacaatcctgacggccaaccgaatcccgttcacctacagagatcttggcacagatgatgaagcgagaaaagtttggaagactttcagcaagggtaggagtcttccaggtgtggtcagaggacacaatgacttaatcgggaactgggaagaaatagaagaagctaacgaagactacaaattgcgggaactcatttacgatactatttaa

SEQ ID NO: 79908 - DNA, 414 bp, Saccharomyces pastorianus
atgattagacggcggtctaccaattatacggccgcactaaattccagggaacaagcccgggaacgcgaaagcagtatcggggagcacgccccgggagccgaacgtaggagtagcggacccatggatttccagaatactatccacaatatgcaatacaggaccactaacgactctgacctgagccacgctggcgtggatatgggtgactccatctcccatacaccgatccgttctcgtgctggcaacaaacccattttcaaaaactcgtaccttgacaacaacagcaatggtaacagcgcaagagtcccacatggctctcctccacagttgggcgcgcgtagaaagtcgtcttttaagtacgaggactttaagaaggacatctataaccagcttcacatgtttggagagaagtaa

SEQ ID NO: 79909 - DNA, 291 bp, Saccharomyces pastorianus
tctagaggatcccggcgaatcggcattagccgccgaagtcgcgctcaacgcaaacatctggaccccacggactatcgatttttagggctcgggcattcggtcatcggagacgaccacacgccattcctggccgccggagtacccgtattacatgcaatcccgctaccattcccaagtacatggcacaccgtggatgatgacttccggcacttagacgccgcggagactcgtcactgggcgctgcttgtgtgcgaatttgtagtacagtcactacgctcccgtaaccagtga

SEQ ID NO: 79910 - DNA, 1359 bp, Saccharomyces pastorianus
atgaaaaccttgagcaacttttgggcagatcgatctgcgtatttgtggaaaccccttgtttatccaacctgtccttcggaacacatttttactgatagtgacgttataatccgcgaagatgaaccaagttccttgatcgcattttgcttgagtacttctgactatagaaataaaatgatgaacttgaatgcccaacaacaacagcagcagcaaacagcagaagctgctcctgccaaaacaggaggaaacagtggaggaactacgcaaaccggggatccttctgttaacatttctccctcagtttctacaacttctcataataaggggagggactcagaaatttcatccttagtaaccaccaaagagggcttgttgaacacccctcccattgaaggcacccgagataggaccccacaagaatcacaaacgcattcccaagcaaatttagatactcttcaagaattagagaaaattatgacaaaaaaaacagccacgcacttgagatatcaatttgaggagggtttaacggtaatgtcatgtaaaattttcttcacagaacattttgacgtgtttagaaagatttgtgattgtcaagaaaacttcattcaaagtttgtcaagatgtgttaaatgggattccaatgggggaaaaagtgggagcgggtttttaaagactttggatgatagatttattataaaggagctgtcacacgcagaactggaagccttcataaaatttgcaccaagttattttgaatacatggcacaagcaatgttccatgatttgcccacgactttggctaaagtatttgggttttatcaaattcaagtaaaaagctctatttcaagttctaaaagttataaaatggatgttatcattatggagaacttattttatgagaagaaaacaacaagaatttttgatttgaagggttccatgagaaatagacatgtcgaacaaacaggtaaagctaatgaagtgttgttggatgaaaatatggtagagtatatttacgaatcacctattcatgttcgcgaatatgacaagaaacttttaagagcttctgtttggaacgacacattatttttggccaaaatgaatgtgatggattattccttagtcattggtattgacaatgaagggtatactttgacagtaggaatcattgatttcattcgaacgtttacatgggacaaaaaattagaaagttgggtcaaagagaaaggcctagtagggggggccagtgtgatcaagcagcctaccgttgttacaccaagacaatataaaaaacgttttagggaagcaatggagaggtatattttgatggttcctgatccgtggtatagggaaggaaattaa

SEQ ID NO: 79911 - DNA, 6108 bp, Saccharomyces pastorianus
  modified_base (1715)..(1747): a, c, g, t, unknown, or other
atgtcatcggatgaaccccatgcatctatatcctttccagatggctcacatgtccggtcgtcctccactggtacttcatctgtgaacacaatcgatgctaccttatccagaccgaactatattaagaaaccgtccctgcacattatgtcgacatctacgacgtcgactacgacggatctagtgacaaacccaattctgagcaatatctccgtgccaaaaataagcccccccacatcatcctcgatagcaacagcgacatcaacaagtcacgtgaccggcactgcgtcgcattcgaatattaaagctaatgctaacactagtaccagcgtgaataagaaaaatatgccgccaacaactagtgggaggataccctctaacaccatcaagagatatccgagtcgctataagccttctcactcgctgcagctgcccattaagaacgactccaactttaaacgatctagcatatatgcctccaaatccactgttactgctatccccattaggaacaatcggccaatttccatgcagaattcctatgcgcgcactcctgacagcgatcatgacgacgttggcgatgaagtgtcttcgataaagagtgcctcttcttcgttgaccgcatccctgtccaagagtttcctgttcgcattttataacaaccgcaagaaggacaagaccagtaacaatggtgtcctctcaaaggaatattggatgaaggacgagagttctaaagaatgtttcagttgtggtaaaacgtttaacactttcagaaggaaacaccactgcaggatatgcggccaaattttttgcagcagttgcactctcttgatagatggtgatcgattcggctgtcatgccaagatgcgagtatgttacaattgttatgagcatgcagacacatacgaggactccagtgatgaggagaatgattctacaatgcaattgaatgagccaaggtctcgctctcgctctcgttcttccaataccaatccatattctcattcacattcgcatttgcatctcatttcacaggacaaccataacggtaccgatctccatgatccagtagcagcaacggataaccctcaacagcagaatgaggtctacctattaaatgacgatgacgtacaaagtataatgacctcaggtgaagattctaaattgttcatttctacacccccaccaccaccgaagatggccatcccagcaacaaagcaaggcggatcgctggaaatctcattcgattcggaaaacgatagggctttgcattatcaagatgacaaccccggtcgccatcatcaccttgattccgtgcccacaaggtacactatcagagatatggacaatatatcacattacgataccaactctaattccactttgaggccacattataacaccaataacagcactattaccatcaacaacctcaacaacactacttccaacaacagcaactataacaataccaatagcaacagcaacatcaataatcctgcgcattccttaagaaggtctattttccattatgtaagcagcaatagtgttaacaaggacagtaacaatagctctgcaacacccgcttcgtctgcacaatcttcttccatactggatcctgccaatcgtattatcgggaattatgctcatagaaattacaagtttaaattcaactacaattccaaaggtccttcgcaacaaaatgacacggcaaatgnnnnnnnnnnnnnnnnnnnnnnnnnnnnnnnnnacagtgccagcggtattgctgacaacaataacattccctcaaacgacaatggcacgacgttcactctagataagaagaaaagaaacccactgacaaaatctaaatctacatccgcttacctagaatatcctctaaacgaggaagactcttctgaggacgaaggctccatgtccatatattctgtattgaatgatgaccataaaactgacaatccaattagatcaatgaggaactccacaaaatcttttcaacgagcgcaagcttcactacagcggatgaggtttagaaggaaaagtaaaagcaagcattttcccaacaactcgaaaagttccatttatagagacttaaatttcttgaccaatagtactcccaatttactttctgtagtaagcgacgacaatctatacgacgattcttctcctttgcaagacaaggcctcttcatccgctgcaagcagactcactgacagaaaattcagtaatagcagtggcagcaataataatagcaatagtaatagcaatatcaacaccgatccttggaagagaatcgctagtatatcgggattcaaactgaaaaaggaaaaaaagagagaattaaatgaagtctctcttttacacatgcatgccctattaaaacaattattgaatgatcaagaaatttccaatcctcaagaatggataacccttctagatggcgctttgcgtaaagttttaaggaccatcctgaacgcgagggatttgaacaccttagattttagacaaacttacgttaagataaaaagaattagtggtggatctcctcaaaattcagaatatatcgatggggttgtcttttcgaaagcattgccgtcgaaaacaatgccacgacatttgaaaaacccaaggatactattaatcatgtttccactggagtaccaaaagaacaataaccactttctaagtatagagtccgtcttcaggcaagagcgcgaatatttggataaacttgtttcgagattaaagtcattacatcctgatattatatacgtcggcgccaatgttagtgggtacgcgttagaactattaaatgactcaggcattgtcgtacagtttaatatgaaaccacaagtcattgaaagaattgccaagctaacagaagcagatattgccatttctgtggataagttggctacgaatattaagatgggtgaatgtgaaacttttgaagttaaaagctacatttatggaaacatcagtaaaacatatacatttcttcggggctgtaacccagaacttggtggaacaattttgttaagaggtgatagtcttgaaaacttgagaaaaatcaaacaagtctctgaatttatggtctacgcaattttttcattgaagttggaaagttcattttttaacgataatttcatacaactttctacagatgtttatttgaagagagctgaatccaaaaaactgcaagttttcgaaggttattttgcagatttcttgatcaaattcaataacagaattttgactgtatcaccaacggtagattttcccattccctttttattggaaaaagccagaggcttggaaaagaagctcatagaaaggatcaatcaatatgaaagcgaatctgatttagatcggcaaacgcaactaaatatgcttcaaggcttagaatcgactatcactaagaaacacttaggaaatttaataaaattcctgcatgaaatggaaattgaaaatttagagcttgagtttcagaagagaagtcgtcaatgggaggtttcatattcatcatcacagaacttacttggtacgggctcacaccagtctataacagttctctactcaatggtttcaacaaagactgccacaccttgcgttggccctcaaattgttactattgactatttttgggacagtgatatttccattggtcagtttatcgagaacgtcgtgggaactgccaggtatccctgccaacaaggctgtaatggtctgtatttggatcattatagaagctatgttcatgggtcaggaaaagtagacgttttaatcgaaaaattccaaactagattaccaaaattaaaagatattatcctcacgtggagttattgtaaaaaatgtgggacatctactccgattttacaaattagcgaaaaaacctggaattattctttcggtaaatatttagaagtcatgttttggagttacaaagatagcgtgacaggaattgggaaatgtcctcatgatttcactaaagatcatgtcaaatactttggttacaatgatttagtggttcgactagaatattctgatttagaagttcatgaattgataaccccaccacgcaaaataaaatggaaacctcatatcgacatcaaactgaaggtggaactatactataagattctggaaaagatcaataatttctatgggagtgtcctaagtcggttggaacgtattaaattggatagtatgactaaagataaagttcttagtggacaagctaaaattatcgaattgaagagcaatgctacagaggagcaaaaattaatgttgcaagacctggatactttttacgcagatagtccttgcgatcaacatttaccattgaacctggttatcaaatctctatacgataaggctgtaaattggaactctacatttgcgatatttgcaaaaagctatttgccttctgaaactgatattagtcgtatcacggccaagcagctgaaaaaactgttttacgattcttcaagaaaagacagcgaagacaaaaaatcacttcatgatgaaaaggcgaagacgaggaaaccagaaaagaacgaattaccgttagaggaattgaaagatgtcgaaaagccgaaaattgatagcaagaatacgacagagaatcgtgacataacgaacgaaccacagaatgccgtgacgataaccactcttaaagacgacactccaattattccaacaagtggtactagtcacttgacagttacaccttctgcatcgtcggtttcttcttctttgacccctcaaaccgaagaacgtccgccaataagcagaagtggaacaggtatatctacgactcatgataaaagcactagacctaacataagaaaaatgagtagtgatagtagtttatgtggactagcatcacttgctaatgaatatagtaaaaataataaggtgagtaagctagctacatttttcgatcaaatgcattttgatgccctgtcgaaagaatttgaactggaacgtgaaagggaaagattacaacttaataaggataaataccaagccatacgattacaaacatccacaccaattgtggaaatttataaaaatgtcaaagacgcagttgatgaaccgcttcactccagaagttcaggcaataatttgtcatctgcgaatgttaagactttggaggcacctgtgggagaacattctcgggccaataattgtaatcctcctaatttagatcaaaacttggaaactgaactagaaaattccattagccaatggggagaaaacattttgaacccctctggaaagaccaccgcaagtactcatttaacttctaagccagtagtaaaagaaacttcagaaaatccgaagtcaatagttagagaatcagataattcaaagtcggagccgcttccacctgtaataacaacaacaactgtcaataaggtagaatccactccacaacctgaaaaatcattattgatgaaaaccttgagcaacttttgggcagatcgatctgcgtatttgtggaaaccccttgtttatccaacctgtccttcggaacacatttttaccgatagtgacgttataatccgcgaagatgaaccaagttccttgatcgcattttgcttgagtacttctgactatagaaataaaatgatgaacttgaatgcccagcaacaacagcagcagcaaacagcagaagctgctcctgccaaaacaggaggaaacagtggaggaactacgcaaaccggggatccttctgttaacatttctccctcagtttctacaacttctcataataagggaagggactcagaaatttcatccttagtaaccactaaagagggcttgttgaacacccctcccattgaaggcgcccgagataggaccccacaagaatcacaaacgcattcccaagcaaatttagatactcttcaagaattagagaaaattatgacaaaaaaaacagccacacacttgagatatcaatttgaggagggtttaacggtaatgtcatgtaaaattttcttcactgaacattttgacgtgtttagaaagatttgtgattgtcaagaaaacttcattcaaagtttgtcaagatgtgttaaatgggattccaatgggggaaaa

SEQ ID NO: 79912 - DNA, 537 bp, Saccharomyces pastorianus
atgagcaacaataaactagacagcgatgatagcaacatggaagaagctgcagccgatgattcatcgctcgataccaccagtatcgatgcgctgagtgacgaggaaaacccgacaagactcgcaagagaaccatatgtggatgcatcaagaaagacaatgggtaggatgatacgttactcttctcaaaagctatcccgaagagctgccagaacattgggtcagattttccccatcaaagttacatcgttgttggaatcctcgcgccattttgcgtctttgaaacttcccgttgaaaccaattcccatgtaatgaccatatcaagtataggctctccaatagatatagacacatccgagtatccggaactcttcgaaactggcaattccgcaagtacagagtcctaccatgagcctgttatgaagatggtccccatcagggtcgtttcctcggatggatacctatacaactttgttatggacccggagagaggcggcgattgcttaatattgtcacagtattccatcttgatggattga

SEQ ID NO: 79913 - DNA, 255 bp, Saccharomyces pastorianus
atggtcatcgaagctcataagggcgagattgctgcaatggcaattagttttgatgggacactaatggctaccgcctctgataaaggtactatcatcaggtctttgacattgaaacgggtgataagatctaccaattcaggagagggacgtacgcgacaagaatttactccatatcattcagtgaagatagccagtacttggcggttaccggctcttccaaaaccgtgcatatcttcaaattggggcattcaatga

SEQ ID NO: 79914 - DNA, 546 bp, Saccharomyces pastorianus
atgtctgattcatcacctactatcaactttattaatttcaatcaaaccggaacgtgtatttcccttggaacgtcgaaaggtttcaaaatattcaattgtgagcccttcggaaaattttattcagaggacagtgggggctatgctatcgtcgagatgttgttctccacctcgttactagccctcgttgggataggcgatcaacctgcgctttcaccaaggagattgcgtataatcaacacaaaaaaacattctattatctgtgaggtgactttccctacttctattctgagtgtgaaaatgaataagtctcgattggtggtacttttacaagagcagatttatatttatgatatcaacaccatgagactattgcatactatagaaacaaaccctaacccacgtggccttatggctatgtctccttcggtagccaacagctatttagtgtatccatcaccaccaaaagttattaactccgaaattaaagctcatgccaccacaacaatatcacattgtcagttggtggcaacacaggggatcctctag

SEQ ID NO: 79915 - DNA, 555 bp, Saccharomyces pastorianus
atgaatatgatagaaaatgttgagaaaaaggaggcagcattaaaaacaatgattaaaacgattgaaaaagataagatgaaaatccaagagactatatcgaagttgaacgaatataaaagagaaactttagtcaaaacatgggagaaagtgacacttgattttggtaatatttttgctgaccttttaccaaattcatttgcaaaattggttccatgcgaaggtaaggacgtaacgcagggtttagaggttaaagtaaagcttggtaatatatggaaggaaagtttgattgaattgtccggtgggcaaaggtcgttgattgctttgtcattgattatggcattgttgcaatttcgaccagcgcctatgtatattttggatgaagttgatgctgctcttgatttaagtcatacgcaaaatataggtcatttgattaaaacaaggtttaaaggatctcagttcattgtagtctcgcttaaagaaggtatgtttgccaatgctaatagggtcttcaggacgagatttcaagatggtacctccgtagttagtataatgtga

SEQ ID NO: 79916 - DNA, 990 bp, Saccharomyces pastorianus
atgtatacgaccacaggtacattgtctggtggtagtagaaatacctctgaatcgttattagttgatattcaagaatacaatcaaattcaaaaacaaattgagaccattcaggctgatctcaaccatgtaacggaagagctacagacgcaatatgctacatcgcaaaaaacaaagaccattcaaagtgatttaaatctctcgttgcataaattggatttggctaagcgtaatctcgacgcgaatccatcttcccaaataattgcgaggaatgaagaaattttgagggacattggagaatgtgagaatgaaatcaaaaccaagcaaatgagcttaaagaaatgtcaagaagaagtttcgaccattgaaaaagacatgaaggagtacgatagcgataaaggatccaagttaaatgaattaaagaaggaattgaaactattggcgaaagagctggaggagcaggaatcggagtcagaacgtaaatatgacttgtttcaaaacttggaattagaaacagagcaattgagctcagaactagattctaataagacgctattgcaaaaccatttgaaatctattgaaagtttgaaattggaaaattctgatttggagggaaagatacgaggtgttgaagacgaccttgtaacagtccagacagaactgaacgaagaaaagaaaaggttgatggacattgatgatgaactaaatgaattagaaacattgataaagaaaaaacaggacgagaaaaaaaacagtgaattagaactacaaaaattggtccatgacttgaacaaatataagtctaatacgaacaacatggaaaagagaattgaagatctacgacagaaacacgaatttcttgaggattttgatctggtgacaaatatcgtcaaacaaaatgagggtatcgatttggatacttacagagaaaggagtaaacaattgaacgagaagtttcaagagcttagaaaaaagttaatccaaatattatga

SEQ ID NO: 79917 - DNA, 2007 bp, Saccharomyces pastorianus
atgaaggtagaggaattgattattgatggtttcaaatcatacgctacaagaacagtcattactgattgggaccctcaattcaatgctattacaggtctaaatgggtccggtaagtcgaacattttggacgccatttgcttcgtgctcggtatagcatcaatgagcactgtgcgagcatctagcctgcaagatttgatctataagcgtggtcaagcaggtgttaccaaggcaagcgtaaccattgtttttgataataccgataaatcaaattctcccattgggttcactaactctcctcaaatctctgttacaaggcaagttgtgcttggtggaacttctaaatatctgataaatgggcatagggcacctcaacagtcggttttgcaactatttcaatccgtgcagttaaatatcaataatcctaattttttaatcatgcaaggtaaaattaccaaggttttgaatatgaaaccctcagagatcttatcactgattgaagaggcagcagggacaaaaatgttcgaggatcgtagggaaaaggcagaaagaacaatgtctaagaaagaaactaaattacaggagaacaggactctgttaactgaagagatcgaacctaaactggaaaaacttcgaaacgaaaagagaatgttcctagaatttcagtctactcagactgatttggaaaaaactgaacgaattgttgtatcctatgattactataacattaaacataaacatacatcaataagagaaactctggagaacggtgagactcgtatgaaaatgttaaatgaatttgttaagaaaacttccgaagaaatagacagtttgaatgaggatgtcgaggaaatcaaacttcagaaagaaaaagaactacacaaagaaggcacaatctccaagttggaaaataaggagaacggtcttttaaatgaaatttctcgtttgaaaacttcactgtcgataaaagtagaaaatttgaatgatactactgaaaaatcaaaggctctggagtcagaaattgcaagttcctctgcaaagctaatcgaaaaaaaatcggcatacgctaacactgaaaaggattataaaatggtgcaggaacaactcagtaaacaaagggatctttataaacgaaaagaagaattagtttccactttaaccacaggtatttcctcgaccggtgccgcagacggtggttataacgcacagttggccaaggcaaagactgagctgaatgaagtctccttggcgataaaaaaatcaagcatgaaaatggagttgttgaagaaagagctattgacaattgaacctaaattaaaggaggccacgaaagataacgagttaaatgtgaagcatgttaaacaatgccaagaaacgtgcgataaactacgagcccgactagtcgaatatgggtttgatccatcacgaattaaagacctgaagcaaagagaggataaattgaagagccattattatcaaacatgtaagaactctgaatatttaaaaagacgcgtaacaaatctggaatttaactatacgaaaccttatcctaattttgaagccagctttgtccatggggtggtgggtcaacttttccagatagataatgataatattcgctatgctactgctttgcaaacttgtgccggaggtaggctattcaatgttgttgttcaagattctcagacggccactcagctattagaaagaggaagattacgcaagcgtgttaccatcatacctcttgataagatatatacgaggccaataagttcacaagtgcttgatttagccaagaaaattgctcctgggaaagttgaattggcaataaatttaataaggtttgatgaatctatcactaaagcaatggaatttatttttggaaatagtttaatctgtgaagatccggaaacagcaaagaaaattaccttccatccaaagatccgtgctagaagtatcacccttcaaggtgatgtatacgatccagaggtacatgtctggtgtagtaga

SEQ ID NO: 79918 - DNA, 156 bp, Saccharomyces pastorianus
atgaatccagttgatcaccctcacggtggtggtaaccatcaacatattggtaaggcttctaccatctctagaggtgctgtttctggtcaaaaggccggtttgattgccgccagaagaactggtttgttacgtggttctcaaaagacccaagattag

SEQ ID NO: 79919 - DNA, 546 bp, Saccharomyces pastorianus
atggagtcgccttcgcctacttcctcgccttccttgcctacacgtttcacgccatgtcctgtggccgtattgccgtcttcgtcatcgccctcctggtccttctccactagttgtatgcccgagtctacttgctccgagatcagtaccagtttcttcgacacattcaactcctccagcgacttgttcaggtcaagaatctgtttactcagtgataatcggtcgttcagcatcttttcagattccttcacatatttcagtttttccatctccagttgcgtttctagatcgcacagctttgtaaacttgctctctaatttctccatggtcagcttgactaactcttggattatcgcttggctttcttcaatgtacttttcggagatctctctcgacttatcagagaccttacccaatttgtcgtcgccttgcagtagcgtctggacagcatcattcacgcattccatcaacttcgaaccggacacactaccatcgcggctgtcgccacccttaccattcagcgttgaaccaacaacttcttggatgtag

SEQ ID NO: 79920 - DNA, 1257 bp, Saccharomyces pastorianus
atgggatatttttaccgcttttggtacaatattttctcttttctaaggctaaatgagctctgctgttcgctacattccaagttgggacctttattaaatcatctaaggattgcctggtactatttaaagccatatacagacaatgtgaagaatgtactagagaatccatttaactcctctacggattggatgaaatacggctccttcagcgctgatggcacgctcaccaaacccatttttgagacagactcggaaacagaggattatgaggatgaagatgaggatgaagatgaggatgaggatgatgtcggaattgaggatgaaaataaagaatacgagttcgatggagtacaggatggccacgggaactcacaactcgtcactgctgctattttgcaggatttgtcaaagattatcattggttccaatagccatgcagaattggaaacttacgaggcagaatcattaaaaatggaatatgaagcatggattaaggctatagattcgaaaatacacagtgcgatggcacttttggattcagagatacagtctgtgttcgaggccgaggtgcgaaataaatctatagaaatcactaggaatcttgatgaccttaacactaccgttaatgagcaattagtgtttctagatttaaaaatcaaagatattaattgtacctctaaattcgatcctgtgcaaaataaaataaagtattttgatgaatcgggtcaagttgaactggaagcttacattaccaaatcatctatcacatcgatactgaagaattataaaatacatttgttagactttgaaaaatcactgtttcattcattagattcttttcttaccgaaatggctaaactggcagaatcgattcgtcttgaaaacgtcgaagtgtacgaagagtggggcgatgtaatgataagtcaatggtcgcaaagaatggcatatatggacgtcagaggtctccatttggaagatcaatacgatccagcctatatagaagagaatcattccaactggctccgtttcatggaattgaaaaagaaagttatttctgagaggaaccgtctggtaaaacatgatctggatatgactttgatactggaatggattactaaactaaaagctgatttccagaacacaaaaaataatattcaagatacctttctgcaacgaatgaatactgcggatactttattcaaaaaccgtgaactaaaggaacaactagaggaagaatttgtacggcaagaacattga

SEQ ID NO: 79921 - DNA, 192 bp, Saccharomyces pastorianus
atgaaggccgttttcaaagtaacgactgctttgctggcttgcgtgtttattgcaaggtatctggtctgtcagcaaatggtctgggaaactttgccacagatttacagcccatttgccggcatactgaattttcagttggctcactattcgattctaaattggttgagggttcagcggtttctgactatttag

SEQ ID NO: 79922 - DNA, 3012 bp, Saccharomyces pastorianus
  modified_base (2860)..(2917): a, c, g, t, unknown, or other
atgtcgttttggccatttggacagaatcttaatcactctaatattaataagatcctagatgaatattttcatgtgctacacgaactggaaaggattaacccaagcgttggtaaggccattcccgctattttcaacaacgttcaggagcgaggtacaagtgactccctagattctattccggaggagtatagtcatggtgatgaagtgaaaacggcacgtggagatcagaagagtcgatttgagaaggatgatcagcaagaacggtatgagaaagaggaagaggaacggagcatgaactctagcgaatcttccactacatctttttcttctgggtcaacttctaaaacagatctagatgaggaggatatcaacaatgctactgctcccatgatggtcaccacaaagaatttggataactcttttattgaaagaatgcttgtagagacagagctgctgaacgaattatcgagacaaaacaagacgctacttgacttcatttgctttggatttttctttgataagaaaactaataagaaagtgaataatatggaatatctggtcgaccaactgatggaatgtatctcgaagattaaaaccgccaccacagtggatttgaataacctgatagattatcaagaacagcaacagcttgatgatagctcgcaagaggacatttatgtggaatctgatacggagcaagaagaggagaaagaggacgataataacagcaataacaagaagagacgaaaacgcggaagctcctcgtttggtaacgatgatatcaacaacaatgacgacgacgacgatgcgaatgaggacgatgaatctgcctatttgacaaaggccaccataatatctgaaatcttttccttagacatatggttgattagcgagtcattagttaaaaaccaatcatacttaaacaagatttggtctatcatcaaccagccaaatttcaattctgaaaactctcccttggtacccatattcttaaagattaaccaaaatctgttgttaaccaggcaggatcaatatttaaattttattcgaacggagagaagctttgttgatgatatgttgaagcatgttgatatttccctgttgatggattttttcttgaaaataatatccacagataagattgaatcacccacgggaataattgaattagtatatgatcaaaacttgatcagcaaatgcttaaactttctaaataacaaagagtccccagctgacatccaagcatgtgtgggtgatttcttaaaggctctgattgccatttctgctaatgcacccttggatgatatttccattggtccaaactccttgacgagacagctagcatctcccgaatccattgcaaagctagtcgatatcatgatcaaccaaagaggtgccgcattaaataccacagtttcgattgtcattgagctgataaggaaaaacaattcagactacgatcaagttaatcttttaaccactactataaagactcatccaccttcaaatagagatccaatatatttaggctatctacttcggaaattttcaaaccatttgtccgattttttccaaatcattctagatattgaaaatgacgccaacatcccattacatgaaaatcagttgcacgaaaaatttaaacctttaggatttgaaagattcaaagtggtggaattaatcgccgagttactgcattgctctaatatgggattaatgaattccaaaagggcagaaagaatagccagaagaagagataaagtaagaagccagttatcccatcatttacaagatgcattaaacgatctgagtatcgaagaaaaggagcaacttaaaacgaagcactctccaacacgtgacactgatcacgacctaaaaaataacaacggtaaaatagataacgacaataatgataatgatgatgaaagtgattatggcgacgaaatagacgagagcttcgaaattccatacatcaatatgaagcaaaacataaaacttaggaccgaccccacggtcggtgacctattcaaaatcaaactatatgatacgcgaattgtttccaaaataatggaactattcttaacacatccttggaacaatttttggcataatgttatattcgacataattcagcaaatcttcaatggaagaatggatttttcctataattccttccttgttttgtctctgtttaacttaaagagctcctatcaatttatgactgatatcgtcatatcagatgaaaaaggaacggatgtttcccgattttctcccgttattagagacccaaattttgatttcaaaataactacagatttcatattaaggggctaccaagattcatataaattttatgagctaaggaaaatgaatttgggatatatgggccatattgtcttgattgccgaagaagtggtcaaattttctaaattgtacaaagtagaactaatatctcccgatattcaagtaattttacaaaccgaagaatggcaatactactccgaagaagtcttaaacgaaacaagaatgatgtactctaaaattcttggcggtggaagttatattgatgatggaaatggtaacatcattccgcagctgcctgacaatactactgtattaactccaaatggtgatgcaagtaataataatgaaatccttgattcagataccgggagtagtaatggaacaagtggtggcggccaattaatcaatgttgagtctctagaagaacagttgtccttatctacagaatctgatttacacaacaagttaagggaaatgttaatcaatagggctcaagaagacgttgataataagaacacggaaaatggggttttcatactggggccgccggaggacnnnnnnnnnnnnnnnnnnnnnnnnnnnnnnnnnnnnnnnnnnnnnnnnnnnnnnnnnnacaacgataataacgataataatgataatgacaatgataatactcgtaattataatgaagatgctgataatgataatgattatgatcatgaatga

SEQ ID NO: 79923 - DNA, 510 bp, Saccharomyces pastorianus
atgaagcctaagacttggttcctgctggcctttatttggatagtcgttaatattgggcagtatatcatttctattattcaatatcgttctcaaagatcaagaattgaaaacttcatcagtcagtgtaaacaacaggatgataccaatggactaggcgtaaaacaactaacgtttaaacaacatgaaaaggatgagggtaaaagtttggttgtaaggtttagcgatgtctatgttgtagagcctgatggaagtgaaacactaatttcgccagataccttggataaaccttcagtaaagaactgtttgttttggagaatacctgcttcggtttggaacatgacgtttggcaaatctgttggtagcgcaggaaaagaagaaataataacggatagtaaaaagtatgatggtaaccaatcaaaaaaggggaacaaagtaaaaaagggttctgcaaagaaaggccaaaagaaaatggaattgcctaacggtaaagtgatctattcacgtaaatga

SEQ ID NO: 79924 - DNA, 3141 bp, Saccharomyces pastorianus
atgcaatcagaggcttttcctagtatttatgagagtaacgagaactgcataatttcttcaccaaccggatcaggcaagactgtattatttgaattggcaatattacgtcttataaaggaaacaaatagtgataccaataacaccaaaattatatacatcgcgccaaccaaatctctatgttacgagatgtacaagaactggtttccttcctttgtgaatctttctgttggtatgcttactagtgatacctcttttctggaaactgaaaaggctaaaaaatgtaacataataattacgacaccagaaaaatgggatttgttaacaagaagatggtccgattacagccgattattcgaattggtcaaacttgtcctagttgatgagattcataccataaaggagaaaagaggagcatctttggaagtaattctgacaaggatgaatacaatgtgtcaaaacattcggtttgtcgctttaagtgcaacagttccaaatatagaagacctagcattgtggctcaaaactaacaacgagcttcctgcaaatattctttcttttgacgaatcgtacaggcaagttcagttaacgaagtttgtttatgggtactccttcaattgcaaaaatgacttccaaaaagatgctatatataattcaaaattgattgaaataattgaaaagcatgccgataatcgtcccgtactaatattttgtccgactagggcttcaactatatcaacagcaaaatttttattaaataatcatattttttcaaaaagtaagaaaagatgtaatcataatccctccgataaaatattaaatgaatgtatgcaacaaggtatcgctttccatcatgctggaatttctttagaagaccgtactgccgttgagaaagaatttcttgcaggttcaattaatatattgtgttcaacttcaacgttagctgttggtgtgaaccttcccgcatatttggtcattatcaaaggcaccaaaagttggaactcttctgaaatccaagagtattcagacctagatatactgcaaatgattgggcgggcaggaagacctcaatttgaaactcacgggtgcgcagtaatcatgacagactctaaaatgaagcaaacatatgaaaacttaattcatggaactgacgttttggaaagttcattacatttgaatttgatcgagcatttagcagcagaaacctctttggaaactgtatattcaattgaaactgcagtaaattggctacgaaacacattcttttacgttagatttgggaagaatccagctgcatatcaagaggtgaacagatacgttagttttcattccgttgaagactctcagataaatcaattctgtcagtatttgcttgacaccttagtaaaagtgaaaataatcgatatcagcaatggggagtacaaatctacagcgtacggaaatgcaatgacgcgacattatatatcctttgagtcgatgaaacaattcattaacgcaaaaaaatttctatcattacaagggatactaaatttactggccacttctgaagagttttcagttatgagggtgaggcacaatgaaaaaaaattgttcaaagaaatcaatttatcgccacttttgaaatatccatttttaaccgagaagaaacagagccaaataattgacagggttagtcaaaaggtttctcttttgattcaatatgagttaggtgggttagaatttccatcatacgaaggcgcttctaaactacatcaaactcttgttcaggataaattcctcgtttttagacattgttttagattactaaaatgcatggtagacacatttattgaaaaaagtgatggaacatcactgaaaaatactttgttcttactgcgaagcctgaatggtcactgctgggaaaacacgccaatggttcttaggcaattgaaaacaattggactagtttcagtaagaaggctaatacgacatggaattaccaatctagaagaaatggggcatttgtcagatactcagattgaatactatcttaacctcaagattggaaacggcacaaaaattaaaaacgacatttctttgttgccttgtctgaatattagaacaaaactagaaaattgcaaaatagaaaatgaagagttgtggttgacatttaaagttgagattagtgcaacattcaagtctagcatttggcatggtcagcacctctcattagatatcgaaaccgagaaaagctcaggagagttaatcgactttagaagattgcaacttaacaaactacagtcaccaaggggctttagaatttcagcaaaaatatcaccaaaactagaaaaaatagaattctcaattcattgccaagaaatcgccggactcggcaaaacaatcgtatattccactgatcatttggcatcacagttctctgcgaagacaccaaatataaggaaagatctaaatagtttagaaaaatgcctcttctatgaaagcagtagtgacggagaagtggggaaaacgtctagggtttcccataaagatggattagaagaatcgctatcctcagatgatagtatactagattatttgaatgaaaggaagaaatcatcaaaggcggttgaatctgcagcagttattcacccggaggcacactcttcttcacattttagtaatggccgccaagtaagatctaatggcaattacgagtgttttcatagctgcaaagacaaaacgcaatgcagacatttatgttgtaaagagggtattccagtaaagtatataaaagaaaaaggaccctcctcaatcaagccagtatcaaaacctgatcaaatacgccagccactgcttgcaaaaaatatcaacacaacccctcacctggaaaaaagactgaatagtaaaccaaagcagtggcaagaagaaaatacagatattgcgacagttcatacacttccttcaaaaatttataatctatcgcaacagatatcgtctatggaagcgggtgaacaagtcctaaaatcaggccccgaaaactgccctgaaataattcctattgatcttgaatcatccgatagttattctagtaatacagcggcgagctcaataagtgatccgaatggtgatctggatttcttgggttccgatatagagtttgaatga

SEQ ID NO: 79925 - DNA, 447 bp, Saccharomyces pastorianus
atgaaagacttagcggatcccaaaaatatggttaaatgtactagatatgttcagaaattaacacctattacgtactcttgtaatgcaaaaatggagcaattaatcaagttggccaatttggttattgggccacactttcatgacccttcgaatgttaaaaaaaattataaatttgctgtagaagtgacaagaagaaatttcaatacgattgaaagaatggacatcattaatcaagttgtgaagctggtcaataaagagggttctgagtttaatcatactgtggacttgaagaactatgataaattgattctagtggaatgttttaagagcaatatcggaatgtgtgtagtcgatggggattataagaccaaatatcgtaaatacaacgttcaacagctttatgaatcgaaattccgaaaggatgaagataagagtgtaaaacaataa

SEQ ID NO: 79926 - DNA, 297 bp, Saccharomyces pastorianus
atggtcgaaaaatccaatacagatgagagatacaattttacaagaacgaaaaaatggtttttattgatgacctcagaatattacaaactaatgaaaaacagacttttaatgttttgcattatcgcttgctcttttatttgtgctatccaatttcttttctttataattatttggaccaacattgttccacggaagacgcaaagggcaataactaacctaaattacgattatttaacagcccatctaaaagagcaatgcgttccatatgcgaaaattcttgaccaatgtattctctag

SEQ ID NO: 79927 - DNA, 1941 bp, Saccharomyces pastorianus
atgatccctgatatttacaaaatacttgggtactttttaccttctagatggcaagctcaaccaaataacagcttgcagctatctcaagatggtattactcatttacaacctaatcctgattatcactcatacatgacttatgaaagatcaagcgcttcttctgcctctaccagaaatagactgagaacctcttttgagaactctgggaaagtggactttgcagtcacttgggcaaataagtcattgccagacaataagttaactatattctattacgagattaaagttctcagtgtaacgagtacagagagtgctgaaaatagtaacattgttatcggatacaagttagtagagaatgaattaatggaagcgactacaaaaaagagtgtttctcgttcaagcgtggccggttctagtagtagcttaggtggtagtaataacatgagttccaatagagtaccttctacttctttcactatggaaggtactcaaaggcgtgattatatttatgaagggggcgtttcagccatgtctcttaacgtggatggttccataaataagtgtcagaaatacggatttgatcttaatgtatttggctattgcggatttgacggtttgataactaattctacagaacaatctaaggaatatgctaagccttttggtagggatgacgttattggttgtggcataaattttatcgatggctcaatttttttcacgaagaatggtatccatttaggtaacgcattcaccgacttgaatgatctagaattcgtcccatatgtggccttacgacctggaaattctatcaaaacaaattttgggttaaatgaggattttgtatttgacattattggatatcaagataaatggaagagtttggcgtatgagcatatttgtcgtggacgccaaatggacgtttcaattgaagaattcgactctgatgaaagtgaggaagatgaaactgaaaatgggcctgaagaaaataaatcaacaaacgttaatgaagatttgatggatattgatcaagaggatggtgccgctggtaataaggatacaaagaagcttaacgatgagaaggagaacaatctgaagtttcttttgggagaagataataggtttatagatggaaagctagttagaccagacgtgaacaatattaacaacttaagcgtggatgacggttcattgcctaatacattaaacgtgatgataaatgattatttgatccacgaaggattggtggatgttgcaaaggggtttttgaaagatttgcaaaaagatgcggttaatgtcaatgggcaacattctgaaagtaaagatgttatcaggcacaatgaaagacagatcatgaaagaagaacgtatggtaaagataaggcaagaattaagatacttgataaacaaaggtcaaattagcaaatgcatcaattatatcgataacgaaattccagatctgttaaaaaataatctagaattggtatttgagttaaaactagcgaattatctggtgatgattaaaaagagttcatccaaagatgatgacgaaattgaaaatttaattttgaagggtcaagaattatctaatgaatttatctacgatactaaaattccacaatctttgagggataggtttagtggacaattgagtaatgtctctgcattgttagcatattccaatccacttgtggaggcaccaaaggagatatcaggatatttgagtgacgaatacttacaagagagattatttcaagttagtaacaacacaatactaacatttttacataaggatagcgaatgcgcattagagaatgtaatatcaaacactagagctatgctttctacattacttgagtataacgcgttcggttcaaccaactcttcagatccaagatattacaaagctattaacttcgacgaagatgtgttgaatttatga

SEQ ID NO: 79928 - DNA, 939 bp, Saccharomyces pastorianus
atgtctgaatatatggatgacgtagaccgcgaattcattaactgtttgttcccgagctacttgctgcaacagcctgtggcttatgatttatggattttatatttgcaacatagaaaactctttcacaaactgaagaacactaacttaatcaacgctgatgaaaatcccactggcgttggaatgggcaggacaaagttaactgctttaacaaggaaagaaatctggtctaaattgatgaatttgggtgttctaggcacaatttcgtttgaagctgtcaacgacgattacctgattcaagtctataaatatttctatccagacgttaatgattttactttgagatttggtgttaaagattcaaataaaaattcagtgcgagttatgaaagcttcctcagacatgaggaaaaatgctcaggaactattagaacccgttttatccgaacgtgaaatggcgcttaactctaataccagcctggaaaatgacagaaatgacgatgatgatgacgatgatgatgatgacgatgatgacgatgacgatgacgacgacgacgatgaatccgatctggaaagcttagaaggggaagtggatactgacacggacgataacaacgaaggagatggctctgacaatcacgaggaaggtggagaagaaggaagtagaggagctgatgctgatgtgtccagtgcacagcagcgtgccgaaagggttgcggacccatggatatatcaaagatctagatcagctattaatatagaaacagaatcaaggaatttgtgggatacatctgacaagaacagtggtctacaatactacccccctgatcagtctccaagtcttccttttcttctcctagagtatcgtctggtaacgacaaaaatgacaatgaggcaacaaatgttttgtccaacagtggtagcaaaaagaaaaactcaatga

SEQ ID NO: 79929 - DNA, 417 bp, Saccharomyces pastorianus
atgatgcaagaccggggtcatatcgacgaggagtttgaatcttttgccagaacttttatcgccaatcccgatagcaattttacaaacacaaatataaatataataaacacgacggcagctgacttggctgttcccgctgagaccctacaacggcaaaatttttcccaaaaaaaagtaaagtggacgagtcccgaccttagtcccagccctatgattgaaccacaaccggagctagaaccagaactacaccaagatcaagacgccattgcaagtgaagtggacgtaagtatgcaagataccacattcaatgagcaggggccctcgaccccctccgctccgactacagcggttccaagaaggaagatgcgctcctcccttcttactcatcaaagtctactggccactgccaggaaataa

SEQ ID NO: 79930 - DNA, 351 bp, Saccharomyces pastorianus
atgtataaacacaaagcggtagtagttaccatcgttacatttttgatagtggttttaggagtttatgcgtatgatagaagagtgaggagaaaagcgcgtcacacaattttagttgatccaaataatagacaacatgacagtcccaataagacagtttcatgggcagatgatctggaaagcggactcggggcagaagatgatttagaacaagatgagcagttagaaggcggagcacccataagtagcacttctaacaaagcaggatctaaattgaaaactaagaaaaagaagaagtatactagccttccgaacactgaaatcgatgaatcttttgagatgactgatttttaa

SEQ ID NO: 79931 - DNA, 144 bp, Saccharomyces pastorianus
atggcgcaagcctattggattggcccaattgctgccaaatttggtgaatatggtggtgatgtcgcaatgtggttaagtatggcgttctcaggtgttgtataccctccttgtagatacttagagctacgtaaatttggtcgttaa

SEQ ID NO: 79932 - DNA, 1488 bp, Saccharomyces pastorianus
atgaatagggacaacatggacacaacaaagcgcaaagaagatcatacaaagcatactactgatgtaatagaattttacgaagaaggaaccgcagcttcttctttaaacatagccacagaaaaggccaactcaagtccgtccattttgagaagaattatcaacagggcggcatggctttctaagaaagtggacgcaatgggagtagagtctaccggtattcagaggatatctccctatgaacgaggaacatcaaagaaacaatttttgcatgtcgcggggctatggttgagtgccacaggtggtttgtcttccatgtcgtcgtttttattaggccctctgcttttcggtttaagctttagagaatccgtagcctccagtttaatatcggtaacaattggttgcttaattgctgcctattgctcgaccatgggaccgcagtccggttgcagacagatggtaacagctagatacctgttcggatggtggtttgttaaattagttgcattagcttccattatcggtgtcatgggttggtctgtggttaattccgtggttgggggtgaaatgttagctgctatttctaatgataaagtacccctatgggtagggattgtcatagtgaccgtatgctcctttttagttgccattttcggtatcaaacaagtcattaaagtggaaacttacttatccgtacccgtcctgacagcatttttactactgtacatttcatcaagtgataaatacagcttcgtcaatgcatacgtttcaaagggaaatttggactcttccacccgaaagggcaactggatgagttttttttcattatgctatagtattacggctacttgggggtctattacagcagactattatatattgttcccagaagatacaccatatattcaaattttttgcctaacgttttttggaacatttttgcctacctgtttcgtcggaatcttaggtctcttactagcttctgttgccatgtcgtataagccttggtcagtcgagtacgattcccatggaatgggtggtctactttgggcaggttttcagcgttggaacggcttcggaaagttctgcgtggtagtactggtattcagtttggtatccaacaacatcatcaatacgtattcggcagcattctccatccaactttctagtgtgttttgtgcaaaaatccctcgctggttctggtctattgtttgtactataatttgtttggtatgcgcattaataggtcgtaatcattttagtactattttgggaaatttcctaccaatgataggctactggattagcatgtactttatcttattattcgaagagaatttagtattcagaaggtttttcttacatttgtacaccaaagagtttcctacagttacaggagaaataaatggaccggaacttgttggatcttcaaaagaagtggagaaagatgcagttactaatatccatttgttaaaaagaaacataaggtga

SEQ ID NO: 79933 - DNA, 525 bp, Saccharomyces pastorianus
atgatcgttaaagatttagtgcaacaaatgattgatgaagacggcgtcatttcggtggaaaaatgtggtaatattaacatctactggtgctttaaaaatcagacactgcaaaaattgtatgattcaagcgagttgataaaaaaaaagatacaggaagtaaagtgtgatattgccacttataaacaagaactagacaaaacgctagcaactggaaggcgtaaaaaatttacggtaggccaaaaatcatacaatagggaggctctactggaaaagagaaaaaaaattcaggatgaaattaagaaaaagagtaatagtctccaaaaaatagaaagcattagatgggatgcagcaaaaatacaagagaataaacaacagatccgcctaaaaaaagtgcatctggagaaaactactgataacattgagattctcattgattatttatacaagaaattctttttgaagccagaacagataagaaaagaatttggaattccagaagagttcaaggaatttacggaggtttaa

SEQ ID NO: 79934 - DNA, 2505 bp, Saccharomyces pastorianus
atgtcttacaatcatcagcctcaactatctattaactccgtccaatcactcttggagcccgtgacccctccgcctttgggccagatgaacaacaaaagaaaccatcaaaaggctcattcgcttgatctctctggttttaatcagttcatatcatcgacacaatctcccttggctttgatgaacaatacatcaacatcgaattctgctaactctttttccccgaatcctaatgctgctagcaactccactgggctttcagcctcaatggcaaatcctccagccattctaccattaatcaatgagtttgatctggaaatggatggtcccaggagaaaatcaagccacgatttcacggttgttgctccttcgaactctggtgtcaatacctccagtttaattatggaaacaccatcctcttcagtgactcctgctgcatctctcagaaattttagcaatagtaataatgctgcttccaaatgtggagtggataattcgtcatttggtttgagtagctctacgtcttcatctatggtcgaaatcagcgcactaccccttagagatctggattatatcaaacttgccactgaccagtttggctgccgttttcttcaaaaaaaattagaaacccccagtgaatccaatatggtgagagacttgatgtatgaacaaattaagccatttttcttggaccttattttggatccgttcggtaactatttggttcaaaaactatgcgattatttaactgccgagcaaaagacattattaatacaatcaatatatccaaatgttttccaaatatcaatcaatcagtacggaactcgttccttacagaaaattatagacactgtcgataacgaagttcaaatcgatctcattattaagggattttcccaagaatttacttcgattgagcaagtggttactttgataaacgatcttaatggtaaccatgtgattcaaaagtgtattttcaaattctcgccatcaaaatttggtttcatcatagatgctattgtagaacaaaataatatcattaccatttctacccataaacatggttgttgcgtactacaaaaattactaagcgtttgtactttacaacaaattttcaaaatttctgtgaaaattgtgcagttccttcctggattaatcaacgatcagttcggtaattatatcatccaatttctattagatatcaaagaattggacttttacttattggctgagttatttaaccgtttatccaatgaattatgtcaactatcttgtttgaagttctcctcaaatgttgtggaaaaattcattaaaaaattatttagaatcattactggatttattgttaataacaatgggggtgcctcccaaaggactgcagttgcttctgatgacgtgattaatgcttctatgaacattcttttgactaccattgatatattcacagtcaatttaaatgtgctaatcagggataattttggtaattatgcgttacaaacgctattagacgttaagaattattctcctctgcttgcttacaacaaaaatggtaacgcaattgggcaaaacagctctagtacattgaattacggtaacttttgtaacgatttttcattgaaaattggtaacttgattgtccttacaaaagaattacttccaagtattaaaactacatcctatgcaaagaaaattaagttgaaagttaaagcttatgcagaagccacaggtataccattcactgacatatctcctcaagtcactgcaatgagtcataacaatcttcaaacgattaacaacgaaaataagaacccccataacaaaaatagtcataatcataatcataatcataatcataaccatgctcacaataataataacaataataatcaaaagagtcatacccgtcatttttctttaccagctaatgcttaccatagaagaagtaacagctctgtaaccaataatttctcaaaccaatatgcacaagatcagaaaattcactctccgcaacaaattatgaacttcaaccaaaacgcatatccctcgatgggagcaccttctttcaattctcaaactaacccaccattggtaagccataactcgttacaaaacttcgacaaccgccagtttgcaaatttaatggcacaccctaattctgctgcaccaatccattcgttctcatcatctaacattaccaatgtgaatcctaatgtttcaaggggatttaagcagcctggatttatgatgaatgaaaccgacaaaattaatgctaatcacttctcgccatactctaatgcaaatagtcaaaacttcaatgaatcttttgtgcctcgtatgcaatatcaaacggaaggtgcaaactgggattcaagtttgtcaatgaagtcgcagcatattggtcaaggcccatataatcaagttaatatgagccgcaacgctagtatttccaatatgcctgccatgaataccgctagaacatctgatgaacttcaattcactttgccataa

SEQ ID NO: 79935 - DNA, 291 bp, Saccharomyces pastorianus
atgagcaaaaaaaaaaaaaaaaaagaaaagattcgaagatctatgaaaaatttatgcagattcgttgagagttataaggattttactctttatggttataggtttcattctaaaatcaagcataaattttgtgttttgtcttcctcttttcctgtcctctttttttgccatcctctgtcgccattgaagtcgaactttatagatagatttactcttgattctcacgcatctcaggccacctggacactgtacatggttgtgattgttctctttttcagttatcgaaattga

SEQ ID NO: 79936 - DNA, 519 bp, Saccharomyces pastorianus
atgtacgataggattaacgtagatgtgattcatgcagaaagaacagccttacaaagagacaggattattgaacgatttaaatctggtgaattatggtgtttgatctgtaccgacgttttagctcgtggtattgacttcaaaggcgtcaatctggtcatcaattatgacgttccaggatcgtctcaggcttatgttcacagaattggtagaacaggtagaggtgggcggtcaggtaaagctatcacattctatactaagcaagactcagtagctattaaaccaataataaatgtcatgaaacaaagtggttgtgaagtatctgagtggatggataaaatggctaaaatgaccagaaaggagaaagaaagtataaaaaacgggaaagcgcataaagaaagaaagcagattactactgtgcctaagatggatagggccaaaagaagacgtcaacaagaaatgattgcagcatccaaaagaagaagaaatgaagaactttcaaaaaaacactcctcgaaataa

SEQ ID NO: 79937 - DNA, 1038 bp, Saccharomyces pastorianus
atggatatttttagagtattaactagaggagcttccgtgaagaaagagtcaggcccaaaggctaaggcagcagattacagcgttataaatggaaaggatgagaatcataaggaagataataatgaaagccagatcgtgaaagaacttgatttctttcgaaacaagagaatcattagcaaggtagaggatgatagagagaagacaaccgaaaacgattctccaaacaaagaggagaagagcggcaatgatgatggtctgataaaaccagtgattaccaataccgttgaggcatccgcgttgagaaaatcatataagggaaacgtgtcgggtatagatataccacttccaataggttcgtttgaagatttaatttcaaggttttcattcgataggcgtttactgaataacttgattgaaaacgggtttactgagcctaccccaattcaatgtgaatgtattcctgttgctttgaataatagagacgttttggcatgtggtcccacagggtctggtaagacgttagcattcttaattccgctggttcagcagattattgatgacaagcaaactgcagggttgaaagggttaatcatttcgcctacaaaagaattagcgaaccaaatttttattgaatgttttaagctatctcacaagatatttttggagaaaaaaaggcctctgcaagttgcactcttatctaaatctttaggcgctaaattgaaaaacaaggtagttagtgataagaaatatgatataatcatttctaccccattaagactaatcgatgttgtgaaaaacgaagctctcgatctctccaaagttaagcatttgatatttgatgaagctgataaattgtttgataaaacattcgttgaacagagtgacgatattttgagcgcctgtagagagccatcgttgcgtaaagcgatgttttccgcgaccattccatccaatgtggaagagattgcacaaagtataatgatggatcctgttagagttattattggccacaagggaagcagcaaatacaaatattga

SEQ ID NO: 79938 - DNA, 1158 bp, Saccharomyces pastorianus
atggattctcaagaagatggcaatactagtgaggaaagtaaaagaaatagtccagtaaaacataagtccccaaaagatgaagaaaagtcatctaaaatggggactgcaagcaacatattccatgaaaataaagatatacacgaaagatctgaacacacggacgattttaataatggcttaaaactggctccggactctagtccaagcttgaaagagtgtcaatttaaaaattgggaaagtttttggtgtaatacagaaggttacaaaactaaacacatgcagccctttcattttacaagcggattagaagaaataaaggaaccggtcatggaattgaatatttccacttcaccatacaagggacagaggccaaattcagctccaaccgagtattcagctgccacaacagcgtttaccaaaacacaattagaggtgagttttctaaaaaccaacttgcttacatacattaaaaaagagattgacatttgcttgtcaagtgttccattttttgacgacgcagttcaaatgcaaaagaaattcttggaatacagagatattgacttggatgaagaatatgagctcaaaattttgggggaacttttgaatgatttaaacttctttcatatgcaagaaaactctttgctaaatagagagctagcagttcgtagattctccaatcaacctgaaagtcaaaatttaccttccattagggattttagaaatccacttttgccaatgaataaccgcccttctcccccattaggattgaaaagaaacggaaagtccttcgaggaaacctatgatttcacgtccaatacatcaaatttttggggagaaaaagcagaattacaaaactccataaccggtggaacgtcctattttttccactctaacaatatacatcaaacaaaaccttttatgtcatttgaaaatcaaaatgaacttctattccaaagaaaaaattcagattacaagcagcattttaactctggaagaaatatacataatggagtggaatcgaaatcttacagaggtgtggggttaaacgatagttatcaaaagggttatgcagcaatgacaaagtcgtttggaaatatagatttaaatagaatgcccagaagaagtaatgaagaaatgtatagctggtcacgtaattga

SEQ ID NO: 79939 - DNA, 420 bp, Saccharomyces pastorianus
atgaaacgtttactaaccaccgcggcctgtatcatcgttgggacagtttacatttttgttaaagagatggccgaagatggtaaagtaactgctagagatactactatgacatttacttgttttgttttttttgatatgtttaatgctttggcctgcagacataacacaaagtcaatcttcgaaatcggctttttcacgaacaaaatgttcaactacgccgttggactgtctctgttaggtcaaatgtgcgctatatatataccatttttccaaagtatctttaaaactgagaaacttggtatctctgatatactattgttattgctcatcagcagtagcgttttcatcgttgatgaactgagaaaattgtggacgaggaaaaagaatgaagaagactcaacgtatttctcaaatgtttga

SEQ ID NO: 79940 - DNA, 654 bp, Saccharomyces pastorianus
atgccttcgtgggcggcgtgctggcgtgcgcgccttcagcctgccgagcgtcggcaaagccggcggcacgccgcatatcgacctgggcgtgaagggcgaacccgaggcggcggccgaggcattggccttcctgcgggccgaggtgctgcgcctgggtgcatgtgtgcctctgcacgacggccagctgttggcagcgaggaagatgaaacacgatgtcgttgtgatgagggtgaaccttgtaaatgtcataccaagaggaaaagcagccggaaatcaaagggagggtcatgccacagaagggcaaatgatgaagcagcgcatgtcaatggtctcggtgttgcagatctggacgttcttttgggcctaaatggtcgctcgtcggatgtagacatgacaaccacattgccgagtttgaagccacctctgcaaaacggagaaattaaggccgacagcattgacaatcttgatttggcttccctcgatccgcttgagcaaagccctagtatatctatggaacctgttagtatcaatgaaacaggaagcgcatatacaactacgaacacagcactaaacgatattgacattccattctccatcaatgagttgaacgagctatacaaacaagtatcttcgcataactcacattcacaataa

SEQ ID NO: 79941 - DNA, 2550 bp, Saccharomyces pastorianus
atggcaagacgcagattaccagacagaccaccaaatggaataggagccggtgaacggccgagactggtacctaggcctattaacgtacaagactcggtgaaccgactaacgaaaccgttcagggtcccctacaagaacacgcacatcccgcccgctgctggtagaatcgccaccgggtctgataatatcgtaggaggaaggagcttgaggaaaagatcagcgactgtatgttattccggcttggatataaatgcggacgaagcagagtacaacagccaagacataagtttttctcagttgactaaacgacggaaggatgctcttagtgctcaaaggttggccaaggatccgacaagactgagtcatatccagtacactttgagaagatctttcactgtgccaatcaagggatatgtacaaagacacagtctgccattaacgttaggaatgaaaaaaaaaattactccagaacctcgacctctacatgaccccacagacgaatttgccatagtgctttatgacccgtccgttgacggtgaaatgattgtccatgacacatccatggataacaaggaagaagaatcaaagaaaatgatcaagagcacacaggaaaaggataatattaacaaggaaaagaatagccaggaagaaagacccacacaaagaataggacgccatccagctttgatgacaaatggtgtgagaaacaaatcgttacgtgagctactcggtgattcggaaaactctgcggaaaacaagaagaaatttgctagtgtccctgtggttattgatccaaaactggccaagattttaagaccccatcaagtcgaaggggtgagattcttatatcgttgcgttacagggcttgtcatgaaagattatttagaagctgaggcgttcaacacttcaagtgaagatcccttaaagagcgacgagaaggcacttactgaatctcaaaagactgaacaaaacaatagaggggcctacggctgcatcatggccgatgaaatggggctgggtaagacattgcagtgtatagcacttatgtggacattattaagacagggcccgcagggtaaaagacttatcgacaaatgtatcattgtttgtccatcttctttagtcaacaactgggctaatgaattgataaaatggttgggtcccaatactctaactccgttagcggttgatgggaaaaaatcttcaatgggtggtggtaatacaacagtttcgcaagctattcatgcctgggctcaggcacagggaagaaatattgttaagcccgttttaatcatatcgtatgaaacattacgtcgaaatgttgatcaattgaaaaactgcgatgtgggtttaatgctggcagatgaagggcaccgtttgaaaaacggtgactctttaacattcacagctttggatagcatcagttgtcctagaagagttatattatctggtacacccattcaaaacgatctttccgaatattttgctctactgagtttttcgaatcctggcttattaggttccagagcagaatttaggaaaaattttgagaatccaattttgcgagggcgtgatgctgatgctactgataaagaaatcacaaagggcgaggcgcaattacagaagctatctaccattgtctccaaatttattatccgtcgtactaacgatattttggccaaatatttgccttgcaagtatgagcacgttattttcgtaaacttgaagccgttgcagaacgagctctacaataaattaattaagtcaagagaagtgaaaaaagtagtaaaaggtgttggtgggtctcagcccctgagggctattggtattttaaagaagctatgtaatcatcctaatctcttgaattttgaagatgaatttgacgatgaagatgatttggaactacctgacgattataatatgccgggttcaaaagccagggacgtacaaacaaaatattcagctaaattttccattttggaaagatttctccataagataaagaccgaatccgatgataagattgttttgatctccaactatacccaaaccttggacctcattgaaaaaatgtgtagatataagcactacagtgctgtacggttggatggtacaatgtcaattaacaaaagacaaaaattggtggataggttcaacgatcctgaaggccaagagttcatcttcctcttaagttctaaagcaggtgggtgtggtatcaatttgattggtgcaaatcgattaattttgatggatccggattggaatcctgctgctgatcaacaagctttggcacgtgtttggagagacggtcaaaaaaaggattgtttcatttacagattcatatcgactggtaccatagaggaaaaaatctttcaaagacaatctatgaaaatgagtttgagttcatgcgtggtcgatgcgaaagaagacgttgaaaggttgtttagttctgacaacttaagacagttgtttcaaaaaaatgagaatacgatatgtgaaacacacgaaacataccttgtaaacgttgtaatgctcagggtaaacaattaa

SEQ ID NO: 79942 - DNA, 339 bp, Saccharomyces pastorianus
atgcaagtattgaatagagatgagcactcggagcgcaatagaagcttcaaaagtgttcctgaattgatttccgtttacgggtacgctaacttgatctggatacccgtttgtgttatattgaatatattggatatgtccaagcgcctgaggactgttcaagcaattcaatgggcaattgtggctcttgggtgggcacagtcgtcttatttcttgaattctcaaatatcgagtaataataatacggagacacaatcgaacgggaaattttcgctgtccatcatcgttgtcgttgcgctgcatactttattctgtctattgttcaggtttataatattttga

SEQ ID NO: 79943 - DNA, 1125 bp, Saccharomyces pastorianus
atgagaagatacaactatcgtttgttttacatcgtacataacctggtgaacgtggccttcatcttactcaccccaatacactctaggccaggtgttaagttcccatttcttctactaaactgtaccctattattcattcatattatcaatagaatagtatttgcgaaatccttgatgattttgaataagaatgcgaattattcaaaaacaaatttagtccatgtaagattgcccagggctattcttccagattattttgaaccagggtcgcatattagaataagcccttacagaagaattaatcccctctattggttgctaccatcgcatccatacacaattgcgtctttagcagaagacaattcaattgatcttattataaaggaaacctctacagccgagccaggtagccagatagagtctcttcgtagtaatccaaaatcctttcatttagatcaagaaaaaacctatactttgattaatagttatcctccctctgtacccgaagaatgttattctcaaggcacgaatatagctattatatgtggtgggtctggtatatcttttgccctaccactatttaggcatttttttaacaaggagaatgtaaaatacttgaaaatgatctggctgataaaaaattactctgaatatgaacttgttttggattatctcaagacaaatgggttgacttttgagaaaaaactctcgaataataagaggatttcagtatttattagtggagaatacacggcggaaacacggttagacgaaattacgaccaatatcgacgatgaaaactcagaatatgaaatgggatctttcaacaatgaagacgaagacctttcgatttctaatttcaattcagaaaatgcggacagcaatgacaatacgccagagacaagtcatagccccacaaaagagaatggaagcttgatcgaggtaaaatccaaacacagttttactctttccagcgaattgaagagcttcaacaatgaaagtgcacaagtgaaccaaaatgaaacatggttgttttcatgtggtcctccctcgttattacaattgtctaaaaaatattgtaacgatgaaaggatcaactttgtctgtgagacttacggattatga

SEQ ID NO: 79944 - DNA, 435 bp, Saccharomyces pastorianus
atgaaagaatcccctctcataacgttggttaaaagacattccgagacacattttgccaatatcaagtatgggtattatgtgttgataatatcattggtctatctcattggattggctcttttgagagctttcggaaggagaaccccatccagatcgtcgtcagcttttaaaaataagataatttatcggttgtatgatatagatcctgcaattcacttaggtatattgttttttgcagtcttgattccattttattaccattactctttgactacccaatctacggtctatctcaaaagattagggaggttgagttacaccttgatcccgctgaacctattcctcactttaaggcctaattggttccttaggaaaaatgcacctacactgattttataccgttccataaatggttttcacgtattatcaccgtga

SEQ ID NO: 79945 - DNA, 423 bp, Saccharomyces pastorianus
atgtttgcagattcgctaaaacatggcataaatacctcctcaggtatcgtatctgagttaattcattccaaggtaggtggagaattttataattactgtggcccatttattgacgtgcgtgacgtttctaaagcccacctagttgcaattgaaaaaccagaatgtaccggccaaagattagtattgagtgaaggtttattctgctgtcaagaaatcgttgacatcttgaacgaggaattccctcaattaaagggcaagatagctacaggtgaacctgcgaccggtccaagctttttagaaaaaaactcttgcaagtttgacaattctaagacaaaaaaactactgggattccagttttacaatttaaaggattgcatagttgacaccgcggcgcaaatgtcagaagttcaaaatgaagcctaa

SEQ ID NO: 79946 - DNA, 876 bp, Saccharomyces pastorianus
atgaaagagcccaagaaagacggtatcgtaggcgatgaagtatcgaaaaaaattggcagtactgagaatagagcctcacaggatatgtatctctatgaagcgatgccaccaacgctgccccacagggattggaaggactattttgtgatggctactgccacagctgggctgttgtatggtgcatatgaagtaactagaaggtatgtgataccaaatatattaccagaagcaaaaagcaagttggaaggggacaaaaaagaaattgatgatcaattctccaaaatcgatacagtcctcaatgccatcgaagcggagcaagctgagtttaggaaaaaggaaagcgaaacattaaaggaacttagtgacacgattgctgaactgaaacaggcgcttgtgcagacaacaagaagcagggaaaagatcgaagacgaatttagaatagttaagctcgaggtggtcaatatgcaaaatacgatcgacaaatttgtttcagataatgacggcatgcaagagttaaataatatccaaaaagaaatggaatctctgaaaagcttaatgaataaccgtatggaatccggtaatgcgcaggacaatagattattttccatatctcctaatggtatacctggcatagatacgattccatctgcgtctgagattcttgccaaaatgggcatgcaagaagaaagtgataaagaaaaggaaaacggcagcgatgctaataaagatgacaatgctgttccagcgtggaaaaaagcaagagaacaaactattgatagcaacgcctccattccagaatggcaaaaaaataccgccgccaatgagatcagtgtccctgactggcaaaatggacaggtcgaagactccatcccatag

SEQ ID NO: 79947 - DNA, 111 bp, Saccharomyces pastorianus
atgagtgacgtggtcagtaaagatcgtaagacattgttcgactcagcagtatcctttttaaaggatgagtccattaaagatgctccacttttaaagaaaatcgaattttaa

SEQ ID NO: 79948 - DNA, 705 bp, Saccharomyces pastorianus
atgacgaaccaaattaactcattctggagtctccacagcagcacatattataacttagattatctatttgagttaattgaattggttaccccaaaaagtttcctttttgatgttttgaaaacattagaatataaactagccacttatggggtccctggttctgaaaataagaggggatcattggattcagagcatgttttcgattatttcttctactttcttgtactatatgatgtgaaaaccgcggaggaagccagtcaactaatagaatatatggagaacgacgcaaaaaaaggtaagggggacgttgatataaagggagaagacttacatgagaaaaatgactcagctgaggtgaggcaagaaactcaaccaaaagctgaagctacccaagacgatgatttcgatatgctttttggcgagaatgatacaagcactcaagcttacgaagaagaagaagagaatgaggataacgacggcaataatagaacaaacaatgtaccaatgataaaagcagaagaaactcctagtaaaactaataagatatccattttaaagagacattcgtttgcggtacttctgcatgaaagaaaattattgaatgatttagctttggaaaacggcgaaataaccaagacagaaaatgagaaatttatcagttatcacgataagtacttgtgtatgctgaaaacatgcgtattctga

SEQ ID NO: 79949 - DNA, 177 bp, Saccharomyces pastorianus
atggaaaaagaatcagtatacaacttagcactaaaatgtgctgagcggcaattgacctccatggaattttcgaacctttacaaggaattctttaatgaaaagttcccgtctttgattcaagaggaagaagaagatacaacaacaactgcaaatatcaatgaggtcaagaaagcgtcc

SEQ ID NO: 79950 - DNA, 783 bp, Saccharomyces pastorianus
atgataaaatgctttctgcctaaattgaattccgttaggaactccttgctattggcccattttttctccaaatcttgttcattctttgccaaattatcagatactttgataattgatcaagtacgcaaggatttgggcaacgtcatagtaccgaatatcttaagtctagacatgaatagtatgaataaagaattgattgccatagtatcaaagcttttgcaaacaactttaaaactctctccttcaccaattcttttaacttctgccagctgtaaaaatgggtcttttacgctactaaatcagttgtctcaaaccaacaagttactttttaaaagggtttcacagacttttgaggaaaaattacatttcaaagataccaagccatttttaaacaaagattccactaacgaatttgtaggttctccttcattaacctcccctcaatatatcccaagtccactttcttcaacaaaacctccaggatcagtcaattctgctgccaaatacaaagacatgaaacttcttcgttactataaaaacatttggctgaacaataaaattatcaattgggaaatatcgaacccagacttcctatcaaaatattctgcgattacttcttccatattccaagagagctttaattcagttcaaaacttggaccagttactcacagacttgattgagacatcgtttacttgttttgctcaattcgttagcaataagcaatatcatcaggcaaattctaatttgactctgttagaaagaagtgggtcatatttataa

SEQ ID NO: 79951 - DNA, 975 bp, Saccharomyces pastorianus
atgttaaatttacagcctgcgtccgttatcaacaattacttaagagaggaccaaatgatcgacaccagtattttacctaccagtgatgatttggttgttcgtaatttgcaaggcattcaagaagtcgtccataataccaacagtttcatcatttcatccttagatactttagagttagaatcgataaccgaatcgatcacacatgattcgagtaacggactatttcaagtattacacaattttgaatctgtagctccgacaaaacaacgtgagatagtaaaagcctttttatctatatttgaagatgcaataaaagaattgaattataatagaatagccaagatatgtgctcttttgtttttcaacttttcacattcattgaccacaattctatcattttcttcgccagcagcactaatgaaaacattgataaaattcgttgatttgtctggaaatggcagaaatggctcaaacggtaatgatgaaagttcagaatatgaaacgataaatatatctttgtcattttcttgggcaattttactgataatcaacctaacacaaacatatgacatatctgtggtggatgtggcacttaagtatcctgaattgagcataaaaaattcctttataatcaatttcatttcaaatctacctaatgtctcagataagtactatttggaagaatcaaatgtgaatgattcagatatgctaacaaagtctcataataccgttcaaagctggctttgtgatctttttgttaatgggtccataacagatcaattgatccaaaatattgaaacaaggcaattggctaatctcataccatttattgttaaacaggttttgctatctgttgaaataggcgttttaacggatatttcaagtctgataggtggcttcgatatttcttacacctttactattagttgggctaatcaaactttatattggctagaacatgtggggatcctctag

SEQ ID NO: 79952 - DNA, 480 bp, Saccharomyces pastorianus
atggaagaatacttgacctatagacaatataatcatattacactggatggttcctcaaagttggaggaccgtcgagatttggtccatgattggcagactaatccagaaatctttgttttcctcctaagtacaagagcaggtggtctaggtatcaacctgaccgcagctgacactgttatattctatgattcagattggaaccctactattgattcacaggctatggatagggcacataggttgggccaaacgaggcaagtcacagtgtacagattacttgttcgtggtaccatcgaagaaagaatgagggatagagcaaagcaaaaagagcaagttcaacaagtcgtcatggaaggtaagactcaggaaaaaaacattaaaaccattgaagtgggtgaaaatgattccgaagtcactcgtgaaggtagcaaaagcataagtcaagatggaattaaggaagcggcaagtgcattggcatga

SEQ ID NO: 79953 - DNA, 2895 bp, Saccharomyces pastorianus
atgaactcgctgtctttaataacgtccaagaaaataaataaaaatattaccatcaacagtgataggccgaagattgtacgtgaacttatcaaaatgtgcaacaaaaacaagcatcagaagattaagaagaggaggttcaccaattgtattgtcaccgactacaatccaatcgattccaagttgaacatcaaaataactttgaaacagtaccacgtcaaaaggttgaaaaaactgattaacgatgcgaagagagaaagagaaagggaagaggccttgaagaacaacgttggtttggatggtaatgatttggataatgatgaggatggatctgaatcccacaagagaaggaaattaaacaataatactgctaacggtgccgatgatgctaataagagaaaattcaacactagacacgggttgcccacttacggcatgaaaatgaatgctaaggaagcccgtgctatccagaggcattacgacaacacctatataactatttggaaagacatggctcgtaaggattctacgaaaatgtcaagattggttcagcaaatacaatcaatcagatctacaaattttaggaaaacttcctcactttgtgctagagaagccaagaaatggcaatccaagaacttcaaacaaataaaggacttccaaacgagggccagaagaggtattagggaaatgtccaatttttggaagaagaatgagcgtgaagaaagagatctaaagaagaagatagaaaaggaggctatggaacaggcaaagaaggaagaagaggagaaggaatccaaaagacaagctaaaaagctgaactttttgttaacacagacagaattgtattcgcatttcattggaaggaaaatcaaaactaacgaattggaagggaacaatgtttccagtaatgattctgaaagccagaagaatattgacatttcagctttggctccaaataaaaatgactttcacgccattgactttgataacgaaaatgacgaacaattgagactaagagctgctgaaaatgcttccaatgcactggcagaaacaagagcgaaagcgaaacaatttgatgatcatgccaatgcgcatgaggaagaagaggaggaagatgagttgaacttccaaaacccaacctctttaggtgaaataaccatcgagcaaccaaagattttggcatgtactttgaaagaatatcagctcaagggtttgaattggctagctaacctttacgaccagggtatcaatggtatcttagcagatgaaatggggttaggtaaaactgtgcaatctatttccgttttggctcatctagccgagaaccataatatttgggggccctttttggtggtcacacccgcttctactctgcataactgggtcaatgaaatatccaaatttttgcctcaatttaaaattctgccatactggggtaatgccaatgaccgtaaagttcttaggaaattttgggacaggaaaaatctgaggtataataagaatgcgccattccatgtcatggttacatcctatcaaatggttgtcactgatgctaactatttgcagaaaatgaaatggcaatatatgatactggatgaggcccaagctatcaaatcttcacagtcatctagatggaagaacctgttgagttttcattgtcgtaatagattactattaacgggtactcctatccaaaacagtatgcaggaactatgggcacttttacattttatcatgccttctctttttgattctcacgatgaatttaatgaatggttctctaaggatattgaatctcatgcagaagctaataccaaattaaaccaacagcaattacgtcgtttgcatatgattttgaaaccgttcatgttaaggcgtgtcaaaaagaacgtccaatcagaattgggcgacaagattgaaattgatgtcttatgtgatttaactcaaaggcaggctaaattatatcaggttttgaaatctcaaatctctactaactatgatgccattgagaatgccgctacgaatgattctacttccaattctgcttcaaattctggttctgatcagaacttgattaacgcagtcatgcaattcaggaaagtttgtaaccacccggatctttttgaaagggcagatgtagattctccattttccttcactacttttggtaaaactacctcgatgttaactgcatctgttgctaataacaatagcagcgtaattagcaacagtaatatgaatctctctagcatgagcagtaataatatttccaatgggaaattcactgatttgatttactcttcaaggaatccaataaaatatagcctaccaaggttgatttatgaagatttgattttaccgaattacagcaatgacgtggacatagccaataaactgaagaacgtgaaatttaatattttcaacccatcaactaattatgaactgtgcttatttttatctaaattaacaggtgaaccctcgttgaatgaattttttagagtttctactacacccttactcaagcgagtaatagaacgtacaaatggtccaaaaaatactgacagtttaagttttaaaaccattactcaagagctactcgaggttactagaaatgcaccttccgagggcgtaatggcttcattattgaacgttgaaaaacatgcctatgaacgtgagtatctgaactgtatacaacgtggttatcatcccaatgtttcagctcctccggtcaccattgaagttcttggttctagtcatgttaccaatagcataaataatgaactgtttgacccgttgataagtcaggcattatccgatattccagcaataacgcaatataacatgcacgttaaaaagggcatacctgttgaagattttccaaagacaggactattccct

SEQ ID NO: 79954 - DNA, 594 bp, Saccharomyces pastorianus
atgagcatgatcaataaagaatgggcggaataccaatcttttaaaaatgcaaatttatcggacataatcaatgaaaaggacgctgacgaggatgaagaagatgatgaagacgagcttgaagatggtgaagaagacatggaagaagatgaggcaagtactggtaggcataccaatgggaagagcatgcgtgggaatggtattcaaaaatcgagaaagaaggatgctgctgctgctgccgctattgggaaagccataaaggatgatcaaactcatgccgatactgttgttactgttaatggagacgaaaacgaggatggcaataacggtgaagacgaagacaacgacaacgacatgaaaacaacaacgacaacgacaacgacaacgaaaatgaaaatgacaatgacagtgacaatgatgacgaggaagaaaatggagaggaggacgaagaggaagaggaaatcgaggatcttgatgaagaagatttcgccgcctttgaagaacaggatgacaatgacgatgaggactttaatcccgatgtcgagaaaaggagaaagagatcttcctcttcttcttcatccaccaaactatctatga

SEQ ID NO: 79955 - DNA, 897 bp, Saccharomyces pastorianus
atgatatcttgtgagcaattacagaaactaaaggagaacagcgaaaaatcaccggttataaatgatgcttcaacacctgtgaatcaagatttcttcaataaaactttcatttcgcctctgactaaaatgttgagtatactggcgccacaaaagtttcctacggagaatggttccgaaattcctaaagtatcatttttcgagtcagcaagctcaattctccttcctcctttacctgaaagagcgtacataatggatccagattcaagagatcctgtaattattcatgataagatatacaatgaggatgacattccacaatccgaatttgatatcgaagacggtttttttgataaaaagaatatactccttcaggctttttttgcaggaaagaaagaacgtgcgaagtatcgaaatttggaagaaacgattgctcgaaggtggcatgaaggaatggcatggagaaaggttgtcgttgctttaaaacctgatgctcacaacaacattatagtccgaagaaagtttgccaacgcatacggttggcccgttatcgatcatctgatagatgtccacttcaatggtgatgacgatgacgataacgatgaaaatgacgatatcaattccacacaagttgttgaacctattcagagcgtaaccgaaggaaagaaaaagtataggaaagctgaaaacattcctcaagaatatggatggttgaataaggttgaaacaaacggtgtctttgacgaaggtcctacgggaatgatatcaactgttggtgaaatagtcgaggcgttagctaaaagaggatttagcgccgtaatcgacaggagaaatgcctcggaagatccgaatgatgaggtccttcggtttgaagaaatgaatagtgatttggtacaatga

SEQ ID NO: 79956 - DNA, 1176 bp, Saccharomyces pastorianus
atgtctctcacaccaactaatgaaatattgtttcattacaagtcttcagtgaaggttggtgaacttgagagatatgtaattacttatcatctttatgacggtgaggaaattccaccagatttgaatttaaattccttgtggttaaaggtgagaaatatgaatccgttatcgtatagagctgcgtacctaatgggtccattcatgctttattgcgatgtaaaaactgccgaatatcatcattcccaaaaaatagttgcttcagttgattaccccaaatttgaaccgaatgtgcaaactcaacaagatttcgtggctgaactttcagtacataacatacgacagaaacacgtatggattgctgatgtgatgagtcaaatattgttcactacaaatacgaacgtcacttacgaagtcactattggaactagtaaagagtcagtagaaaatccgcatgatctgccatctcatctaggtgcttatagccctaaacttacagtgaacaggttaactaccttggatttgtggaatcttcccgttcagattaccacaccacagaaaaagaaacatcttgtagttttgacacatggtttacattctaatgtgtcgaccgatctagtgtatattatggaacagatatacaaagcacaaaagaattatccccacgaacaaattgttgtgaaaggttataggggaaacgtctgtcaaactgagaagggagttaagtatttaggtactcgtttggccgaatatattattcaggatttgtacgatgaatccatccgcaagatttcttttgtaggtcactcattgggtggcctaatccaagctttcgcaatagcgtacatttatgaagtctacccttggttttttaaaaaggtgaatccaataaattttattactttagcttcaccgcttttaggtatagtcacagataatcccgcctatattaaagtactactttcattcggggttattggaaaaacaggtcaagacttgggtttggaaaatgatgttgaagtaggcaaaccgcttctctacttgctatctggtctgcccttgatagaaaatttgcgtaggttcaaaaggaggacagtatatgcgaacgctattaatgacggaattgtcccattgtatacggcattggttttgttcctagaatattatgattcttggagc

SEQ ID NO: 79957 - DNA, 1419 bp, Saccharomyces pastorianus
atgcttgcagcaatacttccctcccaagatgatatattgactagtttcgccaagagatgtttagctgtcggctatggtggaggggtagcattaatagttcaagtctttttctttccattgaaggcacgggaacaattaaatgaagagatttcttttgtctgtggctgtatatcggaaatggaacttctctacgccaccggactggaaggagagcaagtcgcaagtagtatgagtgaagagaaatacaaaaaaatcgaaaagatatcaaaaagtgctaaagaggcgttagcccgtgctacggcctataaaggactaaccagacaagagccgagattaaagggtgaatataccgagttggaaaatgttttcactcaagttatatttattcagaagcaaataatagagaggatagatacaatttccttgctgagaaagcaaaatggaagtgcggttattgaagaatttaacagtgttgtatatccatatcgacgccaaatggttggaagtatttcttgcctaatgagagcacttcaagaggcatttataaataagaccccgttaccgcaatttttgcccagcgcaagaattgcacatagaaggctgattaataaagtgcgccaaactctgcgaataagatatcctgggcagatttcaaatttaagtgataaagcaagaaagccaaatgaaggagattacgctgacggcaaggatgaagatgacgatgataacgaaggtttggtaatgaaaatgaatagaaggggacaggccaacacaacagctaatcctcatgaatatgttttaaaagaaaaatttttaagttggaacgcatctagtgctgcatcggaagaaataattgagtatattgaagagctgttgaatttaactaaaattctggtcggtgtaaatgagtttaaatacgggtttttatcgcgtccactttacgaggactgggctgcagaggcagtaacaggatttgataatttcattaacgggaaaagtaatcctatgaatacacggcgcaatcggaccccatttgatggtacttccatcatttccgaaggaaatgaaagtttacaaagtacaaattctaatgaatctcaaatttctcctgattccacaagaagttatgagccggaatgtccagtggcatacgaaaaaaatgataatccggcagcgttgaatttattacggattgcttctcataaagcaggccaaaacgcggatggcttaccaaagacatttagaaatagagcattttccattgcttctacctccggccaactttcaagcttaagcagacacagcacccttggtaatgcggatcctaattatctgaacgatgatgatgaaagctctgatgatgatttgccattagctttgaaaatggtgctaagtcacatgaaagaaaagaaggactaa

SEQ ID NO: 79958 - DNA, 504 bp, Saccharomyces pastorianus
  modified_base (36)..(36): a, c, g, t, unknown, or other
aaggaggggttggtcactttagctaaagatgctganacgaccggtaaattcaatttggcttttaatgcatattggatcgctggcgatatacaaggcgctaaagatcttctaatcaagtctcaaaggttttccgaagccgctttccttggatcaacatacggtttaggagataatgaagtcaacgatattgttacaaaatggaaggaaaatttgatactcaacggtaagaatactgtatcagaaagagtttgtggggccgaaggtttaccaggctcttcgagttcaggagatgcccaaccactcattgacttagattccactccagccccagaacaagctgacgaaaacaaagaagctgaagttgaggacagcgagtttaaagaatccaactcagaggcagttgaagccgaaaaaaaagaagaggaagctccccagcaacaacaatcagaacaacagccggagcaaggagaggcagtgccggagcctgtggaagaagagagttaa

SEQ ID NO: 79959 - DNA, 1647 bp, Saccharomyces pastorianus
atgtgcgtcgcattcaatccaaaggatcctagtacgtttgcatctgggtgtttggaccgaaccgttaaagtttggtcattgggacaatcgacaccaaatttcacgttaaccacaggacaagaaagaggtgtgaattatgttgattattacccgctacctgacaagccttatatgattactgcatcggacgacttaaccatcaaaatttgggattaccaaacgaagtcatgtgtagccactctagaaggtcacatgtccaatgtttcttttgctgttttccatccaactttacccattataatttctggttccgaagatggcactttaaagatatggaattcttccacttacaaggtagaaaagactttaaacgttggtttagaaagaagttggtgtatcgctacccatccaacaggacgtaaaaactacattgcatccgggtttgataatgggtttaccgtactttccttgggaaatgatgaaccaactttatcacttgaccctgtcggtaagctagtatggtcaggtggcaaaaatgccgcagcttcagacattttcactgccgtcataagaggtaacgaagaagttgaacaagatgaaccattatctttacaaactaaggagctgggttccgttgatgttttccctcaatctttagcccattctccaaatggtaggtttgttacagttgttggggatggtgaatacgttatttatacggcgttggcttggagaaacaaagccttcggtaaatgtcaagactttgtttggggccccgactccaatagttatgctttaattgatgaaactgggcaaattaaatactacaaaaactttaaagaagtcacatcatggtctgtcccaatgcattctgctattgatagattattttcaggtgccttgttgggtgtgaagtctgatggcttcgtctatttcttcgattgggacaacggtacgctagttagaagaattgatgttaatgctaaggatgtcatttggtccgataacggtgaactggtgatgattgtcaacaccaatagtaatggtgatgaagcaagtggttacacattattattcaacaaggatgcttaccttgaagcagcaaataatggcaatatcgacgattcagaaggtgttgatgaggcttttgacgtattgtatgaactaagtgaatccattacatcaggcaaatgggttggtgatgtctttatctttaccacagcaactaacaggctgaactacttcgtaggtggaaagacttataatttagcccattacacaaaggaaatgtatctattgggctatctagcacgtgataataaagtatatttagttgacagagaggtccatgtttatggttacgaaatatctttagaggtgctggagttccaaacattgactttaagaggggaaattgaagaagccattgaaaatgtactcccaaatgttgagggtaaggactctttaacaaaaattgctagatttctggaaggtcatgagtattatgaagaagcactgaatatttctcctgatcaagatcaaaaatttgagctagccttgaaagtcggccaacttactcgtgttggcgatcagttgacagatgagtgcgccgagatgaaatggagagccttgggtgatgcttcctta

SEQ ID NO: 79960 - DNA, 1851 bp, Saccharomyces pastorianus
atgaaagtttacaagaacccaaattcatttgtgaaaatgaagcggtattccatgacattccacacgcaactctacaagatggctgtgagatcatatcgaaagaatgactttcacccagagacgatgcaacgagatcttgagctatttatagaggacaacaaagaggtaagaaaagccatccctgaacaaaagccagaaagagcgaaaaacacaaaggacgaatttcccgtgaacataattcgacaatcacctggtactatcaaaaaaagtgatacaagccgaaatcgcaagtgcaacgatgtatttatcgagaaggctagtaataacaatattcctaaaatcactaatgcttcgaatgatttgatagaaatttcaatgaaaacaggcggcagttcttctggttcagtgtctgtagataaaggttttaaatttgtcaaatttgataacaaaacatttcagcgattacggaatagcttaaagttagtgaataataagctgccaaaatataatgaaccttcaacaaagaagatcaaaatgatcaatgacattgcgttaaataatccgttaaacgaaccaaacggggcatcgtacaattatatagttatttcacattctaaggaaacttctgtcgcccttgaaaaataccatgatggtaataaaccgagcaaaatgttagagaaagacatgattttgaaacacagtaagaataaaccaaaaaatcctgatacagcatgggcaaataatagcgcaaggactttttgtagtgtctgcaaagaaaaatttaacgacaatgacaactatgaggtagtatgtggtaattgtggactgacagtacactacttctgttatgctattaaactgccgaaagatatgaagaaaaacactaaccttaagacatttaaatggttatgtgacccttgttcaaatgacctcaatcctataatatcaacgacctaccaatgtagtatgtgtcctacgaaggactatgactatgatagatataggagccaatcatttaaaatatgtccagacgcattgaaatgcacgagcttagggacatgggtgcatttggtttgctcacttttcaatgaagatatcaaatatggaaacggacaatcaatgcaacctgcccttaataccactgctgtgcttattaaaaatagtagatttacatgtggtgtgtgcaggataaatggaggtgggttagtgaagtgtgacaaatgccaatataggtatcatattacatgtgcacagaacagctccaattttaagcttatgtttgaaaagaaaaatatgtcagtagacaccactctaccgtgcataaaggatgtcaagcttaacgatacatacactttgagacctatactaatatgcgatagacacgatatcagcttagaaggaaacgaactttatccattatcgtacaagcctcaacatactctgtcatacatagaacagtactgcagatattataagtgcgaatctgaccatagtctagtggagttgagatattttgaacagcttagactgcggcacggcgaaatgccaggaaactcgcacgactctgctattaaacccaaaatttacgtacttcctttcgaaaggacttgcccacattgtggtacaaacaaaagtttatactggtatgaagataatatttgccattcttgcaatttgagatcaggtgcccaagaactcgattttgatagcgcatctgctaatatctctaacgataacggtttaccagtcgaaattacccagaaattgatggaaggaattgagccagctatgtttgatatcgatatttcagaagctggtaccgacaaaaatacgcatccatcaagccagtaa

SEQ ID NO: 79961 - DNA, 2346 bp, Saccharomyces pastorianus
atgcctaaagaagaagatttccaattacctagaagaagagaggctgctaaaaacgtgaattataatgaaatggaaatagatactaaattagttcaacaaatacaaatagcggaaaaaagtggtgctaagaccaagggtagcaatagccaaactcccaggaattgtaaaagcacaagcaatccagctagtagaaacgagaaattcaagtaccaaaaattccttcatgataagaatacttgctggaactttatccctacattacccccttcgttcagaaagaatagcagattctctaacatacttgatctagatgatgccatgattgacttaaaaaaaatgtctcttttcaatacagaatctgtccttttatctgcgaacgacactatttatatgatatcagagcctgctggcgagccttattatattggcagagttgtaaattttgttagtaaaccagaattttctaacactattcatgaagctataaagacaacatcggtcttccctgctaaattttttcaagttagaatgaattggttttatcgtcctagggatattcaagagcacgtaaatacttttaacccaaggttggtgtatgcatcattacaccaggacatatgtcctatttcatcatacagggggaaatgtagtatatttcataaagacgaagtttttgatgttcttcctaatgagaaggaatgcattatacgacccaatatcttttactttgatgaactttttgacagatatactttgaaatattacaaagtttacagcacggataaaatattaaatcaatggaacagtaagtcgccatttctttatgttttgaataggagatttcgttatatctatacagaaccgaagtatccattggagaacgttttgaagaaatacgttttccatgaactagaggtaaacgaattaagtcctgcagactaccaatgggataaaagatgtcagttctgtaaagaatggtgtatccaaaaggagagcctttcatgtgatgaatgcggcgtttgtgcacatctatactgtatggatccgccacttgacaggaagccgaacaaagacgtcgtttggacctgcttcagttgcttacagaaacaacaaggtactaaggactcgcatgttaggtttctagaagaacaagcactggaactggattttattcgctctgtaagacaaaaaattgaagaaatttctaacaaagctatcaaagagaatgttggttataataccgaaaattgctggtttcaatacttaggaatatattccatttctcatattggtgacgcattaaatgattctatgttttttccatatcctttcaaaccctctagggtaggagtgaagtatcaatggaacggatgtaataataatgtgccctggaggcggaactcgtatataagtgcaaattcagaagaagagcgaggctcaacgaaaacttcggaactagcatgggtacttgatgcatcaaaaattactactcgaaaattaagtgaatatattgaacaatgcaaaagcgaaatatgccctattctcaatgtgagaggtgagacttgtaatttcattgatgtagtcctaaagaatttattatttacaaattatgatacagcagaggcatttaaaaaatgtaaaagggagctttccagaaaatttttaaaagagccaagttttacagccgtggagatccgaaagtttgaggaagctgtcgagaaatttgggagtgaattacgcccagtttgtgagtatgtgggcactcaacctatgtcgatgattgttagattttattacaattggaaaaagactgaaagaggccttaccgtgagagggaaattgagtaagttatcaaagaataaaagaaaaaaagaaatcactaatcatgaaaatgacgtagagacaaagtatatagatgattcttcttttgatactgagaaactctctttaacagaatcctccttccaatgcatgttttgtaaaacagattactctccgatgtggtataaagttactggaggttcagatgatgaaaagatcaagataagaatgcagacaggagtcaacgaaaaaacagaaatttcagagaaatcgcctgcccatagcaaaaagaatgaaaaacttggcgctctttgcattcgttgtgctcgtatgtggcgaagatacgcaattaagtgggtatcaccgcttgaaacattgagaaaaataacgggaaccagtcagaatagtttttattcagcgatagaagggattatagaggagaataacacaaacaagtttacgttatccccctttcaagctcataataaactactagaatgggacttagagatccccggtaccgag

SEQ ID NO: 79962 - DNA, 1353 bp, Saccharomyces pastorianus
atgctacgtatgtcaacttcaagattcattgggcaaaggctgttcactacggctcgatctctccaggctgctaaaccggcaccaaaaggtaaaactcaaggattttccaaaaaatcatcttcagtctcatcttactcatctgcaaagagagttactcctggttcattgtataaaaactggacaaacaccacgcacaccgctcaattacaacagaccgccgttcctttggcattacctatcttcaactttgatgatatttccaagactttgaataaagtagtatcatattccaacaaacagtacaaatcccttcaccatttgggttccttcaagaagtcgcagttcaatgaactttttcaaaaaccggtttgtctagttcgtgaagatgcaacgaatagctttttgaagaaactagtatctcatcctgttaaaaaatttataatcactggagagccaggggtcgggaaaactgtactactctctcaagcgcatgcatatgcagttgattccaagcaaatcattattaacatatcatatcctgaattattcctgaacggtaggaatgacttttcttatgatgatgatttaaagcttttcatccaaccgatgtatttgaaaaagcttataaggaaaatattgaaggcaaatgaccctgcattgttaaaatctattgagctatccaaagactacaagttctcgaatgcaaacccaaagaatgcctctgtaaaaccatttgtcacattaaacaaaaccaaaaatacagttttagatttgttatccgtaatgacccacccgcataatcgtggaaaactaatgaaagccattattgatgagttatctgtccaatccaaggtgccaatcatgtttacagtggataatttttcaaaagtgttaactactgcatattctgcgtacagaaatacagagaataaacagatatattccctggatttacaaatgggtaaattgatgatggacattatttcaggagagacgaaatttgctaatggtgagagttctactatattagctatatccggcgttgacaggacaaacaaaactttacccgtggcattgggcaagatcccagtagacccctatgttactagatatcactatgaaccgaagttcgtagaattactccaaaaaggtaatgtcaccgaattcgaggttcctaaactgaacaaacaggaagttaacgaaataatcgattactacaaacaatcaaatgttttattagacaaggatatcacaggaaaaaagtgggagaacttgattgacgaaaaatatttcctaagtggtaacggtaacccaagagaattattgaaaagtttagtcctttcccataggtga

SEQ ID NO: 79963 - DNA, 852 bp, Saccharomyces pastorianus
atgccaggacacgaattggaagacgtaataaatcaacgtttgaacctatatgatgtattggaattaccgacccccctggacgtccataccatctacgacgatttgccccaaattaaacgcaaatacaggacccttgccctgaaatatcatcctgacaaacacccggacaatccatcaattatacacaaattccacttattatcgaccgcaactaatatcctcaccaatgcagacgtcagaccccattacgaccgctggttaatcgagttcctacggaaaacaaacgacattgaaagaaataaacttatacaaaagctggaagaatctgaatcgagtacgatacccaccaccacaccacatcctgatttattgcaaatccaacgccacggcgagctactcaggaaactaaaacatttcaacttgccctatggtgactggaaacatctcaacacacaagaccaagaaaatgcttcgcaacatccgtattacgattgctctactttgagaattgtccttgacaacttcctgcaatcaaataataaatcaaactgcttatctcatttgcgcaatcaagtattcatcacgctacgtgctaatgaaatctacgacatctacttctctgaaagaaacaactactcggaggatgattcaatcatcatatatactgtattcgatactcccatcacagcgcagcacgtattccgaaactggtcaagtgggaacctcatacccacggtcaaggatatttcgcccttgatcccgctacattactactctgattttaatttggagacggaactgaatgacgatattgcaagactggtctctaatgaacctatcctactcgactag

SEQ ID NO: 79964 - DNA, 162 bp, Saccharomyces pastorianus
atggtaggaatggcgtgggtgacgcccacttttgaattgtatctgattggaaataatggcattgttgacaaaagggttttattcaagagtgcgagaaaagtagctaattggtgtcaaaaacacgagtcgagactatttataagtgatgggcccgtgttttaa

SEQ ID NO: 79965 - DNA, 732 bp, Saccharomyces pastorianus
atgctagcggtgatgttaattgggtcctttgagttccaatgttctcaagaaatactaactatagtggccatgctatcggttccaaacgtgtttattcgcccaacaaaggacaagaagcgagcagatgatgccaagaatatcttcgctcatccagacggtgatcatatcaccttactaaatgtatatcatgcgttcaaatcggatgaagcttatgaatatggtatccataagtggtgccgtgaccactacctaaattacaggtccctttccgctgctgataatatccgctcccaattagaaagattaatgaaccgttacaacctagaattaaacactacagactatgaaagccctaaatactttgacaacatcagaaaggctcttgcgtctgggtttttcatgcaagtagcaaaaaaaagatcgggagctaaaggatacatcacagttaaagacaaccaagatgttctgatccatcctagtacggttcttggccacgacgcagaatgggtcatttacaatgaatttgtgctcacatcgaagaactacataagaactgtgacctcggtcaggcccgaatggctgattgaaatagcgcctgcatactacgacttaagcaatttccaaaaaggtgatgtcaaattatctttggaaaggatcaaggaaaaagttgatagactaaacgagttgaaacaaggtaaaaacaaaaagaagagtaagcactccaagaaatag

SEQ ID NO: 79966 - DNA, 1527 bp, Saccharomyces pastorianus
atgggttccaaaagaagattctcgtccgaacacccggatccagttgagacctctattcctgagcaggccgccgagattgcggaagaattatccaaacagcatcctcttccatccgaagagccacttgtccatcatgatgctggtgaattcaagggcttgcaacgtcaccatacttcagcagaagaggcccaaaaacttgaagatggaaaaataaatccatttaccggtagggagtttacaccaaaatatgttgatatcctgaaaattagaagagaattgccagtacatgcccagagagatgagtttttaaaactttatcaaaataaccaaattatggttttcgttggtgaaacaggttccggtaaaacgacacaaattcctcaattcgttttattcgatgagatgccacacttagagaacactcaagttgcatgtactcaacctcgtcgtgtcgcagcaatgtctgttgcacagagagttgctgaggaaatggatgtcaagttgggtgaagaagttggttattctatcagattcgaaaataaaacttctaataaaacgatattgaagtatatgactgatggtatgttgttgagagaggcaatggaggaccatgacttgtcgcgttattcatgtatcattctggatgaagcgcacgaacgtacactagctactgatattttgatgggtcttttgaagcaagtagtcaagaggagacctgatttgaagataattattatgtctgctactctggatgcagagaagtttcaacgctacttcaacgatgctccattacttgccgttccgggcagaacatatccagttgagctatactatacaccggaatttcaaagggactatttagattctgccattcgtactgttttgcaaattcatgccactgaagaggctggcgatattttgttatttttaactggtgaagatgaaattgaagacgctgtcagaaagatttccttagaaggtgatcaattggttagagaagagggatgcggacctttatccgtatacccactgtatggttcattaccaccgcatcaacaacaaagaatattcgagcctgctccagagtcacataatggtagaccaggcaggaaagttgttatctccacgaacatcgctgaaacttctttaacaattgatggtattgtctacgtcgttgacccaggattttcaaagcaaaaagtttacaatccaagaattagagttgagtctttactcgtttcccctatctccaaggcttctgcccaacaaagagctggtcgtgctggtcgtacaaggcctggtaaatgtttcagattatacactgaagaggcattccaaaaggaactgatagagcaaagttacccagaaattttacgttccaatttatcctccaccgttctagaactaaaaaaattaggtattgatgacttggtccatttcgattttatggatccaccggctccggaaacaatgatgagagcgcttgaagaactaaattattttggcatgtctggacgacgaaggtaa

SEQ ID NO: 79967 - DNA, 381 bp, Saccharomyces pastorianus
atggcgctattttatatatcacttaccttttctttttataaaaaaatgttacgtgtattatggcatatattgttggtgtacggaaaacacgcggggaagagaaagtatagaaaagtgatgacagaaacaaatgactcattatatatgaaaagaaataactgcagcggtgaatatgccacactggcattatcaacaaggagctgttcatttaatatgcaacagaatgattgggtaactatggaaggactatttccttttgtgatggttttgtgtcatttggaaacgaagccaatgaaactaggtatccagcttatactacaagtccctttcatgggtttaggaattcacaaagagaataaagaattctacttgatattgtga

SEQ ID NO: 79968 - DNA, 96 bp, Saccharomyces pastorianus
atgccacctgagccagtctggcacatatctgcagtaacagaaaagtttcctactcatggcgctattttatatatcacttaccttttctttttataa

SEQ ID NO: 79969 - DNA, 819 bp, Saccharomyces pastorianus
atgcaaaacttgttggaagtgtcgagcactgacaagttagaaataaatcacgatttggatttacctcatgaagttattgagaagaagaaaaaggcacctgcgggtggcgctgctgacgctgcagccaaggcagaagaagatgttagtaagaaggctaaaaagcaagatcatccaagaggtaagcctgatgaagaaacccttaagaaattgagagaggaggcaaaggccaagaaggcagctaagaaggccgccaacgcccaacaacaacaagagcaacaaaataagggcccagaaaagccaaagccatccgcaatagatttccgtgttggttttattcaaaaagccatcaagcacccagatgccgactccctatatgtctctacaattgatgtcggtgatgaagaaggcccaagaactgtttgttctggtttggtcaagcattttcctttggacgctatgcaagaacgttatgttgttgttgtatgcaacttgaaaccagttaacatgagaggtattaaatccactgctatggtattgtgtggttctaacgacgacaaagttgaatttgtcgagccaccaaaggactctaaggccggtgacaaggtgttctttgaaggtttcggtgacgaagctccaatgaagcaattgaatccaaaaaagaagatctgggaacaattacaacctcatttcactacaaatgacgggttggaagttatcttcaaagacgaagaagaaaaggaccatcctgtaagaaagttgaccaacgctaagggcgaatcattcaaggttgctagtattgctaacgctcaagtccgttaa

SEQ ID NO: 79970 - DNA, 351 bp, Saccharomyces pastorianus
atggccggtggtcaacatcaccacagaattaacatggataaataccatccaggttatttcggtaaggttggtatgagatacttccacaagcaacaagctcatttctggaagccagtcttgaacttggacaaattgtggacattgatcccagaagacaagagagaccaatacctgaaatctgcttccaaggaaactgctccagttattgacactttggctgccggttacggtaagatcttgggtaagggtagaattccaaatgttccagttatcgtcaaagctagattcgtctccaagttggctgaagaaaaaatcagagctgctggtggtgttgttgaattgatcgcttaa

SEQ ID NO: 79971 - DNA, 465 bp, Saccharomyces pastorianus
atgtacagaatgggtttaactaccatgctgattacggacaagaatgttgatcgtaacaaatgtatcagaatcgcacttgttcacgattttgcggagtcattagttggtgatattacacctaatgacccaatgacaaaggaagagaaacatcgcagagaatttgaaactgtcaagtatctctgtgaaagcataataaggccctgcagtgaaagcgcatctagggaaattcttgatgactggttagcatacgaaaagcagacctgtttggaaggaagatatgtcaaagatattgataagtatgaaatgttggttcaatgttttgagtacgaacaaaagtataatggcaagaaggatttgaaacaattttggggagccatcaatgatataaaaactgatgaagttaaaaaatggacacaatctttactggaagatcgacaagcctttttcgacagtttgaaggagtaa

SEQ ID NO: 79972 - DNA, 1062 bp, Saccharomyces pastorianus
atggacgccgatgactcaagtgatgacgaagatggtgatttgaacgaattggaatctacgcccgctaaaatcccaagagagtcatttcctcccttagcggagggacacaaggtcgtgcaattggcagctacagacaatatgagttgcgccctgttcagcaatggcgaggtatacgcatggggtactttccgttgcaatgaaggtatcctagggttttaccaagataaaattaaaattcaaaaaactccatggaaagtgcctacattctctaagtacaatattgtccaattagctcccggtaaggatcacatacttttcttagatgaagagggtatggtgttcgcctggggtaacggtcagcaaaaccaattaggaagaaaagttatggaaaggttccgtttaaagactttggatcccagaccatttgggttaagacatgtaaaatacatcgcatctggcgaaaaccattgctttgctttaacaaaagacaacaagttagtaagctgggggttgaatcagtttggtcaatgtggtgtttcagaggatgtggaagacggtgcgcttgttacaaagccaaaaagactagcgctacctgataacgttgttatcagaagcattgctgctggtgaacatcactcattgatcctatcccaagatggcgatttgtattcgtgtggtagactagacatgtttgaagttggtatcccaaaagacaatttacccgaatatacttacaaagatgttcatggaaaagcacgtgccgtgccacttccaactaagttgaataatgttccgaagttcaaaagcgttgcggcggggtctcaccattcagtcgcggtagctcagaatggcattgcctattcttggggttttggtgaaacctacgccgttggattaggcccttctgaggacgacactgaagttccaaccagaatcaagaatactgctacacaggatcacaacatcattttagtcgggtgtggaggccaattttccgtgtccggtggtgttaagctgtctgatgaggacgcagaaaagagagcggatgaaatggatgattaa

SEQ ID NO: 79973 - DNA, 429 bp, Saccharomyces pastorianus
atggtcaaaagaacagtcgccaccaatggagacgcgtctggcgctcatagagcaaagaaaatgtctaaaactcatgcttctcatatcataaacgctcaagaagactacaagcatatgtacttaagtgtccaaccattggatatattttgctggggtactggttctatgtgtgagcttgggttgggtccactagccaaaaataaggaagttaaaagaccaaggttaaacccatttttacctcgcgatgaggccaagatcatttcttttgcagtcggtggtatgcacaccttagcccttgatgaagaaagcatgtatggtcctggggttgcaatgacgtgggtgcgttgggcagagatacttccaacgccaaggaacaactcaaggacatggacgccgatgactcaagtgatgacgaagatggtgatttga

SEQ ID NO: 79974 - DNA, 219 bp, Saccharomyces pastorianus
atgaagatattttatgatcagtataagcactgtcgtgaagtggccgcatgttgtaatgttatgtcccaagagattgtatcaaaaatattggagaaaaacaatccttcaataggcgattcgaaggccaaattgcttgagctccccctagggcagccagaaaaggcatacttgaggggtgagtttgcccaggatttaatgaagtgtacatataagatataa

SEQ ID NO: 79975 - DNA, 2388 bp, Saccharomyces pastorianus
atgcaagacgaacaagattcatcgaaaaatgagccaattgcaaatgctgatagtgtcactaacattgacaggaaagaaaatagagataataatttggataacacttatttgaatggaaaggagcaatcgaataacttgaataaacaagacggcgaaaatactttacaacatgaaaagtcatcaagttttggttattggtgttctccttccccagaacagctggaacgtttgtcattgaagcaattagcggccgtttcaaattttgttatcgggagaagaggttatggttgtattacatttcaacatgatgtggatctcacagcttttaccaaaagctttagagaagaactattcggtaaaattgtaatatttcgttcctctaagacagtagaagtatatcctgacgaagccaccaaaccaatgattgggcatgggttaaacgttcccgctataatcactctagagaatgtttatcctgtagataaaaaaacaaaaaaaccgatgaaagatactacgaagtttgctgaatttcaagtttttgacaggaaactaagaagcatgagggaaatgaactatatatcctataatccctttggcgggacttggactttcaaagtcaatcattttagcatttgggggttagtcaatgaagaagacgcggaaatagatgaagacgatttgagtaaacaagaagacggcggtgagcaaccattaagaaaggtgcgcacgttagcgcaatcaaaaccatcggataaagaggttatcctcaaaacagatggcacttttggaactctatcaggtaaagacgactctatcgttgaggaaaaggcatacgaacctgatttgtctgatgcggactttgagggaattgaagcttcccctaaacttgacgtttctaaggattgggtagaacaattaattttagctgggtcttcactacgttctgtgtttgccacttctaaagaatttgacgggccatgtcaaaatgaaatagatttactcttttccgaatgcaatgatgaaattgataacgcaaaactcatcatgaaggaaagaagatttacagcctcttatacgtttgcaaaattttcaacaggttcaatgctactgacaaaagatattgttggtaaatcgggcgtttcaattaagcgtttaccaactgagttgcaaagaaaatttttattcgatgacgtctatttagataaggaaattgaaaaggttactatcgaagcaaggaagtcaaacccatacccacaaattagtgaaagctctttactctttaaagatgctttagattatatggaaaaaacctctagtgattacaatctatggaaactttcatctattttattcgaccccgtttcctatccatacaagacggacaatgatcaagtaaaaatggcattattaaaaaaagaaaggcattgtcgattaacttcgtggattgttagccagataggtccggaaattgaagagaaaattaggaattcttctaacgaaatagaacaaatatttctatatttgctcttgaatgatgtcgtaagggcatccaagttagcaattgagtctaagaatgctcatttgagcgttttgatatcctatttaggttcaaacgacccaaggatacgtgatttagcggaattacaattgcaaaagtggtcaactggtggttgtagtattgacaagaatatctcgaagatttacaaattactaagcggttcaccttttgaaggtttattttctcttaaggaacttgaaagtgaattcagttggttgtgccttttgaatttgacactgtgctacggccagatagatgagtattccttagaatctcttgtgcaatcgcatttagacaagttttctttaccctatgatgatcctattggagttattttccaactatatgctgctaatgaaaatacggagaagctctataaggaggttagacaaagaaccaacgctttagatgttcagttttgctggtacttgattcaaacattgagatttaatggaacacgcgttttttcgaaggaaactagcgatgaggctacattcgcatttgccgctcaacttgaatttgcacaattacatggccactctctttttgtttcttgctttttaaatgatgacaaggcagcagaagataccataaaaaggcttgttatgcgtgaaataacattgttaagagcctctaccaatgatcacattttaaatagattaaagatcccttcgcaattgatattcaatgctcaagctttgaaagatagatatgaaggcaattacctttctgaagtacaaaatctactcctgggttcgtcttatgatttggcagaaatggctatagttacgtcattaggaccaggctggtgtttcaaaccatcctgtcag

SEQ ID NO: 79976 - DNA, 1332 bp, Saccharomyces pastorianus
atgtttaataaaagtgtaaatagtggtttcacctttggaaaccaaaacacatccacaccgacatccactccggcacagccttccagttcccttcaattccctcaaaaatctactgggttatttgggaacgttaatgttaatgcgaatacttcaacacctagcccatctggtggattattcaatgccaattcaaacgctaattctataagtcaacaacccgccaataattcattatttggaaataaaccagcacaaccatcaggtggcttatttggcgctacaaacaatactacttctaaaagtgccggaagcttattcggaaataataatgccacagcaaattctacgggctctacaggtttattcgggaataatcacaattcgtccggtggtttattcagtggtagcaataatatagcccctagtacccaaaatggtggtttgtttggtaatagcaacaataacaatataacttctaccacgcaaaatggtggtctgttcggtaagcctactacaacccctgctggtgctggcggcctgtttggaaattcctcgtcgacaaactcaacgacaggactatttggatcaaataatacacaaagttctacaggtatttttggtcaaaagccgggagcttcgacaactgggggattgtttggaaataatggtgcttcattcccaagatccggtgaaactactggaaccatgtcaaccaacccatatggaattaacataagtaatgttcctatggcggtggctgacatgccaagatctattacgtcttctctatcagatgtgaatggcaagtcagatgcggaacccaaaccaattgaaaatagaagaacatattcgttttcttcctcagtttcagggaacgctcctttaccactcgcctcacagtcaagtttagtgagtagactaagcacgagactgaaagccactcagaaaagcacgtcaccgaatgaaatattttcaccgtcttacagtaaaccgtggctgaatggagcaggttcagctcccttagtagatgactttttttcttcaaagatgacttctttggctccaaatgaaaacagcaactttcctcagaatggttttaatttcctatcctcccaaagggccgacttgacagagctgcgtaaattgaaaattgattccaacagaagtgctgcaaaaaaattaaactcctctctggtactcccgccatcacaaaaaaacatatgcaagacgaacaagattcatcgaaaaatgagccaattgcaaatgctgatagtgtcactaacattgacaggaaagaaaatagagataataatttggataacacttatttga

SEQ ID NO: 79977 - DNA, 303 bp, Saccharomyces pastorianus
atgaccaaatggaacggcactattttagggccccctcatagtaatcatgaaaacagaatctattccctttctatagattgtggcccaaactatccagattctcccccaaaggtcactttcatttccaagataaatctaccatgcgtcaatccaactacgggggatgtccaaactgacttccacaccttacgtgactggaaaagagcctacaccatggaaactttattacttgatcttagaaaggaaatggcaaccccagcgaacaagaaattgcgtcaaccgaaggaaggagaaaccttttag

SEQ ID NO: 79978 - DNA, 1074 bp, Saccharomyces pastorianus
atgaatgataagttaagattggacaataacaatttaaagctactgaatgatgaaatggctttagagagaaaccaaatactagatttgaacaagaattatgaaaacaacatagtaaatttgaaaagattaaatcacgagttagaacaacagaagagtttatctttcgaagaatgtcgattactgcgcgaacaattagatggactatattccgcacaaaataatgctttactagaggtcgaaaatagtgaaacacatgcgtcaaacaagaacgtaaacgaagatatgaataatttgatcgatacttataaaaataagacagaagatttaacaaacgaactaaagaagctaaacgatcagttattatcaaattccaatgatgtagaaacacaaagaaaaaagaggaagttgacaagtgaccaaattggtttaaattattcacagaggctcaacgaattgcaactggaaaatgtaagtgtctcgagggagttgagtaaagcacaaactacaattcagctactacaagaaaaattagaaaagttaactaaactaaaggagaaaaaaatacgtatactgcaattacgtgacggccccttcataaaagatcaatttatcaagaaaaacaaattacgtcttctagaaaaggaaaatgcagatttacttaacgaattgaaaaagaataatccagcagtggaaacagtacccatttctgtttatgattcactaaatttcgagttgaaacagttcgaacaggaagtttttaagtcaaataaaagattttccagactaaagcaagttttcaataataaatctttggagtttattgacgttgtaaactcattattaggttttaaattggaatttcaacaagatagtcgtgtgaaaatattttcctgtttcaaacctgaaaaatatttgattgctgatctaaatgaaaacactttgaaatctaaccttgatgcagatatagaaggatgggatgatctcatgaatctatgggtggaagatagaggtcaacttccgtgctttttggcaacaataacattgcgtctgtgggaacagcgacaagccaaataa

SEQ ID NO: 79979 - DNA, 1026 bp, Saccharomyces pastorianus
atggatgtgagagcggcattgcaatgtttcttcagtgcattgagtggacgattcactggaaaaaaattgggactagagatctattctatccagtacaaaatgagcaatagtggtgggtcctctcctttcttggaaagccctggaggttcgcccgacgtaggcagtacaaatggacaaagtaatcgtcagattcaggcgttacaattcaagctcaatactctacaaaatgagtatgagattgaaaaattgcagctacaaaaacagacgaatatcttagaaaagaaatataaggccacgattgacgaattagagaaagcattgaatgatacaaaatatctttatgaaagcaatgataaattggagcaagagttaaagagtttgaaagaaagatcagctaattcgatgaatgataaagacaaaggcatagaggaattgcgaacaaccctccaaaacaaagacttagaaatggagactttaaggcagcagtatgattcgaagttatcaaaggtcactagccaatgtgaccatttcaagttggaagcagagagctctcattcgctactgatgaaatatgagaaagaaataaagaggcaaagtgtggatatcaaagatttgcagcatcaagtgatggaaaaggatgatgaattatcttcggtaaaagcatctaagatgataaactcacatccaaactactccaccgaagagttcaacgagctcactgaaatgaacaaaatgatccaagaccaagttcagtatactaaagaattggaactagcgaacatgcaacaagccaatgaattgaaaaaacttaaacaatcccaggacacttctactttatggaaattagaaaatgaaaaactacaaaacaaattaagtcaattacacgtactcgaaagtcaatatgaaaatcttcaattggaaaacatagatctaaaatcgaaattaaccaaatgggaaatttataatgatagtgacgatgatgatgataacaatgtacacaacaatgataataataatcatcactaa

SEQ ID NO: 79980 - DNA, 453 bp, Saccharomyces pastorianus
atggagtacctctccttactacgatgtgtactagtggaagctttccttgagtcatgtaaaaaagaggaagaaggaaccggcgatgctgctgactgcggatccaacgaggggttaataatatcttcaatggctgtggaagatgtagtacttgcatcggtacgatcggtcgtaaagatatcgttcggttgtaagattttttcaatgtcatcatcattcaagcttggtaaaggctcaatacggggagcatcgctcacgtttgactcattggtcgtccctgtatttgcagcattattcatggcgccaacaatacagctgtctttttgtcttttttgtttcctttcccttccagcgctgttcgtaaagcacacctctaactctttgcctttatctaccggaacagtactgctatttggtatttgctgccaagtggcaaaatctctcctaaaaatttaa

SEQ ID NO: 79981 - DNA, 351 bp, Saccharomyces pastorianus
atgccaaatgataatgacaccgagcacgcaagtacaagtgtcaatcaaggcgaaaatggaagcagattaacgcccttcctcacggtagatgatcacacactaaacgacaataacactaatgagggaagtacaagggtgtcccccgatataaagttcagcgccactgaaaacactaaagtgagtgataacctgccaagctttaatgaccacagctattccacccaggccgacacggcgcccgagaacgctaagaaaagatttgtggaggaaataccggaaccggctatagtcgaaatacaggacccgacagagtacaacgatcaccgcctgcccaaacgagctaagaaatag

SEQ ID NO: 79982 - DNA, 1677 bp, Saccharomyces pastorianus
atgttaaacgatgattctaatacgaaacttatacagtgggcggaggatggaaaatcttttattgtcacgaatagggaggaatttgtgcaccaaattttaccaaattattttaaacattccaatttcgcttcctttgtaagacaattgaacatgtatggatggcataaagttcaagatgtcaagtcaggatcaattcaaagtagttcagatgataagtggcaatttgaaaatgaaaacttcattagaggtagagaagatttgctggaaaaaataatcaggcagaaaggttcctccaataaccatagtagccctagtggtaacggtaatccagcgaatggtagcaacatccctctggacaatgccgcaggaattaataatagcaataataacatcagtagtagtaattcattttttaacaatggtcatttattgcagggtaaaacactaagattaatgaacgaagcgaatcttggagataagaatgatgtcaccgcgattttgggggaattagagcaaataaaatataaccagattgcaatttccaaagatttactaagaataaacaaagataatgagttattatggaaagagaatatgatggccagggaaagacatagaacccaacagcaagccttggaaaaaatgttcagattcttgacatctatagtcccacacttagatcccaaaatgattatggacgggctgggagatccgaaagttaataatgaaaagctaaacagtgcgaataacattgggttaaatcgcgacaacacaggcactatagatgaactaaaatccaacgattctttcataaacgatgatcgtaattctttcaccaatgctacaaccaacgcccgtaataacatgagtcccaacaatgatgacaatagtattgacaccgctagcactaataccaccaacagaaagaaaaatatagatgaaaacatcaaaaataacaacgacataattaatgacattatatttaataccaaccttgccaacaatctcagcaattacaattccaacaataatgctggctcgccaataaggccctataaacaaaggtatcttttgaaaaatagagccaattcctcgacatcgagtgagaatccaagcctaacgccctttgatatcgaatctaataatgaccgcaaaatttcagaaattccttttgatgacgaagaagaagaagaaacggattttaggccttttacctcgcgagatcctaataaccaaacgagtgaaaacacttttgatccaaacagatttacgatgctctctgatgatgatttaaaaaaagattctcataccaatgacaatagacacaacgaaagtgatctttttttggacaacgtacatagaaatatagacgaacaagatgcaagactccagaacttggaaaatatggttcacatactttctcctggatatcctaataagtctttcaacaacaaaacttcctcgacaaacactaattccaatatggaaagtgctgtcaacgttaatagccctggtttcaacttacaggattatttaactggagagtctaattcccccaattctgtcattctgttccctccaatggcagcggctccataccgttgcccatgccaaatgataatgacaccgagcacgcaagtacaagtgtcaatcaaggcgaaaatggaagcagattaa

SEQ ID NO: 79983 - DNA, 1218 bp, Saccharomyces pastorianus
atggaaggcttcaatccggctcacatagaacatgcgtcaccgattaattcatctgacagccattcatcctcctttgtatatgctctacccaaaagtgctagtgaatatgtagtcaaccataatgagggtcgtgcaagtgcaagtggaaatccagccgcagtgccgtctcccataatgacactgaatctcaaaagcacacattccctcaatagtgatcagcatgttcatacctcaacatcgccgacggaaactattgggcatattcatcatgtggaaaagctgaatcaaaacaatttgattcatctggatccagtacccaactttgaagataagtccgatattaagccttggttgcaaaagattttttatcctcaaggaatagaacttgtgatagaaaggtcggacacatttaaagttgtcttcaagtgtaaagctgctaaaaggggaaggaacgcgagaaggaaaagaaaagataagcccaaaggacaggaccacgaagacgagaaatccaagatcaatgatgacgaattagaatatgcgagtccttctaatgccacagtaaccaatgggcctcaaacatcgcccgatcaaacatcctccataaagccaaagaaaaaaagatgtgtatcgaggtttaataactgtccgtttagagtacgagctacttattcgttaaagaggaaaagatggagcattgttgtaatggacaataaccattcacatcagctaaagtttaaccctgattccgaagagtacaaaaaattcaaagaaaaattaagaaaggataatgacgtagatgcaatcaagaaattcgacgaattggaatacagaactttggccaatttgcccattccaacagctacaatcccctgtgattgtggtttaacaaatgaaatacaaagtttcaatgtcgtattgcccactaacagtaatgttacttcatcagcatcctcttcaactgtatcgtccatatcccttgattcatcgaatgcatctaaaaggccatgcttaccctctgtaaataacaccggtagtatcaataccaataacgtaaggaaaccgaaaagccagtgtaagaataaagacacactcttaaaaagaaccaccatgcagaactttctcacaactaaatcaggctgcgtaagaccggtacgccaacatcttcgcaacactcatctacagcattttcaggatatattgatgatcctttcaatttga

SEQ ID NO: 79984 - DNA, 2019 bp, Saccharomyces pastorianus
atgggtgagtcaattgaaacaatttgtaaaagccttgtcagggctttccaagaggagaaggatgattttgtctcacttgtaacaatcattgatatgtacaacgagcaggtgaactctggaaagtctataaaagaaaaggaacgttatttggatgccctattgaaaatacttaaggataatccagttaccttaaaggaaattggctgggatctgccaaagggtttattgcagtttttctcacgcaaaaacatcaatgtcaatatacatctagtttttagtccccttgtttctagtgtgatggaatgcttcaatgagctagccatcaatggaaatccgaaagaatgcttgttgaccgcttgcgaattggtgtcaacactccatatagtcttaactgaaactggcgactccgatgaagagaatgaagatttaaaggactccaatagaaatgatgcgtcaaacattactgatgagctgtcagttatcactccggagattgggcagtatatggccaaaaatacagtagaattcattccaaatttgaaaatttacgttctctttgaatttatgagtttattgttgaaacgtgtggacactttatatccatctaaatttctagccatggtaacttctgcaattattaagtatgtaacaaccaacgttcagactatggatgatccacactttattttgcgcatagtgtacaatttttgtactaattactctccagctcaaccatctgctagtctgaccgatggtattagtacaaacgatcttgaaaaaattcatgatgatgaatctgccttacagaaaaaactactggctaatctgagcgtattcgtgattagcaactgcctaaaaaatcatccaggtaatattgacaagatatatttcaaaacattgatgcataaaaaaacagatgaaaatgaaatcgatgcttcagttttacagacatgccaccaatactacgagtatgtcacatcattggatgtccacatgaaagaacttttagaaaagtgcctggtagaatcaagaagcatctataactctcttctcatgaacccggccgcttccacgcccgaattcaaagaagaaattaaccaactagtatatgaggtatcttacgcatatcaaatcaagaaactagctgacgaaaagaacttagagcttgaccaatatggagttgtgattctatctgcaatacattattctaaaaacggtactcacttattgccgcaaattgatatccaaagcgcaatttacctctatctacggtgtacaacagcttctttattttcagaaatatacgagaataagtttttggaaagttcagtacgctactggctatgggtatccacaaccgagacttccacagagaaaataaagtgtgccttacaagaacttccagggcacattaccacggcctttttgcagatgttactgatgaaaacttgcaatgaatctaataacgacactaagttgaccgaaattactcttctgaggaggttactctatctcatgcccgaaagcacatcttttacgttcatctttgaaactctactacattgtccatatataactgcaaagattgctgttcttgacattctaagagatatgatgattagatctcctgaggctgctaatcgtgacgaaactgtcggtttaatcgaacaacagaatcctgggaataccgctaatagtgtaccgataatgccaactctacctccaagaccttacatcactattaatgaagatcgcatggcttccattcatagcattgctttaatatgtttttctgccgccaagcaaaagaaaagaacgcaaggtgatttactcttggtactaacatatatgaaattttttgttagtttaaggaacaaatgggatttgggtctgttaacactcatcaataaagaaatctccgaatcatttcaaggagaaggtgagcctgaattagcattcatcaacatttccaataatactctgggagaatatatagaagagatgaacatacgctcgtaa

SEQ ID NO: 79985 - DNA, 1230 bp, Saccharomyces pastorianus
atggactttaataactggcaccaacatttgaactggttgaacatggttcttgtttgtggtatgccaatgattggttggtacttcgctgtctctggtaaagtacctttgcatttaaacgttttccttttctccgttttctactacgctgtcggtggtgtttctattactgccggttaccatagattatggtctcacagatcttactccgctcactggccattgagattattctacgctatcttcggttgtgcttccgttgaagggtccgctaaatggtggggccactctcacagaattcaccatcgttacactgataccttgagagatccttatgacgctcgtagaggtctatggtactcccacatgggatggatgcttttgaagccaaatccaaaatacaaggctagagctgatattaccgatatgactgatgattggaccattagattccaacacagacactacatcttgttgatgttgttaaccgctttcgtcattccaactcttatctgtggttactttttcaacgactatatgggtggtttgatctatgccggttttatccgtgtctttgtcattcaacaagctaccttttgcattaactccatggctcattacatcggtacccaaccattcgatgacagaagaacccctcgtgacaactggattactgccattgttactttcggtgaaggttaccataacttccaccacgaattcccaactgattacagaaacgctattaagtggtaccaatacgacccaactaaggttatcatctatttgacttctttagttggtctagcatacgacttgaagaaattctctcaaaatgctattgaagaagccttgattcaacaagaacaaaagaagatcaataaaaagaaggctaagattaactggggtccagttttgactgatttgccaatgtgggacaaacaaaccttcttggctaagtctaaggaaaacaagggtttggttatcatttctggtattgttcacgacgtatctggttatatctctgaacatccaggtggtgaaactttaattaaaactgcattaggtaaggacgctaccaaggctttcagtggtggtgtctaccgtcactcaaatgccgctcaaaatgtcttggctgatatgagagtggctgttatcaaggaaagtaagaactctgctattagaatggctagtaagagaggtgaaatctacgaaactggtaagttcttttaa

SEQ ID NO: 79986 - DNA, 165 bp, Saccharomyces pastorianus
atgccaacttctggaactactattgaattgattgacgaccaatttccaaaggatgactctgccagcagtggcattgtcgacgaagtcgacttaacggaagctaatattttggctactggtttgaataagaaagcaccaagaattgtcaacgttttggttctttaa

SEQ ID NO: 79987 - DNA, 1542 bp, Saccharomyces pastorianus
atgctggcccataacaacgtgaagcaatttcgtatagacatagacgaaccgcatagagtatggaaaccgaatgaaaacataaccggagaagcggtcattgacataaagagagacataactaacgtagcgatcaaattatcgctagtatgtgaggttcgcgtgaaaacggggaacagtccaacctccaagaataagagaattgagaaaaccttagagaagtcgacgtttctttatggacaggactacgtaaagacagctttttcggctaaggaaaagaaaccgcatgttgataaaaccaccattctcaatggtttaagcaagggggaacacaggtttccttttaggatacgaataccacgaggcagaggaatgttgagctctataaagttcgaaaggggctcgataacatacttcctctcttgcactttagaatccctcaacaacatcaacggattaaaaaaaccagaagcaagatgcgaacgtgagtttgcagtcatagttccgctggacgtctcgaggctgcccaagccgaaaattaagacagtggttttacaatcagcatccatggtccaaaacaaaaagaacaaatctacagaggacgaatcctcatcgtatacacaattaactcaaaagtctactacttctaattcttctagcagttcagtaatctccaagacgtcccccttaccaaataaaacggtgactatatccgtagacataccgcaggctggattcatgattggtgaaattatccctatagacgttaagattgaccactataagcctttctatgcccctgcgggtctcaccaccactttggtgaggatatgtagggtgggcggtgcaggcaaagatgatcctatggagactttcagaaaagatatatgtcagagtatctctcctatatatattaaccctgaaacgttgcagtttcaatctagagtttatctgaaagtgccccttgatgcattttcgacccttactactgtgggaaaatttttctccttccaatactatatcgaggttatggttaacttatcaaaaaaaaacgtggtttacacagaatctaatagaataataggaactcctattggagaacaaaatggcttgggcgtagagaataatatcaaccgtatccaaaggaaaatgctacgtatggtcaatccagaaacgttggagaacgattctgagggttatgaatccagtatatttttcaaagatatggtaaatgtggaaaagctaaagagactgaggaatgtaactggtatgtccatagaaaccgtcataggaacgacgagatccgaacagcagcaatctgatgcaagcatcccatcccaatcctcaatcacggctcctcaaaattctccatcgaatttaagagattggttggccccattaaatgcatatgatagtgacgatgttccagttccaaagtattcgccaaatgataaagtcagtgtaccgtcggaagacaaacaagaacttgaacagaaaagactacaacagttagaaagcgatcctcccccttgtgatgactattaa

SEQ ID NO: 79988 - DNA, 804 bp, Saccharomyces pastorianus
atgcctgcaggtcgtgtggaagtcaacaagtttaaaaaatccactaatgtagagatcagcaagctcgtgaagaaaatgattagctcttggaaagacgcaattaataaaaataagcgttccaggcaagcacagcagcatcatcaagatcatgcgccaggcaatgcagaggacaagacaactgtaggtgagtccgtgaatggtgttcaacagccggcctcctcccagtcagatgccatgaaacaagacaagtacgtcagcactaaaccaagaaatagtaagaacgatggtgtggatacagctatataccaccacaaattacgtgatcaggtactaaaagcactctacgacgttttggccaaggaaagtgagcatccacctcaatctattttgcatactgcaaaggccatagaaagtgaaatgaataaagttaacaactgtgacaccaacgaagccgcttacaaagccaggtatcgtataatttattcaaacgtcatatcaaagaataacccagatctcaaacataaaattgccaacggtgatataacacctgaattcttagctacatgcgatgccaaggatctggcaccagcgcccttaaagcaaaagatagaagaaattgccaagcaaaacttatacaacgcacaaggtgccaccatagaaaggtcagtcaccgatagatttacttgtggtaaatgtaaagagaagaaggtatcttactatcaattgcaaacaagatctgcggatgaaccattgaccactttctgtacatgtgaagcatgtggtaacagatggaaattctcttag

SEQ ID NO: 79989 - DNA, 102 bp, Saccharomyces pastorianus
atgagggaatttaaattggaattggaaaaatctggcatacagttaggacctgaacaactggccccgctaatgaccgttttaggccttgagaagaaaaaatga

SEQ ID NO: 79990 - DNA, 414 bp, Saccharomyces pastorianus
atgctaagagttatatggaagcatagttccagagtcactcgttcgatagaactatcgaacatttctaccactaatcacaccaggagtttaaggaggctttcctggatttctccgagaagattttacgctcaatcttgggacgacagacagcctaatgacaaaatagatgcacacataaaggtgcagaaactcatggatcaaataaattcgaggcctaatgttctggaaaagttagaaaaggttagcaatatcatgatcgaaaaaaaattggttaatctagatgggacttctgccaatgaagaaaatacgatgaaaccatggcaaatgattaagatcttaatggacagagatctgagacacgctatgagggaatttaaattggaattgggatcctctagaaacgaccggcaatga

SEQ ID NO: 79991 - DNA, 1176 bp, Saccharomyces pastorianus
atgcagctttatctcgttccattatttacttcattattattggcccaacaattaaaagaccgaggccaagaacgagatgaaggacataaagagaaagaggaaaatataaatctcatcgggtcttcctcagtcaagaaattattttctcaactaattttttttagctctttgaaattgtgtgaaaatttggtcataaaggaaaaaaatttagcactatatcatttgatcaaattcgcgacaaaggtttctctggatgatttgattttacaaaaaatatccataaacttattgaatcatttgttcttccatcaaattagggatggaagtgatgatgataatttaattaaaaagttatgtttaaaaaatcaactttctttccaagctttgaaagattacatcacattgtggaatgacggttctgaagtttataatgcattttataaggagcttttctatgaagagcaaccaaagattaagccaataaaactaacaacatctgacttgctgaaattattccctgaggatgttcaatttgtgatatccactccaccaaatacaataacttcagcatcaacaagcgataattgtacatcatcacaatcagctgcgcagaaaaatattgaaaactttactacgttatcgaagtacgatgcctactcgtccacatctttcataccgtccacgtcgaaaaacactaacactaacgttaataagcagcagcagcagcagcctcaaaactctactccatgttcttccaacaggtttttgttcaacaaaagcagcctaatttctcaggaacgtaatggtagcaacaataacagcggcacacaaggacctggttccatgaatgagagttattctcttgacaattcattcaacacaaccaataccaatatgacgagacaaccaaccaccttaactagagcaaccgatgctatgactacggcacctacgacaccaactccatacaagaacactagtggaagcagcagtaacaatctatggattgaatcccccatgacaaatttcaagggttccaccatcagtaaaagtactaataagagcaaaatggttaatactggtaaaaattatattttagggggccacaataaagttaaaaacaacagtagagctcaatcaatacatatagatgactttgaaaatgagaacaattaa

SEQ ID NO: 79992 - DNA, 1419 bp, Saccharomyces pastorianus
atgcagaagtgtgctggccatgcaccactgatgactgcagcctcgcgggtctcccaagacaccgtagacgctcttttgcaagctattttaaaggccttccataaattagcttcgatcgacagtcacattaatgatcctgttgaaatagccttcaagctcataaactcttttaagtatctgccaatttcaggctcttctgtaaaagattttgagtcggaactgcgggagttagacgttttttctccccttttgcagtcagccgttactgctgctaataatagcaatatcatatgggaccttatagcggtgttatttgcatacatttccatccataaacagctccatcctttgatcctgcacaatctgaacatatggaaggattttatggcagataatgacgaagaaacggcgacaaccacggacggggactcaatgaatttcggcgtactgtcgcttctttccattgttcaaaattttgaagaaataacgccaaatctatttgagtttctaaagctcggtttgagatccactttactcaagatatgggtagcacaatggcaaagatacgatccttcggcaacgaacttaatcaacggtgatgagaaaatttctagctggataacaaaggattaccaggtggatttttttatcatcacttcattagcatcaacgtcctcattagaagttttgccatctcattattttgtgtacaagatctctaaaaggatctctcacttcccaaatttaattgatcctaaactatatcgatctgcaatttctacaataatggaaaatgggatttcagacaatggtggtggtgagaactccagcgacaaaattgatccgactgatttgtcctttcactttcaagttttaatggaagttattgaccatcctgagttgaattatttgcaggaaaatcgattaattttgttgctcgacattgcattaaattatttaatcctggttcctactcactgtttacattcaaaccttggtgaattgggctctactcaaagtttagcatccactttaaatatcattcagttccttctatcgaaattcttaatcaacatgggcagtatttcgcaattaattaatcaatacaacaggaaatgcatcactactaataacatcaataataacaacattaacaacaatggcgttattaatggtagtactaacaccactagtactactactactaccaccactaataacaataataatagcaataatagcagtattagtaataataacagaaaaatagactggacgcaatcatatcaaacgaggtaccaaattccatactggtttgaggactcaattttgccaccaattccgcctatttcgaaatcgcttttcacttttgacaagaacctagaccatgagtcggattcaattatgattgtaaaatga

SEQ ID NO: 79993 - DNA, 138 bp, Saccharomyces pastorianus
atgttgtccaagactaaggtctactacttccaaggtggtaacaacgaattgggtactgctgtcggtaagttattcagagtcggtgttgtctctattttggaagctggtgactctgatatcttgaccaccttggcttaa

SEQ ID NO: 79994 - DNA, 1407 bp, Saccharomyces pastorianus
atgcagatcccatttgtcggtttcctacctatcaggtctaacaaccacatggccgcattgggtgttttcggtttgattcagattgtcgccttcggtgacttcgtgaagggccaaatcagcacagctaagtttaaagtcatcatgatggtttctctgtttttgatcttggtccttggtgtggtcggactttctgtcttgacctatatggggttgattgccccttggactggtagattttattcgttatgggataccaactacgcaaagacccacattcctatcattgcctccgtttccgaacatcaacccgtttcgtggcccgctttcttctttgatacccactttttgatctggctattccccgccggtgtattcctactattcctcgacttgaaagacgagcacgtttttgtcatcgcttactccgttctgtgttcgtactttgccggtgttatggttagattgatgttgactttgacaccagtcatctgtgtgtccgccgccgtcgcattgtccaagatatttgacatctacctggatttcaagacaagtgaccgcaaatacgccatcaaacctgcggcactactggccaaattgattgtttccggatcattcatcttttatttgtatcttttcgtcttccattctacttgggtaacaagaactgcatactcttctccttctgttgttttgccatcacaaaccccagatggtaaattggcgttgatcgacgacttcagggaagcgtactattggttaagaatgaactctgatgaggacagtaaggttgcagcgtggtgggattacggttaccaaattggtggcatggcagacagaaccactttagtcgataacaacacgtggaacaatactcacatcgccatcgttggtaaagccatggcttcccctgaagagaaatcttacgaaattctaaaagagcatgatgtcgattatgtcttggtcatctttggtggtctaattgggtttggtggtgatgacatcaacaaattcttgtggatgatcagaattagcgagggaatctggccagaagagataaaagagcgtgatttctataccgcagagggagaatacagagtagatgcaagggcttctgagaccatgaggaactcgctactttacaagatgtcctacaaagatttcccacaattattcaatggtggccaagccactgacagagtgcgtcaacaaatgatcacaccattagacgtcccaccattagactacttcgacgaagtttttacttccgaaaactggatggttagaatatatcaattgaagaaggatgatgcccaaggtagaactttgagggacgttggtgagttaaccaggtcttctacgaaaaccagaaggtccataaagagacctgaattaggcttgagagtctaa

SEQ ID NO: 79995 - DNA, 276 bp, Saccharomyces pastorianus
atgttttttggtggtgcaccattctctattgccagacagaccaaatcgatgtggataaccgctgttctttgtggtatgttgtctttgattatgggattattggtaaggatagtccctgatgaagtagcattgaaagcatttccggttgcttatgttcaaaaatttaaatatgtatttggacttgagtttctcagaagaaagcaactcgcaaaaaatgacgacgaagaagcgcttttggacgaatctgatacaccagagtctacggcgttctactag

SEQ ID NO: 79996 - DNA, 267 bp, Saccharomyces pastorianus
aatgaaggcaccccaataaacaatgtctactttgcagccggagcgttatttgtatcttctggattcgacaccagtattaagcttgacattatttcagacccagaaagtgaacggcccgctattgaatttgagacgcccacctttttagtttccaatgacgatgaggtcagccaattctgttacctttctgatgatgaatcaaatggggaggtgcttgaagttggaaaaaaaaacttctgcgctttgtataacttaagtaatccttaa

SEQ ID NO: 79997 - DNA, 1032 bp, Saccharomyces pastorianus
atgactaagaccatcacagttgctcatatccagtatgattttaaagctgttctggaagaaaatgatgaaaatgacgatgaattttacatcaatgttgacaaaaacctaaatgaaatcaaggagcataagatagtagtgttaggaaatagcaggggtgtagatgcaggcaaaggaaatacatttgaaaaggttggctcccacttatacaaggcgcggttggatggacatgattttttattcaatactatcataagagattgttcaaagatgctcaagagggcggattatactgccgtagacacagctaaacttcagatgagacggttcatattaggcactacagaaggcgatattaaagtattggattcaaatttcaaccttcaaagagaaattgaccaagctcacgttagtgaaataacaaaactaaagttttttccaagcggtgaagctttgatatctagttcacaggatatgcaattaaagatctggtcagtaaaagacggctcaaatcctcgcacgttaattggacacagggcgacagtcacagatattgccataatagaccgaggaaggaatgtgctctctgcctctttggatggtacaatttgcctttgggagtgcggcacaggaacgacaattcacacgtttaacagaaaagaaaacccgcatgatggtgttaacagcatagcgctgttcgaagggacagagagacaattacatgaaatttctacttccaagaaaaataatctagagtttggaacatatggaaaatatgtgattgctggccacgtttctggtgttattactgtacataatgtattttccaaagagcaaactattcaactcccaagcaagttcacatgttcatgtaattcattgacagtcgatggtaataatgcaaactatatttatgccggatatgaaaatggaatgctagctcaatgggatctaagatcaccagaatgcccagttggtgagtttttaattaatgaaggcaccccaataacaatgtctactttgcagccggagcct

SEQ ID NO: 79998 - DNA, 135 bp, Saccharomyces pastorianus
atgtctgaagtcatatccaaagtttattctgacacaagaataacaacttttcttcctgaacattctaatggtttgagtaacgaatttaggtgctacgcaaattttgaatgtagttcatggaaatttgcttcttga

SEQ ID NO: 79999 - DNA, 438 bp, Saccharomyces pastorianus
atgaagcttttcaaggaagattggcagctttcccagttttggtacagcgatgacacagccgcaattttagcagatgccatattggaaggtgcggacgaaaacactgtaattgcaatagttagtgcgccatccgtctatgctgccattcaaaagaaacctactaatgaaattccaaccgaacatatctacttgttcgaatttgataagagattcgagttgttagctggaagagatcatttctttttttatgattacaataaaccactggacttcagtgatgaaattaaaggaaaagttgatagattgttaattgacccaccttttttaaatgaagattgtcaaacaaagtgtatgtatatcataaacatatccctactcattttttttatctttttaccagtattttttcatcttactaactgttattcattgatataa

SEQ ID NO: 80000 - DNA, 876 bp, Saccharomyces pastorianus
atggtgcaaatgataaagaaggttctaggaactttttttacctcaaaattggagattatgctgcgagatatatctttatcctctgaaatgtatcaagcattccaacactcaacaaccaacagcatagaatatttgagttttgcaccacaagttttgacgagaacgagctggccctttcagagtactaatccaattgatgaaggtatttcactacctcctagaatgtcacaaattttagctggctttgagggctattacagcttaaaatacaaagaaagagtgctaaagtgggctcatcatctaagtgtaattgaaattggctgccaatttaatagcggttactacgaaataagtttttctgtttacgctggagtgattttccttctatttgaagactatgaagaattaacgttgggggaaatatatgaactaactcatattcccatagatgacgttaagtctcttgtaatgtcaatgtcgacaatacccagatgtaagattttgaaaaaatcatccagttcaggaaatatgaaattttcagttaattatttcttttcttctccaaacaggaaagtgaaagtgccggttattgcatgccctctaccatctcagaaatcagataatttggcaaccgcaagttccgtagacacttatgataatgaaattgttatggagcttagtgctattattcttcgtatcatgaaaacagaaggtaagctaagccatcagcaattacttgaaagaactacgaaacggacacagtctcggctcagtcttacaccgagcatttttaaacgaagcattcagcttttaatagagaaagaatacattcagagaaacgcagatgacccctcttattaccattacctttcctaa

SEQ ID NO: 80001 - DNA, 1341 bp, Saccharomyces pastorianus
atgataactaataagaaaataaagataagtgtcccagaaaaactcggtttgtcagaagaatcttttgaggaatcctgggaaacagttaaatatgccgttgatcatatatacagcgatgacatggccgacctttccttcgaacaagtgtacaagaccatttatactatcgttttaaataaaaaggggccaatactttataacagattgaaagattatttaatccaaaaattagcgcttttgagggaaacgatagtcaaggacaatactcatgattatgagtttcttggaactatggcacggttgtgggatgtggaatgccattgttttaaaataacaggagacttaatgatgtatatggacaaagtttattgcaaaccaaatagatgcatggaggtatacgacatgtgcctcgatcttttccgaatcgaaatattgcaaaaatgctcatcttctctcatctcagcactgatatctgatatagaaaggattcgtaatttaggatctgtcgactccgaacatactagtttgtggaaagtactaataggaatgatggagacattacatgacaatagagatagttttttcttaaccgattttgagccggttttgattagcgcgacagaagaatactacaataaagctattgatattgaattattaacgccaattgagagcctggataagattaggaagttaaggcagtttgaaagtatgctagactcctcttttctaaatgtggattctcataataagttgaagactgtattagaaaatgtccttatatggggaaagttgagtgatattattgaagatctaacgcacgaagcaatggtaatttcaaatggaaagctactccaagaaatttatgacttgtcaagcgaggaaaaatatcgcgttactgtcattgaatctattaaatcttacatcaataaaaatgccataaatattccttttaatgaaggtaaccgcaaaaaagggcagaatgcgattacttggtcttcggaaattgtagagctatatcgcagtcaacactcgtttttggaaagtattgattttggttctgttcgtcttaataatttgaccggggatgtatctaatgcaatacttggcgatgttttctcaatgtatttctctaaagaaggagcattaccatctgagtatctttctacctacgtggaccattgtatgaaacgaaccaaggaaaaagatgctgaaatagtgaagatcaagcaagatttgcttgatagtaccaaattaatcggactcctaactgagaaggatatatttgaaaagatttacaaaaaacaactctccagaagataccccaggagaggtctttag

SEQ ID NO: 80002 - DNA, 312 bp, Saccharomyces pastorianus
atgatttttgctttcaagtatatcataagaaggcggattcaaagtcaagaaattatcaagaacccagaaatttccagtatcagttcaagtgaatttggtggagagaaaaattacaataatgaaaagagaatgagcgttcaagaatccataacacaatctatgcgaattcaaaattggatggatgatagttactatggtcacgggttgacaaataatgactcaactccaaccaggcacaatacatcgagttccataccaaaaatttcaagaccaattgctagccaaaactccctgggttggaacgaagtttga

SEQ ID NO: 80003 - DNA, 3474 bp, Saccharomyces pastorianus
atgcagtttccattcgcttgtctcctatcgacccttgtaattagtgggtcattggcccgggccagccccttcgactttatattcggcaatggaacgcaacaagctcagagccaaagcgagagtcaaggtcaagtttctttcaccaatgaagcttctcaggatagttccaccacctctttggtaacagcctattctcaaggtgttcattcgcaccagtctgcaacaatagtgagtgccacaatctcttccctcccatctacttggtatgatgcgagctccacttcccagacttctgtgtcatatgccagtcaagaatccgactatgccgttaatcaaaactcttggagcgcgtctactaatcaactgccatctaccagtacgacaagctactatgcgccaaccttcagtacatcggccgattttgctgcttctagtgtaaatgcagcttctgatgtctccactgccagtgttcccattgatacgagtgctaattctatccctttcacaactacaagtaacatagagactacaacgagtgcacctctcacttcggacactccacttatttccactagtacgatgtccgcagctgataacgtattttcgtcagcaaaccctatttctgcctccctaacaaccaccgatagttcagaaagttttgaccaaacttcgactgctggtgccattccggtgcaaagttcagcagattttagtagttctagtgaaattttagtacaaagttcggtggatttcagtagccctagttctccaactactaccgatatatcgctatcagctgccccactgcaaacaagtgaatcaagcagttttaccactgcatcagcagctctaccagtaagttcaacagacgttgatggctcaagcgcctcacctgtagtgagcatgagcgccgcaggacaaatagctagctcaagcagcacagataatccaactatgtcagaaaccctttcgttaacatctacagaagttgatggttccgatgtttcatcaacagtgagcgcattattatcggctccttttttacaaacaagtacttccaacagtttcagcattgttagcccatcggtatcttttgttccatcacagagttcctcagacgttgctagctccagtactgcaaatgtagttagttcatccttttctgatattccaccgcaaactagtacctcagggagcgtagtttcggtagcgcaatccgcatctgccctcgcatttcaaagttcaacagaggtatatggtgccagtgcctcgagcacaatgagttcattattatcaactacttcgctacagtctactactttggatagctcaagtttagctagctcctctgcgtcgagttcagaccttacagattatggcgtctccagtacagcaagcataccgctgttgtcagcctcagaacaagcaagtacttccagcagttttagcgttgttagcccttcggtatcttttgttccatcacaaagttcctcagatgttgctagcaccagtgctccaagtgtagttagttcatccttttcttatacttcactgcaagcaggtggctctagcatgaccaatccctcttcatcaactatagtatattcaagtagtactggcagttctgaggaatccgctgcatctacagcttctgcaacactgtcgggctcctcgtctacttatatggcaggaaatttgcaatcacagcctccatccacttcaagtttgctttcggagtctcaagctacaagcacttcagctgtgctagctagcagttctgtttctacaacttcaccctataccactgcaggtggtgcatctacagaggcctcatccctcatatcatctacatctgcggaaacttcccaggtaagttattcacaaagcacaactgcattgcaaacttcctcattcgcatcgtcttcaacaacagaaggaagtgaaacatctagtcaaggtttttctaccagctctgatttagttcaaatgccttcttcgatttccagcgaattctcaccctctcagacgacaactcaaatgaattctgcaagctcatcatctcagtacactatatcatccactggtatactttctcaggtttcagacacatcggtgtcttatacaacttcaagttcgtctgtttctcaagtttcagacacaccagtttcttatacaacttcaagttcgtctgtttctcaagtttcagacacaccggtttcttatacaacttcaagttcgtccgtttctcaagtttcagacacgtcagtaccttctacaagttccagatcgtccgtttctcaagtctcagacactccggtgccttctacaagttcaagatcgtccgtttctcaaacatctagctcactacagcccaccactacatcctcccaacgtttcaccatttccactcatggagcgctttctgaaagtagttctgttagccaacaagcttctgagattactagctcaatcaatgcaacagcttccgaataccatagcatccagacgaccgcggctactcaatccacaactctatcttttaccgacgcaaacagcagttctgcttccgctccattggaagtggcaacgtctacgccaaccccatcttcaaaggcatcctctctgttgcttacaccatcaacatcctctttaagtcaggttgctacaaatactaatgtacagacgagtttaacaacggaatcgacgaccgttttagaaccatcaacgactaacagttccagtacgtttagtctggtcacttcaagtgacaacaattggtggattccaactgagttaatcacgcaggcaccagaagctgcatccactgcatcttctaccgttggaggaacacaaactatgactttgccccatgcaattgcagccgcgacacaagttcccgagcctgagggctacaccctaatcacaatagggttcaaaaaagctttgaactacgaatttgttgtatcagaaccaaaatcatcggctcaaatcttcggatacttgcctgaagctctgaacacaccttttaagaacgtattcacaaacattacggtactacaaatagtgccattacaggatgactcactaaactacttagtaagtgttgctgaagtatactttccaactgcagaaatagaggagctgtcaaatctaattaccaactcttcaagcgctttttacacggatggaatgggtacagcaaaatctatggctgcaatggttgattcctcaataccgctaacgggcctcttacacgatagtaacagcaactctggcggatcttcggacggatcctcctccagtaattcgaactcaggatcttcaggttcaggatctcaggatctaattcgaactccggtgtgtcttcatcttccggaaattcctatcaagatgccggtactttggaatattcatccaaatctaactccaacgtatccacttctagcaaatcaaagaaaaaaatcattggtttag

SEQ ID NO: 80004 - DNA, 96 bp, Saccharomyces pastorianus
aaggcgagaaacgctcgagaactacagaaactgaccacagcgctcgaggacatcgacgaagtgacgtcgttgtacactaacgctagcaacgcttaa

SEQ ID NO: 80005 - DNA, 513 bp, Saccharomyces pastorianus
atgttttgtgttcagcctaaaaaaacggatttcattgactctgacggtaaaattgtcactgcttatcgtagtaacattttcaccaaaatatggtatttcttgctgggtaaaaaaattggtgaaacagaaagattcagctcagattcccccatcggcagcaataatattcaaaattttggtgatatcgatccagaagatatacttaacaatgacaacccctacacccctaaacacgctaatgttgaaggctacgacgacgacgacgacgacgacgacgacgctaatgatgaaaacctatcatccaacttccataacagaggcatagatgatcaatactcacctactaaatctgcatcatattcaatgtcgaatagtaatagtcaagattacaacgacgctgatgaagtaatgcacgatgaaaacattcatcgtgtttatgatgacagcgaagctagcatcgacgagaactattacacgaaaccaaacaacggcttaaatatcacgaactattaa

SEQ ID NO: 80006 - DNA, 840 bp, Saccharomyces pastorianus
atggcaagctgcaatccgaccaggaagaagagctctgcttcaagcctatctatgtggagaacgattctcatggcgttaacaactctaccgctaagtgttctttcgcaggagttggttccggctaatagcacaacatcgagcacagctccttccatcacttcgctttccgcagttgagtcatttacgtccagtaccgatgcaacgagcagcgcaagtttatcaacgccgagtatagcttcaatatcctttacttccttcccacaaagttcttcactgcttactctttcgtcaacattatcttcagaactttcctcttcgtccatgcaagtttcgtcgtcttcaacatcgtcgtcttcttcggaggttacgtcatcatcgtcatcatcatcaatatctccttcctcttcatcatcaacaataatatcatcgtcatcatcactgccgacattcactgtggcatcaacatcttcgacagttgcctcctccacactttccactagctcatcgttggttatctctacgtcttcgtcaacgtttacgtttagttcggaaagttcaagctctttgatttcctcttcaatttcaacatccgtttcgacttcttcagtgtacgttccctcctcttcaacttcatctccaccttcgtcctcatccgaattgacatcatcctcgtactcatcatcctcatcctcatccaccctcttttcctactcctcctcattttcatcatcctcatcctcatcatcctcatcatcctcatcatcatcctcatcctcatcatcatcatcatcatcatcatcatcattcttttcattatcattttcattattaataggttga

SEQ ID NO: 80007 - DNA, 354 bp, Saccharomyces pastorianus
atgcctggctcaagaacatacaggaaggttgaccctcctgacgtagagcaactaggtagatcttcatggacgctgttacactctgtagctgccagctatcctgctcaacctacagaccaacagaagggtgaaatgaaacagttcttgaatatcttctcacatatttatccttgcaactggtgtgctaaagactttgaaaaatatatcagagaaaatgcaccacaagttgagtcaagagaagaacttgggaggtggatgtgtgaagcccacaataaagtcaataagaaattgaggaagcccaaatttgactgtaatttctgggaaaaaagatggaaggacggctgggacgaataa

SEQ ID NO: 80008 - DNA, 141 bp, Saccharomyces pastorianus
atgaaagcaatagataaaatgacggataatccaccacaagaaggcttaagtgggaggaaaataatatatgacgaagatggcaaaccgtatgttggattacgcaaagcaattcaggatctactgatccaatcaagcttgtga

SEQ ID NO: 80009 - DNA, 171 bp, Saccharomyces pastorianus
atgtcctgtgtcatttgcttcaatttttcctgccatttatttgtagttatatttatatctagatcaaccgaaactataccaacgacgaagctgcttcttagtaaatatattttctactgtgtcaacgcattggaactgacattgttcttattctataagtcatacagttga

SEQ ID NO: 80010 - DNA, 174 bp, Saccharomyces pastorianus
atgtcacagattacatcaaaaggtcggcgtatactggataagaaaatccgaacttttccggtgggctttaccagcaaaaaagtggccgggcatgtaattaaatatatcaccgtattttctgctggctttttcttatgcagagaacaaaggccagagtgccttcgaggaaattaa

SEQ ID NO: 80011 - DNA, 87 bp, Saccharomyces pastorianus
atgaatacgtataggaagggaagtttgggacagagacagagacagagagagtacgggcgaaatgggaatgaatcacattctacgtaa

SEQ ID NO: 80012 - DNA, 864 bp, Saccharomyces pastorianus
atgagcaatgtggctggggaattgaagaatagtgaggggaaaaagaaaggcaggggaaataggtatcataacaagaatagaggaaaaagtaagaatgagacggtagatcctaaaaagaatgagaataaggttaataatgctactaatgctacccacaacaatagcaaaggcagaagaaataacaagaaaaggaacagagagtattataactataaaagaaaggctagattgggtaaatcaaccgagaatgaagaatttaagcttgttattagattgctacctccaaatttgactgcagatgaattttttgccatcttacgagataataataacgataatggtgataagcaagatatccagggtaaactcaagtacagtgactggtgtttttttgaaggtcattattctagtaaagtattcaaaaactcgacatattctcggtgcaatttcttgttcgacaacttatcagacttggaaaaatgcgcaaatttcattaaaacttgtaaattcattgataataaggataatattacaattccagatatgaaactgtcgccctacgtaaagaaattcactcaaacatcaaaaaaggatgccgcgctagtaggaacaattgaagaagacgaaatttttaaaacatttatgaattcaatgaaacagctgaatgaaaatgacgagtactcattccaagattttagcgtattgaaatctttagaaaaagaattctcaaaaagcatagagttagaaaataaaatagcagaaagaacagaaagggtgttaacagagctggttggaactggtgataaggtcaagaataagaacaaaaagaagaaaatacaaacgccaaaagaattcaagaagagg

SEQ ID NO: 80013 - DNA, 873 bp, Saccharomyces pastorianus
atgaatatgacaatactgcctaaccataaagacactttttattctatgatctgtttaagccttttccacgtccacgtattgactcaaaaaatcgggacagtcggttttcccagttacgattatgtttacgataatttagtaacgtatttcattgtcatggatgacttgtctaaaatcactacagttttggaactaatgaaaagaaacaacaccaaacaagatccaaataaattagtgttttacatcaattttctaaacaaaattactaattactatgggtgtcgcattcgtttgccgtttattactgagtttatcgaacctttactgcatttcgatgtattttttagcgggaagacgggcaatgccttggatattgaaatcaaagaatctatacacacattgacaatcactgtactgtctatagactcttcttattcctcacaggttgcacaatggcaagtatcccgcatactcgtctatttaaagatgtcgatggaccaatttattgcaggtaaattgtccgcaaatcaaattttacttatattcggccatctatccacacaacttccctcactacataattataacaagcatttgcttagggactctttgcacgagacgtatatcagaattgttaatgtaaaaaacccagaaaagaagaatgtactgattgaatgtctgattgtacaaatagcctttatcaacaatcctcatcatttgatcggctggttgaacatctgtctccagctaatcaatacacataacaaaaagctacttcaacaattgtgggaaatggtttcgagtctagaatcctccctagccatcgactggtggtacacaacggtcttatcaagtcaatcttctaaattatag

SEQ ID NO: 80014 - DNA, 240 bp, Saccharomyces pastorianus
atgcgacaaggtaaggaactggaagcagcctctaagttttataaggcactgactgtataccctcagccagccgatttattgggaatttaccaaagatctattcctgaagccatttacgaatatattatattaatgattgccatcttgcctcctgctaatgtggcttctttcgttaaaggagttgttggaagcaaggccgaatctgatgcggttgctgaagctaacgatatcgatgactga

SEQ ID NO: 80015 - DNA, 1311 bp, Saccharomyces pastorianus
atgtccgccaatatctcagaaactacatcaatgattacagacattgctacagccccttcagaaatcgataggttgatcaggacaacatttataacacaaaggcccagctacttggggttgccagcgaatttggtagatctaaaggttcctggttctcttttggaaaaaccgattgatctatcattaaaacctaacgatcccgaagctgaaaaggaagttattgataccgtactagaattgatccagaattcgaaaaaccctgttatactatcggatgcctgtgcttctaggcacaacgttaaaaaagaaacccagaagttaattgatttgacgcaattcccagcttttgtgacacctctaggtaaagggtcaatagatgaacagcatcccagatatggcggtgtttatgtgggaacgctgtccaaacaagacgtgaaacaggccgttgagtcggctgatttgatcctttcggtcggtgctttgctctctgattttaacacaggttcgttttcctactcctacaagactaaaaatgtagtggagtttcattccgattacgtaaaggtgaagaacgctacgttccccggtgtacaaatgaaatttgcactacaaaacttactgaaggttattcccgatgttgttaagggctacaagagcgttcccgtaccaaccaaaactcccgcaaacaaaggtgtacctgctagcacgcccttgaaacaagagtggttgtggaacgaattgtccaaattcttgcaagaaggtgatgttatcatttccgagaccggcacgtctgccttcggtatcaatcaaactatctttcctaaggacgcctacggtatctcgcaggtgttgtgggggtccatcggttttacaacaggagcaactttaggtgctgcctttgccgctgaggagattgaccccaacaagagagtcatcttattcataggtgacgggtctttgcagttaaccgtccaagaaatctccaccatgatcagatgggggttaaagccgtatctttttgtccttaacaacgacggctacactatcgaaaagctgattcatgggcctcacgcagagtacaacgaaatccagacctgggatcacctcgccctgttgcccgcatttggtgcgaaaaagtacgaaaatcacaagatcgccactacgggcgagtgggatgccttaaccactgattcagagttccagaaaaactcggtgatcagactaattgaactgaaactgcccgtctttgatgctccggaaagtttgatcaaacaagcgcaattgactgccgctacaaatgccaaacaataa

SEQ ID NO: 80016 - DNA, 1962 bp, Saccharomyces pastorianus
atggttggtcaaaagtccgattttccaatcaccaaaagaaaagtgtactctaacacaggaggtaaccatttcaactttgattttgtaagagtaaaattgattgttaacccctctgaatgtgacaaattagtcaccaagggccctgctcattctgaaactatgtctacagaagcagccgtttttaagaatttttggggaattaaatcttccttaagaagattcaaggatggctccatcacccattgttgtgtttggtctacatcctcatcagagcccatcatttcctcaattgttaactttgcattgcagaaacatgtttcaaaaaaggcacaaatatcaaatgagactatcaagaagtttcataatttcctaccgttgccaaacttaccctcaagtgctaaaacatcagttttgaacttgagcagctttttcaacttaaagaaatcctttgacgatttatacaaaataattttccaaatgaagttaccgctttctgtaaaatcaatcttaccggttggctctgcatttagatacacttccttatgccaaccagtaccattcgcatactctgatccagatttctttcaagacgtcattttggaatttgaaacctcacctaaatggccagatgaaattacttccttagaaaaggctaaaacagcttttcttctcaaaattcaagaagaattaagcgctaactcttcaacttataggtcgtttttcagcagagatgaatccatcccatacaatttagaaattgtaaccttgaacatcttgacacctgaaggttatggattcaaattcagagttctaactgaacgtgacgaaatcctttatttaagagctatagcgaatgctaggaatgagttgaaaccagaattggagaccacattcctaaaatttactgcaaaatatctggcttccgtaagacatactcgtactttggagaatatatctcattcgtatcaattctactcccctgtggtaagactattcaaaagatggttggacactcatttattactaggtcatataacggacgaattagcagagttgattgccattaaaccttttgttgatcctgcaccatatttcattccaggttctcttgaaaacggtttcctcaaagtgcttaagtttataagtcaatggaactggaaagatgatccattgattttagatctagtaaaaccagaagatgatataagagatacatttgaaacaagtattggagctggctcagagctagactccaaaacgatgaaaaagctttctgaaagattaaccctagcacaatataagggcattcaaatgaacttcacgaacttgaggaacagtgatcccaacggtacacatttgcaattttttgttgcctctaagaacgatccaagcggtattctttattcatcaggtatcccactacccattgctacaaggcttacagcattagctaaagtagccgtgaatcttttacagacacacggtttaaaccagcaaactatcaatcttttattcacgcctggattaaaagattacgattttgtcgttgatttgaggacaccaataggtttgaaatcatcctgtggtatactttcagccacagagttcaagaatataactaacgatcaagccccatcgaactttccagagaatttgaatgatttaagtgaaaaaatggatccaacataccagttagtgaagtatttgaacttgaagtacaagaatagtttgattttatcaagccgcaagtatataggtgtgaatggtggagagaaaggagataaaaatgtcatcacagggctaataaagccactcttcaagggagcccacaaatttagagtaaacttggattgcaacgttaaaccagtggatgatgagaatgtgattttaaataaagaagccatatttcatgagattgctgcattcgggaatgacatggttataaattttgagacagattag

SEQ ID NO: 80017 - DNA, 1059 bp, Saccharomyces pastorianus
atgccaaaggagttgttcgaaaaaaaagatttcttaaatttcaggtgcttacacaagaggagcgtttatttagcatacctaacccaccacctattgatattattgaaaaaagataaattagactcatttttgcaactcgagtattcttattttgataatgatccgcttttaccaattttaagaattagttgttccaaaccaacgggtgattctctttctgattataacttttacaagaccagattctctatcaacttgcttattggtttcccatacaaagtctttgaaccaaaaaaactgttacccaatagaaactgtattagaatagcacaagaaagcaaagagcaatctttaccagccactcctctttacaatttttcagtgttatcttcttcaacacatgaaaactacctgaagtatttatacaagacgaagaaacaaacagaatcttttgttgaagctactgttttaggtagattatggctgcagcaacgtgggttttcatccaatatgtcgcattctggttcattgggtggattcggtacttttgaatttactatcttgatggcagcgttattaaacggtggtggtataaatagtaacaagatattacttcacgggttttcatcataccaattgtttaaaggtgtaataaaatacttagccactatggatttgtgccacgacggccatttacaatttcattctaatccagagaattcctccagttcaccagcttctaaatatattgatgagggtttccaaactccaaccttatttgataagtcaaccaaggtcaatattcttacaaaaatgactgtttcttcttatcaaattttgaaagaatatgccggtgaaacattgagaatgctaaacaacgttgttcaagaccaattctcaaatatttttttgactaatattagccgttttgacaatttgaagtacgatctgtgttacgatgtacagttacctttgggtaagtacaataatttagaaacttctttagctgctacatttgggtcaatggaaagagtaacatttattactctggagaattaa

SEQ ID NO: 80018 - DNA, 300 bp, Saccharomyces pastorianus
atgtcttattttgcagatataaactttagtactttgaggtcaatgatcccgccttttacaccccaactagacagcgaaactgatgccggttattttgatgacttcaccagtgaggctgacatggccaaatatgctgatgttttcaaaagacaagacaaattaacggctatggtagatgactcggcagtatcatcaaaacttgttgggttcactttccgacatagaaatggtaaacagggttccagtggcatcttattcaacggactggaacactcagaccccttttcaaccttttactag

SEQ ID NO: 80019 - DNA, 555 bp, Saccharomyces pastorianus
atggaatttgtaccaggcggtgattttcgtacattattaataaatactagatgcttgaaaagtggccatgcgagattttacatcagtgaaatgttttgcgctgttaatgcgttacatgatttaggctatacacatagagatttaaagccggaaaacttcttaatcgatgccaagggacatataaaattaacagattttggtttggctgctggtacgatttctaatgaaagaattgaaagtatgaagataaggttagaaaaaatcaaggacctggaatttccagcgtttacagagaaatctatagaagatagaagaaaaatgtacaaccagttgagggagaaggaaattaattatgcgaactccatggttgggtctccggattatatggctttggaggttttagaaggaaagaaatatgactttactgtggattactggtcgttgggttgtatgctgttcgaaagtttagttggttatacaccatttagtggatcatcgactaatgagacctatgacaacttaaggcgctggaaacaaactttaagaagaccgtag

SEQ ID NO: 80020 - DNA, 516 bp, Saccharomyces pastorianus
atggacatagacgaagtatctcaacctgatatggatgtctcgaactctcccaagaagcttccaccaaagttttacgaaagagcaacttcaaataaaacacagagagttgttagtgtttgcaaaatgtactttctagaatattactgtgatatgtttgactatgtaattagtagaagacaacgcacgaagcaagttctagaatacctgcaacagcaaagccaacttccgaattctgaccagattaaactcaacgaagagtggtcctcttacttacaaagggaacatcaggttttgagaaaaagaaggttgaaaccaaaaaatagggattttgaaatgatcacacaagtaggtcaaggtggttatgggcaagtttatttagccagaaagaaagacacaaaagaggtgtgtgctttgaaaattttaaacaaaaaactattgtttaagctcaacgagacaaaacacgttttaactgaacgagatatcctaaccacgacaaggtctgaatggttagtataa

SEQ ID NO: 80021 - DNA, 210 bp, Saccharomyces pastorianus
atgctatcaaaatcagaaaaaaatgtcgacctcttggcaggcaatatgagcaatttgagtttcgatgggcatgggactcctgggggcactggactgtttcctaaccaaaatataacaaagaggaggacaaggcctgtgggtatcaatgattcaccttcgccggtaaaccatccttttttccttacgaagatacttccaacatggacatag

SEQ ID NO: 80022 - DNA, 1278 bp, Saccharomyces pastorianus
atgggtacttataaattagcaaatggaatcactctttcatattttatttatccggatgatactcttcaaggggagaaaaaaagcatactggacgaatttggcaaaagtgaggatcaggtagacattctccttacaaaagaatggggcctttcgatctctgagagatgtggaaggttgtctggaagtgaagttgttgatgaatgggcgaaaaagttacaagcaaggtaccattttgccttttcagatgaaataaacttttacgaattagagcctttccagtgggaaagagagcgcttatcgaggttcctcaatattccaaaatatggatctggaaagaaatgggcctatgcattcaatatgccaataggggacaacgaactaaaggatgaacctgaaccgcccaacttgatagctaacccgtataatagcgtggttacaaacagcaataaaaggccactagaaacagaaacagagaattcgttcgatggagacaaacaggtacttgctaatagagaaaagaatgaaaataaaaaaattcgaacgattttgccgtcaagttgtcatttctgcttttcaaatccaaacctcgaggatcatatgataatatcaatcggcaaactagtgtatttaaccacagcgaagggacctttaagtgttcctaagggtgatatggatatctcaggccattgcctcattattcccattgaacatattccgaaattagatccaagcaagaacgcagagttgacacagagtattttggcttatgaagctagtcttgtgaagatgaactacataaaatttgatatgtgcacgattatcttcgaaatacagtctgaacgttctattcatttccacaaacaagttattcccgttccaaaatacctcgttctaaagttctgcagtgccttagatagacaggttcatttcaataacgaaaaattcacaagaaatgctaagctagagttccaatgttacgattcacactcttccaaacaatatgtggatgtaattaacaaccaatccaataattatttacaatttaccgtctacgagactcctgaagcggacccaaagatatatttggccacatttaatgccagtgagacaatagatctgcagtttggacgacgtgtactagcctttttacttaacttgccacgcagggtgaaatggaattcttcaacctgtttacaaactaagcaacaagagactatagaggctgaaaagtttcaaaaggcctacaggacctatgacatttctctcacagaaaactaa

SEQ ID NO: 80023 - DNA, 768 bp, Saccharomyces pastorianus
atggaggtggccagaagcatgataaagaacgaaggcatccggtccttttggaagggtaacatacccggttctttgctgtacgttacctatggctcagcgcagtttagttcatactccctttttaatagatatttaactccatttggactagaggcgcgcttacatagtcttgttgtcggagcctttgctggcataaccagttccatcgtttcctacccgttcgatgttttacggacccgactagttgccaacaaccagatgcactcaatgagcatcacgagagaagtgcgtgatatctggaaactagaaggtctccccggatttttcaagggctccatcgcgtcaatgacaaccataactctaaccgcatctataatgttcggaacatacgaaacaatcaggatatactgtgacgaaaacgaaaaaacgaccgccgcgcataaaaaatgggaactggctactttaaatcacagcgctggtaccattggcggcgtcattgctaagatcattactttccccctcgaaacgatccgtaggcgaatgcagttcatgaattcgaagcatctggaaaagttctcccgtcattcgtctgtatacggttcttataaagggtacggattcgcaagaatcggtttacagattttgaaacaagaaggtgtgagttcgctttacagaggtattctggtggccctttccaagacaatacccaccacttttgtgagtttctgggggtatgaaactgccatccattatttgcggatgtactaa

SEQ ID NO: 80024 - DNA, 939 bp, Saccharomyces pastorianus
atggccacttcaggtaacacaactccttcttattcatcgggctcaagacctcaaagcatgtataatgggtataacccggctgtatcaataacgagtaatgggatgatgctccaacaatcaacagcaaataataatactaattcaacaactaatttgcgccaccaaagaaatatttcacaaacaagttccctacctggattttcatacacatccccatccctaccagtgaattctccaggtagctctaattcagaatccagctcaggcggttattttgccattccgcttcatgggaacaacaacaataataattacacccagagaaactctgaaggctctagcccatgttataatgacgaccaaatacgacaacaacagcaacctttacaaatgcaacctttatcaagaacttcaagttcaagtgttaatgtcacagcgatgagaagtacatctgcaggtaattcaattacagcgaacgctcccgttgtacctaaggtgatggtcaataaccaaaatgttaaaactgttgctgccgatcagtctgctacagcaccttcttcacctaccatgaattcgtccgtcacaacgatcaaccgcgaatcaccataccaaaccttaaagaaaacgaacagcacaggcaatgttccttgtttgactgctgaaaagactcatgcgcaccctgctttctataaacggggcaataatagcgcccaaaatttgactacctctagttcaacagcttctagggtgcaccctatccgaaaacacaagaaaaacgtatcatttagttctttgaatagtttaatgttttcaaaaaagggtgcaaatcacggtggtaatctaatgactaaccaatttatgagtggtggaattcaagaagatgatggtgattcaactaataatgatactataaagctaaaccagtcgatttattcttaa

SEQ ID NO: 80025 - DNA, 123 bp, Saccharomyces pastorianus
atgaaatcacaccgattcaaggcgggacatatgtcaagaaacagcgtgaacataggttcccatacaccttgtttaacagatagcacattcaccattacaagatcggtactacgacgtccgtca

SEQ ID NO: 80026 - DNA, 2175 bp, Saccharomyces pastorianus
atgtctgattactttagttccagaccttcgcaaacgctcacgccgatgggcaataagccatctggtggtggtggcggcgatgacgcctcctccatccactcgaagagctcgcagtacttgatggacatcttacctgattcgatgactttgaacgaaagtgtttcctccacagtggcaaacaatcaggcaaaggagtttattttgcctgaaacagatgagagatctccctacttcataaacgtccctataccaaaggctcagccaacctctactacggaaacgaagaagccccttgcaggtgatgaagctatcgatgcgcagtttgttaaggagtatcccaccgacatccttgtagacaggttttataaatggaaaaaaattctgaaagggttagtgatttacttgagggaagtcgcgtatgcgcaagaacagttcgcacggatcaattaccaactgaaaggatctgtgaaatttccatttttgactgatattgatgaaaccacaaataccattacggatccattcacaacggctcctagaggccctaagaaagcgcagcctgtgcagaagaaagttggcctgactgacagcgaacaatttcagatgcaaatgcaacaggaacagcaggaaaatgcagtgcaggctcccacagatgaaagtaaaatgagtttggcgcctcatgaatacaagcctgtccagaccacagagtcggacaatacatctgccgcatccggttttgttaagttcggttcaggctcgattcaagacatccaggtcattttgaagaagtaccatctttcgttggctaaccagcaatttaagatctctaaagagattacgtccaccgtcattcctaaattggaggaattgagaaaagatttaagatataaaattacggaaattaaggaccttcatggtgatttcaaaacaaacatcggagcacatattcagctaacaagtcaactattgaaaaaatacatcgcagctgtaaaattcatgaacgcgcatggtattggcaacgatagagcatctcctactaataagaagccacataaattggatccaaaacatgatccatatcttttgaaactgcaactagacttacaactcaaacgtcaagttgccgaagaaacttacttgcaagaagcgttcatcaatttacagagttcaggtttgcaattagaaaaaattatatacaccaaaatccagcatgctttgttgcgttattctgctttaattgactccgaagctcgtctaatggtcaaaaatatgtgccaagaactacaacatggtataatatcaaagcctcctgcatttgaatgggataatcttgtcacacagcatccgtcctgtctactcaattggaaatccaacgatcctataccaccaccaagaaaagtttccgacgttatttatccccacatgaaatccccactggccaagtgtattaaggcaggttattttttgaagaaatcggaattgttgcccacttaccaccaaggatattttgttctaacatcaaactatattcatgaattccagagtagcgatttttataacctatcttcttctacccctaactccacgaagtcttcagcttattcttcttccgtttccattgcagacacttatgccaatgctaataatgccaaagctaacaatcatcatcgccaggctagtgatgtacataacagcagtacgacaactggtggtacagctggtgcaaatggtattcgcggtattcgcaaaaagagctatttggcaccgattatgagtattccgctaaatgattgtaccttaaaggatgcatcttccaccaaatttgttcttgtaggtaaacccactcttaatgaaaacgctgatgttagaaaatctagctctagcacttatttatctggctcttcacaagcgtctttaccaaaatatggccacgagactgcaaaaatattttcaaaagccccattccacaagtttttgaagggaagtaagcccaaaaataagaatacgaaatcaagtgaactggaccaattttacgctgcagctcaaaaggaatcgaacaattatgtgacttggacctttaaaatagtatctccagagccttctgaagaggaattgaaacattttaaacgttgggtcccaagatttgaaaaattaacgagcttcaatgacatctaa

SEQ ID NO: 80027 - DNA, 3069 bp, Saccharomyces pastorianus
atgcctgcaggtccgaaaataactaagctgtacataaacaaatggctacaaaaatcagatgaaaaggccgagagaatatcgtcatttgaaatggacttcgttaaaatgctattgtgctacttgaactttaataattttgataagttatccattgaactttcactctgtattaaatcaaaagaaaagtattactccagtattgtgccttatgccgacaattatttgctagaggcttatctgagcttatatatgattgatgatgccctcgtgatgaagaatcaactacaaaaaacaatgaatttatcaacggcgaaaatagagcaggcgttattacatgcaagttctttaataaatgtccacttgtgggactctgacttgacagcgtttcaaatatattttggaaaaacactgcctgctatgaagcctgaattatttgatatcaataacgaccacaacctacccatgtcactttacatcaaagtcatacttttgaacataaaaatttttaatgaaagcgcgaaattaaatattaaagctggtaatgttatatccgcagtaattgattgtagaaaagcacaaaatttagcattatcgttgctcaaaaagaagaacaaattgtcacaaggatccaggctagcattactaaaaagtctatcgtttagttttttccaactcattaaaatacatatacgcattggttctgccagagactgtgagttctacagtaaagaactgtctagaattatttctgacttagaggaacctattatcgtctacagatgtctgcattttcttcacagatactatatgattacagagcaaacctgtcttcaaaatataactttgggaaaagccaataaggcatttgattatcttgatgctgaggcagacattacaagtttgacaatgtttctgtatgataataaggaatttgtaaagttagagcagtcgttggtcctatatttcggtgaccagctagaaaaaacattcctacctaatttgtggaagcttcacttgggtaaggatattgacgacagcatttgtctgtccgaatatatgcccaaaaatgtaatcaatagagtacacaatatgtggcaaaaagtaatgagccaattggaggaagatcctttcttcaaaggtatgtttgaatctacccttgggattccctcttctctgcctgttattcctagcacgatgcccaacaacattttaaaaactccttccaagcatagtacaggattgaagctttgcgattcaccaagatcgtcgagcatgacgcctagaggtaagaatataagacagaaatttgatagaattgctgctattagtaaattaaaacagatgaaagaacttttggagagtttgaaactagacacattagataatcacgaactgtccaaaatttcctccctttcttcattaactctgactatcctttcaaacataactagtatccataatgctgagagtagtttgataactaatttttcgctaactgacttgccaaggcatatgcctttgttattcgataaggtattgaataatattgataataaaaattaccgagaatttcgcgtttcatcactaatagctccgaacaatatatccacaattacagagagtattagagtatctgccgcccagaaggacttaatggagagcaaccttaatattaatgttataactattgacttctgtcccataactggaaatttacttctatccaaattagaaccgcgacgtaagagaaggacgcatttaaggctaccgctaatacgatctaattcaagagacctcgacgaagttcatctctcatttccggaggctacaaaaaaactactttctattatcaatgaaagcaaccaaacgacgtcagtggaagttaccaacaagattaaaacaagagaagaaagaaaatcttggtggaccacaagatatgatttggataaaagaatgcaacaattgttgaataacattgaaaatagttggttcaatggcgttcaagggttttttagccctgaagtagtcgacaactcgttatttgaaaaatttaaagataaattttacgaaattctgcatcaaaatcttccttccagaaaactctatggcaatccggcaatgtttataaaagttgaagattgggtaatcgaattgttcttgaaacttaatccgcaagaaatcgattttctttcgaagatggaagacctgatatactttgttcttgatattcttctcttccatggagaagaaaatgcttacgacgaaattgatttcagcatgcttcacgtgcagttagaagagcaaataaagaaatatagggcaactatgacaactaatagtatatttcatacatttttagtcgttagcagttcatgccatttattcccttgggagtgtctttcatttttgaaagatttgtctatcacacgtgttccgtcctatgtttgtctgaataaacttttatcgcgtttccattaccaactaccccttcaagtaactattgaggacaacattagtatgatattaaatccgaacggagatttgtccaggactgaatctaaattcaagggtatgttccaaaaaataatcgatgcaaaaccttcctctcaattagtgatgaacgagaagccggaagaggaaacacttttgaaaatgctgcaaaattctaacttattcgtttatatagggcatggcggaggtgaacaatatgtaaggagtaaggagattaagaaatgcaccaaaattgcccccagctttttactgggctgctcttcagcagcgatgaaatattacggcaagttagaacctactggaacaatctatacttatttgctgggaggatgccctatggtactaggtaatctgtgggatgtaactgacaaagatattgataaatttagcgaggaactttttgaaaagatgggatttcgctgtaatactgacgatttgaatggtaatagcctatctgtttcatatgccgtctctaaatctagaggtgtatgccatctacgttacttgaacggcgcagctcctgttatttatgggttaccgatcaagttcgtatcataa

SEQ ID NO: 80028 - DNA, 1848 bp, Saccharomyces pastorianus
atgatggtaaaacaggaggaaccgctgaatgagattagtccgaatactccgatgactagcaagtcctaccttttaaacgacacgctttcgaaagtacatcatagtggccaaactagaccactgacctcggtgttgtcgggagacgcctcatccaattctattggcatactagcaatgcataataacataatacgtgactttacaaaaattgcaagcaataacatagacttagccaccgaggatattaccactgttgaccattcattaaattcaatatatagcctattgaagagccatcacatgtggggccatataaactccactgttaaacaacatttgatgataattgttaaactaataaataataacgcattaggattggcctcctctgaaattatttttcttttcaatgaaacgaatttatttcaagctcatagtctgaaaaacattcttctagcagacttcagtacgtggaacgactactatctttcaaatctgaaaatattagcgctgcagattatactgaaaagaaagctagtagacgaatacttaccgcatatattagaactattttcacatgataaaagatatcttttgaaagaccctaacctcaaagctcacgctctcacaaaaatcgtgctgagctttttttctgtcacgacgagttgcaaagttctattcgggctaaaatttctacaatatatcaaacagttcaaattaccttttaaaaagttcattagcaacatgaccgtcgagtgttttagcaaaaaccttcttcataaaaattatttggagatgggacctaataaaatatatttaaattcattttacttatcctattccatgctgtacgatggattggataaaataatgcttctagacattttaagttacgaagaaactactgaggtacaaagagcgataaaaagtaaaaaagaattcaatgaatactgcaacatgagtgaaaaccgtcttctctggtcctgtatatctgtcgatgatttgaacgtaatactcgaaaatgcaacgaattttctacaaaataaagggaaacatatatccgcaacattaaaatgtttagtctgtctttggtctactattcgcctagagggattacctaaaaataaggatatattgaggcagtttgattgtactgttatttatatcaactcaaatattaaatccattaataacgaatctgcggcggcattattatccgaacttctgggagttttatcagaaatttgtatcgattataaagagcctaaacgactgtcaaatattatcagtgtccttttcaatgcttctgttttatttaagagtcattcgtttttgttaaagactgctaatttggaaatctcaaatgttttaatcagtaatgattcaaaaacatctcatcgtactatactgaaatttgaaaaatttatatctagtgctcagagtgcccagaaaaaaattgaaatcttttcctgtttgttcaatgtatattgcatgctacgaaatgatacgctatcatttgtttttgacttttgccaaaatgcattcattcattgctttacacgcctaaaaatcacaaaattcatcgagttttcaaacagttcagaaattatgctttcagtactgtatggaaattcatctatcgaaaacattccttccgaaaattggtcacaactaagcagaatgatattttgctcactgaggggtatctttgatttggatcctttagagctaaataatacgtttgataaattacacttgctcaacaaatatgagctattaatacgaatagtgtacctattgaacctggacatgagtaaacacctgacaacgaatctatcgaataactaa

SEQ ID NO: 80029 - DNA, 726 bp, Saccharomyces pastorianus
atgaaccaaatcgagttaccaactggggttactattgatgaggaaaaatataaagttgaacaagcagaaagatacctaaaagctgcaagcaatttcctacaaagatcttttgaatatgctaaagcagttgatctcgcggaggaggtaaacttgattgacttgtctgatgatgaaggcgaagaaaagcgaacggtaaaacaaaaacaactggaaagcataaaggcaaatgcagccctagatcccacccatccaaaagtaatagatttgccaacatttagaatgatcatcctcgcagatgaaacttacgagcttttcttttctaatactttacgatcatctgttcacgtcgacgaacatgtcaacattgataacaaaaataaagtcctcagaagtatgtttgacggtatattggcagacggcaaaagagttgctgagcaagttcgtcgtcgtgtcgattcggtggcaactaggagcagcattgcttctgtagagagtacgccaacagccgctgcaagttcaataactaccaaagaagaaaagtacgatgatctagatgatttcacgtcagagcatcaacccgagaatgaagagttattacaaagttcctggtttgagatcgacgatgccaatgaaactagcactaaagccatacaagaaaggtcttttgagcctttgtcggcaaattcctcggaagagaagtccaaccttattgaatttgaagcatga

SEQ ID NO: 80030 - DNA, 2055 bp, Saccharomyces pastorianus
atgtcattttttgattccttacgtcaaaaggcaccctttttggataaactggcagacagtttcactccaacattaaccagagatgagaaattcagattaaaatataaacttccagctaatgaaaacattttggaagatacgaatgcagaagtttcatttgcaacttccattaaagatggaaaagggcattctgatagagtgaacaataaagggagaaaaactgcttatgtgtattccgggagattgtttttaacacctcattttctggtatttcgagatgcatttgatcattcatcgtgcgtactaatactgaatatttctaccattaaacgtgtagagaggtcgccatccgaatcatatgaatttgctcttctagtaactttgtacacaggagcaaaggttctgattcaatttatcggtatacgttatagatcggagcagttttgtgacaaattgaaactaaatttgaaagaaaatattcctaatgccaaaactttacctgcttttctagaaacctcatattcggagttcttaattgctaaaaatattctaggtaaaaaggacataactgtacccagggcaggtctaggacaacatttcaagtatcccggtaatcctactatggtaaaagaaaaggctaaattgaggctatggttcgattatttcagagagaatggaaggaatttggcagttgtgcaaactcctatgttccgaaagttaatcagaatcggtgttccaaatcgaatgagaggtgaaatttgggaactatgttcaggtgcaatgtatatgcgttatgcaaattctggggagtacgaaaggatattaaacgagaatgctggtaaaacatcgcaagctatcgacgaaattgagaaggatttgaagagatcgctgcccgaatactcagcataccagactgaagaaggtattcaaaggttgagaaatgttctgacagcttattcgtggaagaaccctgatgttggatattgccaggccatgaatatagttgttgcaggatttttaatctttatgtctgaagagcaggctttttggtgcttgtgtaatctatgtgacatctatgttccaggttattactcaaagacgatgtacggtacattgttagaccaaagagtgttcgagtcttttgtagaggacagaatgccggttctttgggaatacattttacagcatgatattcaactatctgtggtgtctttaccttggtttttgtctttgtttttcacttcaatgcctctagaatatgctgttagaataatggatattttttttatgaacggttctattactctatttcaggtggcattagcagttctgaagataaatgcagatgatatcttacaagcggatgatgatggaatgttcattgccataattaagcactatttccaaactctgggacaaagtgctcacccagattcaagcgatataaaatatagacaaatcacgaaatttcaagagctgttagttacggctttcaaagagtttagtgtcatcagcgaggaaatggcaatgcatgcaagacacaaatatgagaaaggtatttttcaaaacattgagactttcatgaaaagaacgcaactgcgccatatgccaaaaactttcaacctgtccagtgatgacttgtccaatatctatgacatgttttaccaaagtatagaaacctacaaaattagtatgggaacgggatcatctaatatgggtttcgaagtattcattcagttcttgagtaaattctgtgactcctgtagaccgtgtgaaaaggacaaagatccagctttccggaaacaaaaaaggaattttctgcaaaggttatttgataactgggattctgctcatatcggcgagttgacattgaacgatgtggtaacaggcttggataaactggtaactgttgatcttttacaagctataaactatttcttctctttatatgatacagatggtgatggtgaattgcatagagaagaagtgctacagttgtcggaagggctgctactgctagacctgcaggcatgcaagctggcactgccgtcgttt

SEQ ID NO: 80031 - DNA, 1179 bp, Saccharomyces pastorianus
atgttgaccttcttagaattctactcgactctattgcatttcgtcctatataagttatacaccgatagtgggttgatttatccgccaaaattggatcttaaaaaggataaaatcataagtggtttgtcatcatatattctagaatccagacaagaagacagcctactaaaacttgacccaactgagattgaggaagacgtaaaagttgaaagtttggacgcatcgacattaaagtctgccttgaatgccgatgaggcaaatactgatgaaacagaaaaggaggaagaacaagaaaagaaacaagaaaaggaacaagaaaaggaacaagaaaaggaacaaaatgaggaaacggaactagatactttcgaggataacaataagaacaagggtgacatcttaatacagccaagtaagtacgattctcctgttgcttctttgttttctgcatttcttttttacgttagcagagaagttccgatcgatattcttgagttcttgatcttatcttgtggtggtaatgtcatcagtgaagctgctatggaccaaattgaaaataagaaggatattgacatgtccaaggtcactcatcaaattgttgacaggccagttttgaaaaacaaggtagctggcagaacgtatattcagccacagtggatatttgattgtatcaataaaggcgaattggtacctgccaacaaatatcttccaggggaggctcttccacctcacttaagcccatggggtgatgctattggttacgatccaactgctcctgtcgaagaaggcgaagaagaagaaagtgaaagtgaaagtgaaagtgaagatcaagttgaggaggaagatcaagaagttgttgctggagaagaagatgatgacgatgacgaagagctacaagctcaaaaagagcttgaattggaagcacaaggtatcaaatattccgaaacttcagaagctgataaggatgtcaataagtcaaagaaccaaaagagaaaggtggatgaagaagaagaagaaaggaaattgaaaatgataatgatgagtaacaaacaaaagaaactttacaaaaaaatgaagtattctaatactaaaaaggaggaacaagctgagaacttaaaaaagaaaaagaagcaaattgccaaacaaaaagctaaactgaataaactagattccaagaaatag

SEQ ID NO: 80032 - DNA, 600 bp, Saccharomyces pastorianus
atgagaatcaagaagaaaaacaccagaggtaacgcaagaaactttattaccagatctcaagctgtgagaaaattacaggtttctcttgctgatttcagaagattatgtatattcaaaggtatctatcctagagagccaagaaataaaaagaaggcaaacaagggctctactgcaccaactactttttactatgctaaggatattcaatatctaatgcatgagcccgttttggctaaatttagagaacacaagacttttgctaggaaactaacaagggctttgggtaggggagaagtctcttctgctaaaaggttagaggaaaacagagatagttatactttagaccatattatcaaggagcgttatccaagtttcccagatgctataagggatattgatgatgctttgaatatgttatttcttttctctaatttgccctctaccaaccaggtttcctcgaaaattatcaatgatgctcagaaaatctgtaatcaatggttagcctatgttgccaaggaacgcttggttcgtaaagtgtttgtatccattaaaggtgtttattatcaagccaatattaagggtgaagaagtagatggttag

SEQ ID NO: 80033 - DNA, 687 bp, Saccharomyces pastorianus
atgatggataaaccattaaactttagaatcttgaaatcttttacaaacgataaaatcccgcttaactatgctataacacggaatatcttgcacaacacagttccgcaagttaccaacttcaacagcacaaacgaagatcaaaacaacagtaagcatacagaagatactgtaaatgaaagtcgaaacagcgatgacatcatagatgtcgacatggatgcaagtcccgccccttcaaacgaatcatgttccccttggtcattgcaaatttcagatattcctgctgcaggaaacaatagaagtgtctcaatgcaaacgatagctgagactatcatattatcttcagctggcaaaaactcttcagtatcctcgctcatgaacggattgggttatgtattcgaatttcagtatcttacaattggtgtgaaattttttatgaagcatggtttaatacttgagttacaaaaaatttggcaaatagaagaagcaggcaattcacaaataacaagcggagggttccttttaaaagcatacatcaatgttagtagggggaccgatatcgatcgtataaactatacagagactgttttgatgaacttaaaaaaggaactacaaggctacatagagttaagtgtacccgatagacagtcaatggactcgagggtagcacatggaaatattctaatataa

SEQ ID NO: 80034 - DNA, 975 bp, Saccharomyces pastorianus
atggcagaaaaaaataatgagagaagattccaaaaaaaaaggccaatatcaactcttgtagagcaggatgaccagaaaaagttcaaactccatgaattgactacagaagaagaggttctggaggagtacgaatgggatgacctagatgaagaagattgtgatgatcccttaatggtgagcgaagaggttaatgatatcttcgattatttgcatcacttggaaataatcacattgccaaataaggcgaatctctataagcataaaaatattaagcaaaacagagacattttggtgaactggataatcaagattcataataagtttggccttctgccggaaactctatatttggccataaacataatggatagatttctttgtgaagaggtggttcagttaaatagattgcaactggttggtacatcatgcctgttcatcgcatctaagtatgaggaaatatactcccctagcataaaacattttgcgtacgagacagacggtgcatgctctgtggaagatattaaagagggtgaaagatttatattggaaaaactcgattttcaaattagtttcgctaacccaatgaatttcttaaggagaatatcaaaagcggatgactatgatatccagtctaggacgttagcgaagttcctaatggaaatatctatagtggacttcaagttcatcgggatattaccgtcattatgtgcctcagcggcaatgttcctttcgagaaaaatgctgggcaagggcacctgggatggcaacttaatccattatagtggtggttacacaaaggcaaaactatatcccgtttgccaattactgatggattatcttgttggatctactattcacgacgagttcttgaagaaatatcaatcgagaagatttttaaaggcttccataatttctatcgaatgggcattgaaggtaaggaaaaatggatatgatattatgacattgcatgagtga

SEQ ID NO: 80035 - DNA, 501 bp, Saccharomyces pastorianus
atgtcacgatcccttttggtagagaatagtagaaccattaatagtaatgaagagaagggggtaaacgaaagtcaatatatcttacaaaagagaaacgtcccaaggaccattctcggtaatgtcacaaataatgcaaatatcctgcaagagatttctatgaacagaaaaattgggatgaagaacttctcaaaattgaacaacttctttcctttaaaggatgaggtttcgagagccgatgacttcacctcctcttttaatgacagtagacagggggtgaaacaagaagtactaaacaataaggaaaatattcctgaatatggatattccgagcaagaaaagcagcagtgctcaaatgatgactcttttcatacgaattcgactgccttgagctgtaatcggttgatatactctgagaacaagtctatttccactcaaatggaatggcagaaaaaaataatgagagaagattccaaaaaaaaaggccaatatcaactcttgtag

SEQ ID NO: 80036 - DNA, 660 bp, Saccharomyces pastorianus
  modified_base (182)..(215): a, c, g, t, unknown, or other
atggcacattctttagggtcttacttgatggctttatatttgcaaaaatataaggaatctccatcttttaaaaagctgatcctttgttccccagcaggcgtgtcttatagagatttcaacaatactgcttcagaggttgaaaaatggaaaccgcctccttggtggtatgtcaagctttgggnnnnnnnnnnnnnnnnnnnnnnnnnnnnnnnnnnttttcgccagttaggttcgaagattacaagtggatggtcatatcggcgctttaagcacattttgaatggtgatccagaacagtcaaaacggtttgaagccttgcatagatacgcatatgctattttcaataagcgtggttcaggtgaatacttattaagctttgctttgaaatgtggtggtgaaccaagactttcattggagcagcagctattcgatggcaaaaagtctgatattttaaaaaatagtaattgtgactggctttggctttatggcgatgacgattggatggatgtgaatggtggacttagagtatcaagattcttgaaagagaagttgaaacaaaaaagtaacgtcatcattgttcctcattcagggcatcacttgtacctggataactataagtttttcaataatattctcacgaaagaaatgcaaaaaatataa

SEQ ID NO: 80037 - DNA, 342 bp, Saccharomyces pastorianus
atgtccaaatcatctcaaggtcacgtgactaaaaccacgcgtttgaataataataccaacagtaaactaagaagaaagtccatcttacatacaatcagaaatagcattgcttccggcgctgatttacccatcgaaaacgacaatgttgttaatttgggagatctgcatccaaataaccgaatatcactcggaagtggtgctgcaagagtggtcaatgggcccgttacgaagaacagaaattcaatgttctcaggacgtgctgaaaggaaacccacagaaagcagacattctgttgcaaagaaaactgaaaaaaaaataaatacgaggccccccttcagatga

SEQ ID NO: 80038 - DNA, 303 bp, Saccharomyces pastorianus
atgagcgaagataaagctaaattagggaccacaaggtctgccacggaatatcgtttgtccattggtagcgctccgacttcaagaaggtcgtctatgggtgaatcctcgtccctgacaaaatttgctggtcaagagggactaacaagttccgttggcgaatataacgagaatgccatacaacagcttctgttgcctaaaataagagaactgagcgattcaatcattactttagattccaatttcacgcacttgaattttatccacgagagtttagctgatcttaatgaatccctaggtacgtag

SEQ ID NO: 80039 - DNA, 138 bp, Saccharomyces pastorianus
atgtccttgtgtaaagattctaggcaattaatgacctgttcgcttgggttattcttcaaagcacaaatcaatatctttcttcctccttttgctttaaccgttgtccagtttcttgtcaatttggtttgccatacataa

SEQ ID NO: 80040 - DNA, 291 bp, Saccharomyces pastorianus
atgttttcttctttttttggaaatacttgttcctgggtcttcattttcgtcatcatcgttgacaatgaagccttcttgcacttttcttgcctcatcttcgtcttcatcaatatcttcgtcttcctcagaggagtcaaagacatcttctccttcttcttcatcactaggcgctttagtttcatcgttgtcatttactatttcttcctcgtccctagggaccagcttcgaatctcccgtctcttccataaaaggcaaattttatgtccttgtgtaaagattctaggcaattaa

SEQ ID NO: 80041 - DNA, 3624 bp, Saccharomyces pastorianus
atgtatgacatttttggtgatggtcatgactacgattgggctttagaaattgaaaatgaagaactagaaaatggtaacgacaacaatgaagctgaagaagaagagatcgatgaagaaactggtgctataaaaagcaccaagaaaaagatatctctacaagacatttatgatttagaggatttgaaaaaaaacttgatgactgaaggagacatgaaaattagaaagacagatattccagaaagatatcaagaattaagagcaggtattactgactacggaaatatgtcatcggaggatcaagaattagaaagaaactggatagcagaaaaaatttctgtggataagaacttcgatgccaattatgatctcactgaatttaaagaagcaattgggaacgcaatcaaatttatcaccaaagaaaacttggaagtcccttttatatatgcttaccgtcgtaactatatttcctcaagagaaaaagatgggtttcttttgactgaagatgacctttgggatatagttagccttgacatcgaatttcacagtcttgtgaacaaaaaggattatgtccagagattttatgcagagttacatatcgatgatcctattgtcactgaatacttcaaaaatcagaatactgcatctattgcagaactgaattctctacaggatatttatgactacctagaattcaaatatgccaacgaaatcaatgaaatgtttataaaccacactggaaagactggtaagaaacatttgaaaaattccagttatgaaaaatttaaagctagtcctctttatcaagcggttagtgatattggtatatcagctgaggatgttggtgaaaatatcagttcccagcatcaaatccaccctcccgtagatcatccaagttccaaaccagtagaagtgatagaatctatattgaatgcaaacagcggtgatttgcaagtctttacgtccaatactaagctggcaattgatacggtccaaaaatactactctttggaattgtctaaaaatacaaagataagggaaaaagttagatccgatttttccaaatattatctggctgacgttgtgttaactgctaaaggtaaaaaagaaattcaaaagggatctctgtatgaggacataaaatatgccatcaatagaactccaatgcacttccgtagggatccagacgtttttttgaaaatggtcgaggctgagtctttgaacctgctcagtgttaagttacacatgtcgtcacaagcccaatatatagagcatttattccaaattgcacttgaaactaccaatacctcggacatcgcaatagaatggaataacttccgtaaactggcattcaaccaagcgatggacaagattttccaggatatatctcaagaagtcaaagacaatttaacaaaaaattgtcaaaaattggtagccaagactgttcgccataagtttatgacaaaattagatcaggctccattcattcctaatgtcagagatccaaaaattccaaaaatcttaactttaacctgtggacagggtagattcggagccgacgctataattgctgtctacgtcaacagaaagggtgattttataagagattacaagattgtcgacaatccatttgataagacgaatcctgaaaaatttgaagacaccttggataatatcattcaaagctgtcaaccgaatgccatcggaatcaatggccctaacccaaagactcaaaaattttacaaaagattacaagaagttctacataagaagcaaatcgtcgacagtagaggacatactattccaatcatttacgttgaggacgaagtcgccatccgttatcagaattccgaaagagctgctcaagaattccctaataaacctcctctagttaaatactgtatcgccttggcgcgctatatgcattccccattgttggaatatgctaatttaacaagtgaagaagtgagatcattgtcaattcatccacaccagaacctgttatcctcagaacaattgagttgggctcttgaaaccgctttcgttgatattgtcaacctggtaagtgttgaagttaacaaagccacagataataattactacgctagtgcgctgaaatacatctctggctttggaaaacgtaaagctattgatttcttacaatcccttcaaaggctaaatgaaccattattggctcgtcaacaattaattactcataacattcttcacaagactatttttatgaattccgcgggattcctctatatctcatggaatgaaaaaagacaaaaatacgaagatttggaacatgatcaactagatagcactagaattcatccagaagactaccatttggccaccaaggttgccgctgatgctttagaatacgatcctgatactattgccgaaaaagaagaacaggggactatgagtgaattcattgaactgttgagagaagatcctgaccgtagagctaaactagaatcactaaatctagaatcatacgcagaagaacttgagaagaataccggattgagaaaacttaataatctaaatacaattgtccttgaattgttggatggatttgaagaattgagaaatgactttcatcctttgcaaggtgatgaaattttccaaagtttgactggtgagtctgaaaagacgtttttcaagggtagtattattccagtcagagtagaaagattctggcacaacgatataatttgcactacaaactctgaagttgaatgtgtagtaaatgctcaacgtcacgcaggtgcacaattaagaagacctgcaaatgaaatatacgaaattggtaaaacatatccagcaaaggtgatatacattgactatgctaatattactgcagaagtttccttattagatcatgatgtcaaacagcaatatgttccaataagctacagtaaagatccttccatttgggacttgaaacaagaactagaagatgccgaagaggagaggaaattgatgatggcagaagcccgtgcaaagagaacacatcgtgttatcaatcatccttactatttccctttcaacggcagacaggctgaggattacttaaggagtaaagaacgtggtgaattcgtgatcagacagtctagccgaggtgatgaccacttggttatcacctggaaattggataaggatttgtttcaacatatcgatatccaagaattagaaaaagaaaatcctttggctttaggtaaagtcttgattgtcgacaatcagaaatacaatgatttggaccagatcattgtagaatatcttcaaaacaaggtaagactcttgaatgaaatgacatctagtgaaaaattcaaaagcggtactaagaaagatgtggtcaagtttattgaagactactctagagtgaatccaaataaatctgtgtactatttcagtttgaactacgataaccctggctggttttacttaatgttcaagattaacgcaaatagcaaattatacacatggaatgtgaaattaacgaacactggttatttcctggtaaactacaattatccaagtgttatccagctttgtaatggttttaagacgcttctaaaatctaacagtagtaagaatagaatgaacaactaccgttag

SEQ ID NO: 80042 - DNA, 669 bp, Saccharomyces pastorianus
atggaagagacgggagattcgaagctggtccctagggacgaggaagaaatagtaaatgacaacgatgaaactaaagcgcctagtgatgaagaagaaggagaagatgtctttgactcctctgaggaagacgaagatattgatgaagacgaagatgaggcaagaaaagtgcaagaaggcttcattgtcaacgatgatgacgaaaatgaagacccaggaacaagtatttccaaaaaaagaagaaaacataaaagaagagaaagagaagaagatgatcgactatccgaagatgatttggatttgttaatggagaatgctggtgttgaacgtaccaaagcgagctcctcttcaggaaaatttaaaagattaaagagagtaggagatgaaggaaacgctgcagaatcagaaagtgacaacgtcgctgcatcaaggcagattctacgtctaaattggaagatttcttttctgaagatgaagaagaagaagaatctggtttacgcaacggtaggaacaatgaatatgggcgtgatgaagaagaccatgaaaataggaacagaacagctgacaaaggtggaatcttggacgaattggatgacttcattgaagatgatgaattttctgatgaggacgacgaaaccagacaaaggaggatccaagaaaagaagcttttaa

SEQ ID NO: 80043 - DNA, 1683 bp, Saccharomyces pastorianus
atgaccttttttggtatcctacatgttcctataaatgttcctgcgttggccatgtcactacaaatggataagtatgatgttgacagagaattgattgcacatggttattccaacttttttagtggattattaggttctgtccaaaattacttggtatataccaacagtgttctgtttattagggcgggcgctgattcgccattcgctgggttccttttaatagctttgactatctgtattatgatcattggaccagtcataatatcattcattccaatctgtatagtgggctctctaattttcctactaggctacgagttattagtggaagcgttggtcgatacatggaataaattgaatagattcgaatatttgactgttgtcattattgttttcacgatgggtatctttgattttgtcctaggtatcatcgttggcattttaattgcatgtttttcgtttttggtggatagtacgaaattacaaaccattaacggtgaatataatgggaacgtcgcaagaagtacagtatatcgtgattacgttcaaacaaaatttttggatggaattggtgaacaaatatatgttttaaagctccaaaaccttctgtttttcggaacaatcatatctattgaagagaaaattgaaagattgctgcaaataagtaacaaagatgcaacaaaacgcagaataaagtatttaatattggactttaaaaatattaatgccgacaatattgactattctgcggcagaaggtttcaatagaattaaaagattcacggaaaccaaaagaatcaaactaatcatatcttcaatcaaagaaagggaccgtatttacaacgccttcaataatgtgggattactaaacgatgtggaattatttgctgatttaaacagtgcgttggaatggtgtgaaaacgaattcctttttcaatataaacaattaagaaaaaaggcgaaagaaagattggaagaaagaaagcaaaataatgtcgtatccgcagtaattgcagccactaaaaacaaaaaaattgatacaataggaaatggtttaaataggggaagcaatggagacacagcgagaaacttaatgtcactaccaaccaatactcctcgtaattaccaaatactttctgtagcacagaatgtatttgtaaacgacgaacaagcagtgaagaatttcaaaaaggagtacaaagatgatgaacctgtcctgcctatattgttatttgcattaaagcagtaccgacccgatataatatctgaagttcaaaaagtaagagaaaaggaaatcaagttttgggcacaactctgcccctacttcaccaggcgcagattagcaagtcaatcacatttactacatgcagacaacatttttttccttgtggaaacaggtatgttgaaggcaacatatgaactaccacaaggaaccttgtacgagattttttcaaatggcacatgcttcggaaaaatcattgcgccagggaatgctatgcctagagaacaaaagctcaccatcgaaactgaaactgattccgtattatgggttatagactctagctcgttgaacaaattgaaagaagacaatctagcattgtacgtggaggttgcattaatggtcatgtgtatcaaggacaccagattcaaagaattactaggttacacacttgttagcgcatga

SEQ ID NO: 80044 - DNA, 1431 bp, Saccharomyces pastorianus
atgggaaggactattaggagacgccggagtaattcgtcgctttcggaggccatatcagtttctttaggaataaatcaagactcatctgtgaacaagatgcatagagcgagtgttagcgcaatgtctcctccattatgccgttcatacatgagcggattttttactggtggaaactcacctatgatcaacaatttgtcggattcaaaacttcccatctcgaacaaacaacatcctaaagtgatacatggatcagaaaatttgcataggcagacagctcaactatccaatgaattttgctcctcttctgtggaagaaaattctcccacaattaaggattacatggacattataggcaatggtgatagaaaagatgatcaatctatgcgtactatagaagagaatattgatgaagaatattcagatgagtactccagattgctacttagcccagcatcgtctaacgtggacgatgaccgaaatcgaggactacagaatagttcactaccggaattagaagatggttacgcgggcggatatcagtcacttcgtccctcccataatttaaggtttaggccaagaaacttgtggcatatgtgtacgtcatttccttccaaatttgcacattatctgcccgcagcagtgttaggtttgcttttgaacattttagatgccttatcttatggtatgatcatttttccaatcacagagccagttttttctcatttagggcccactggtatatccatgttttatatttccaccataatatcacaagccgtgtactccggaggctggtcgagttttccttccgggattgggagtgaaatgattgaaattactccgttttatcatacaatggcattagctataaaagaggcattagcaggtaatgatgacgaaatcataacgacaacgatattttgttatgtgataagttcgatgctcacaggtgtcgttttctatgcattgggtaaactacgactaggaaagatagtgggattttttccacgacacatattgattggctgtattggaggtgttggttatttcttgataattacaggaattgaagtcacaacgagggtggcgaaatttgaatattcatggccttttttttcagggctgtttacggattatgagacattagcgaaatggttattacctgtactattgactgtagttttaatcggcactcaacgctactttaagaactcactcgttttgccaagtttttacatcttgacgttagttttgtttcattttattgttgcgatcattccaacattatccttggatgctttgagacaaactggatggatttttcctattgccaactcagatagtaaatggtatgaccattatagattatttaatgtccataaagttcatcggtcactagttttgcaacaaataccaacgatgatggcatga

SEQ ID NO: 80045 - DNA, 498 bp, Saccharomyces pastorianus
atgtcgaggatcgtgaaggagtacaaagtcatactgaaaacattggccagtgatgaccccatagcgaacccctaccgggggataatcgagtcacttaacccgattgacgaaaccgacttgagcaagtgggaagctataatttctgggccgtcagacacaccttatgaaaatcatcagtttcgaatactaatagaagtccctagttcctaccccatgaatccaccaaagataagttttatgcagaacaatattttgcactgcaatgttaaatcagccacaggagaaatatgtctgaacatccttaaaccagaggagtggactcctgtatgggatttgttacactgtgttcatgctgtttggagactcctaagggaacccgtttgtgattctccacttgacgtagacattggtaatatcatccgctgtggcgatatgagtgcctatcaggggattgtaaagtacttcctagcagaaagagagcggatcaacaaccattga

SEQ ID NO: 80046 - DNA, 84 bp, Saccharomyces pastorianus
atgtcgaggatcgtgaaggagtacaaagtcatactgaaaacattggccagtgatgaccccatagcgaacccctaccgcggataa

SEQ ID NO: 80047 - DNA, 1602 bp, Saccharomyces pastorianus
atggaaacaccatctgggctggttccagtggctaccttacaatctatgggtagaaccgcctctgccttatctcatacgagaacaaagcaattgaaccgtaccgctaccaattcctcatccacaggtaaagaagaaatggaagaggaagaaactgaagaacgtgaagaccagagcggtgaaaacgagctagatccagagatcgaattcgttacttttgttactggtgatccagaaaaccctcacaattggccctcatgggttcgttggagttacactgtcctgttgtccatcttagttatttgcgttgcctacggttctgcttgtatcagtggtgggttgggaaccgttgaaaagaaattccatgttggtatggaagccgctattttatcatgttctttaatggttattgggttctcgctgggtcctttgatttggtctcctgttagtgatctttacggtagaagagttgcttattttgtttctatgggtctttatgtcatcttcaatatcccttgcgccttagctccaaatctaggttgtcttttagcttgtagatttttatgtggtgtttggtcatcatctggtttgtgtttagttggtgggtctattgccgatatgttcccaagtgaaacaagaggtaaggctattgctttcttcgcttttgctccttacgtcggtcccgttgttggtccactagttaatggttttatttccgtttctaccggacgtatggacctgattttctgggtcaatatggcctttgcaggtgttatgtggatcatatcttctgccatcccagaaacgtacgctccagttatcttgaagagaaaggctgctagattaagaaaggaaactggtaatcccaagattatgactgagcaggaagcgcaaggtgtcagtatgagtgaaatgatgagggcttgtctgttgagacctttgtacttcgctgtcactgaacctgttctagttgccacttgtttctacgtgtgtttgatatactctctactatatgcgttcttctttgccttccctgtcattttcggtgaactatatggctacaaagataaccttgtgggtttaatgtttattcctattgttatcggtgctctttgggcgttagccacaactttctactgtgaaaacaaatatttacaaattgtcaaacagcgtaaacctactcctgaagatcgtttgctaggtgctaagatcggtgctccatttgctgcaattgctctatggatcctgggtgctaccgcttataaacatattatttgggttggtccagcttcagctggtttagcttttggtttcggtatggtgttgatttattattcattgaataattacattattgattgctacgtccaatacgcatccagtgctctggctacaaaggttttcttaagatccgccggtggtgctgccttccccttgtttaccattcaaatgtaccacaaattgaatttgcactggggttcttggttgttggctttcatctccactgctatgattgctttaccttttgcattttcttactggggtaagggcttgagacataagttgtccaagaaggactattccatcgacagtgttgagatgtaa

SEQ ID NO: 80048 - DNA, 102 bp, Saccharomyces pastorianus
atgagtgatcaagaatctgttgtttcattcaactcacaaaacacttccatggtggaggttgagggccaacaacctcaacgggatcctctagagtcgacctgc

SEQ ID NO: 80049 - DNA, 207 bp, Saccharomyces pastorianus
atgatatatttgttttcttatttcttcttgatgtcttcaggaaaaaagaacataaacaaatacaaaaaaatcctagtacgaaacctcaaaagggtgtatgcgcaatgtatatatatagcaagaaaaaaaaataaacagtggcattacagtgcatgcggatggcagtgttcttcggtggctttttcgaaaaacctagaatgcgtttaa

SEQ ID NO: 80050 - DNA, 1986 bp, Saccharomyces pastorianus
atgtcagactataagggctattatgctaagactaacctaacttctgctaataacttaaacaatcataataacaataattataagaacattataagcagtagtaacgataatagttttgcatcacatttacagccgccggacagaaacttaccgtctcatccttcttcaaataatatgagtagcttttctaacaacagcttaattaagtctccaccaccttttgacagatatccgctagtaggaacgaggcatatttcagcggctcaatctcagtcgcagaaccttataaatgaaaagaaaagagcgaatatgactggctcatcttcttctgctcacgactcttcattatcatccaccaacttatacatgggcgaacaggatttttcgccctttggcggttatccagcttccttctttccgttaacgttggacgaaaaggaagacgatgactacattcataatccaaatgtcgaggaagaagcaaagttagatagaaggaggttcgttgacgacttcaaacacatggatagaagatctttcttggggcttctgggtattctatttttatttatggctggtatatttattttcattgtattacctgcaattacattttccggggtagtttatcatcatgaacatgttcatgcagcaaattcagcaggatcgttgtcttctaatactacatccaagtcattgactgaatatcaatatcctcaacttgcggctataaggacaactttagttgatccagacacacctgacagtgcgaagacaagagtagcgaaagatggttctaaatggcagctggtgttttccgatgaatttaatgctgaaggtaggaccttttacgatggcgatgaccagttttggacagctcctgacatccactacgacgctacgaaagatcttgaatggtactcaccagatgccgttacaactacaaatggtaccttgacgttgagaatggatgcattcagaaaccatgacctttattacagatctggtatggtacagagctggaacaaactctgctttacagaaggtgcgttagaagtttccgcgaacctccctaattatggtcgagttacaggattatggcctggtatgtggaccatggggaacttgggcagaccaggttatttggcgagtactcaaggtgtttggccttattcatatgaagcatgtgacgctggtataacaccaaaccaaagttccccagatggtatttcttacttgccgggacaaaagttgagtgtttgtacttgtgataatgaggatcatccaaatcagggagttggaagaggcgcaccggaaatagatattttagaaggtgaagctgatacaattttgggtgttggtgttgcgtcacaatctctacaaattgctccatttgatatatggtacatgcccgattatgacttcatcgaagtttataatttcaccacaacaactatgaatacttacgctggtgggccttttcaacaagctgtctcagcaatatccactttaaatgtaacatggtatgaatttggggaggaagcaggttattttcaaaagtatgccattgaatatctcaatgatgacgacaacggatatattcgttggtttgtgggagagaaccctactttcacactatatgctacttctttacatcctagtggtaatattgactggaggagaataagtaaggagccaatgtcagcgattttaaacttaggtatttccaacaactgggcctatatcgactggcaatatatatttttcccggtgacaatgtcaatagattacgtccgattataccagccgaagggttctacgtccattacttgtgatcctgaggactacccgacatatgattatatccaaagccatctaaatgcatattataacgccaatttaactgattgggaacaggctggatatactttcccaaaaaatgttctaacaggaggttgtagtagttcaaaattctcattatcctga

SEQ ID NO: 80051 - DNA, 534 bp, Saccharomyces pastorianus
  modified_base (395)..(423): a, c, g, t, unknown, or other
  modified_base (439)..(439): a, c, g, t, unknown, or other
atgtctgtgcgaaacctcaccaataatcgtcattccaacagcgaaaatagtgtttccggaagcgaaaactccttttattcctcgaatgagcaatcaagacaaagctcatcattagaacctgcagatggtcagaacgttagggtgagcggtaatcctttccttggaagtgaagaatttgacgaagattataattcacccagtggagacgatgagcggcgtggggcaaatgaatattccagttcttcatccataaattataataacgatcctaacagcgatacttctcttctggctaatgaaaagaactcacccgagagaaatggtcaaagaatgtcagactataagggctattatgctaagactaacctaacttctgctaataacttaaacaatcnnnnnnnnnnnnnnnnnnnnnnnnnnnnnagcagtagtaacgatnatagttttgcatcacatttacagccgccggacagaaacttaccgtctcatccttcttcaaataatatgagtagcttttctaacaacagcttaatt

SEQ ID NO: 80052 - DNA, 1194 bp, Saccharomyces pastorianus
atggagcctagtgttgatattaacgacattgagcatgtaccaggtacaggtatgtttttcaccgctaacgaaagtattcccatgcatacatattatattccaagtttaggaccatctccacgctggtgctcattcttggattctatcacagaagaattagaagaaaaaccaagtgacactgtttactctaactacaggttcattactagagacgacgttaaaaaattgaatttaacgcacttggtgggatccagagtattaagagcatacatgcatggtttctttattaacactgaactttacgataaggtttcattaattgctaatccagatgcctacaaagatgaaagagaaagagaaattagacgtagaattgagaaagaaagagaatccagaatcagaagttcaggggctgttcaaaaacctaaaattaaagtcaataaaacattggttgataaactatctcaaaaacgtggtgataaagttgcaggaaaggttcttacggatgaccgtttcaaagaaatgtttgaggatgaagaatttcaagtcgatgaagatgactatgatttcaaacaattgaatccagtaaaatccatcaaagaaaccgaagaaggtgctgctaaacgtattagggcgctaactgctgccgaagagtccgacgaagaaagaattgcaatgaaggatggcagaggtcactatgactacgaggatgaagagtctgatgaagaagaatctgatgatgaaacgaaccaaaagtcaaataaggaagaattaagtgaaaaagatttgagaaagatggaaaagcaaaaggcactaattgaacgcagaaagaaggaaaaggagcaaagcgaacgttttatgaacgaaatgaaagccggcacttccacgagtacgcaaagagacgaaagtgctcacgttacatttggcgaacaagtaggcgaattgcttgaggtggaaaatggaaagaaatcaaatgaatccattttacgtcgtaaccaacgcggtgaagcagaacttacttttattcctcaaagaaaaagcaaaaaagacggaaattataaatccaggcgtcatgataattcatcggatgaagaaggtattgacgaaaatggtaataagaaggacaatggtaggtcgaagcccagattcgaaaatagaagaagagctagcaaaaatgcgttccgtggtatgtag

SEQ ID NO: 80053 - DNA, 549 bp, Saccharomyces pastorianus
atggttttgaaatctacttccgcaaatgatgtttcagtatatcaggtttctggtacaaacgtttcaagatcacttccagactggattgcgaaaaagcgcaaaaggcaattaaagaatgatttagaatatcaaaatagagtagaactgattcaagattttgaatttagcgaagcctccaataagattaaagtgagtagagatgggcaatattgcatggctaccggtacatacaaacctcagatccatgtctacgattttgctaatttgtcactgaagttcgatagacacacagatgctgaaaacgtggatttcactattctctctgacgattggactaaaagtgtacatttacaaaatgatagaagtattcaattccaaaacaaaggtggtctacattacaccacaagaattcctaaatttgggagaagtttagtttacaataaggtaaactgtgatttatatgttggtgcgagcggtaatgagttatcacaggttgaacttggaaaaggggagatttttaaacccattcagtggatactgaaggcgtga

SEQ ID NO: 80054 - DNA, 894 bp, Saccharomyces pastorianus
atggttcatgtttactataccatcttgttcttcgttctgatgcccatacgtttttacacatattataaaaccaaaaatcactactttctggctgatttttgttactttgtgaacatgttatgcctattgtttatttggattttcccatattcatacagccttttccagtcatgcttcgcattcactttcggaacgttatgctttgccgttattacttggagaaattccttggtaatacattctatcgataagactacttcatgcttcattcacataatacctccctgtgtcatgtacgttatctatcatggattaccactcgaatacaaaatcgaaaggtttccgggagcaattattcaaagtgaattggacatcaaaaaaaatattctttggacatccctttattatttggtttggcaatcattataccattacttcatcacgttgaaaaagtctagcaagatcaagtcaggggaaagaatgacaagttttgaatatttaactacacaccaatttaaaaacttttgggcagttaaattgaggtcaccttggccgatgataatttacacactttctcaatatttctatcaactattcactatgctgttgtgtggcatatggattcgttacaaattagctgcggccctatttttaactatagtatttctatgggcgtctcataatggagctacctactatatcgaccactacgggaagaatttcgaaaaagaagttgatagattacgtcttgaagttgagaatttacaacaaaagttacagcctgattctgatgcagtcatatctgatgcctccgtgaatgataaggattacttgaatgtcaaccgtgacgaagattttgacgactcttcaagtgtatcctcaaagagtgattaa

SEQ ID NO: 80055 - DNA, 801 bp, Saccharomyces pastorianus
atgtacaagttggacaataacgacattgacgatgaaacgaataactctgtttcactgacgagccttttagaatttctcgacccgatcgcttcaaaagtagtttcaaaatactaccatggttctcatctttcgaaagcagaacagaaattccgaaatttcgagggttttagaagacgtaaaccccatcatgaacatgatagtcatcatccacatcacctgaatagaagtcgctctttcttgcagttagaggacttcaaagtaagagcgttacaaagaattagaaatctagataaacccttggattccatttttttcaaaaacagctcaaggttggagaaagcattttaccctttcacactgtttaatatatttttcatcggatttttgatgggcagatttccagaatggtttcatgtttactataccatcttgttcttcgttctgatgcccatacgtttttacacatattataaaaccaaaaatcactactttctggctgatttttgttactttgtgaacatgttatgcctattgtttatttggattttcccatattcatacagccttttccagtcatgttttgcattcactttcggaacgttatgctttgccgttattacttggagaaattccttggtaatacattctatagataagactacttcatgcttcattcacataatacctccctgtgtcatgtacgtcatctatcatggattaccactcgaatacaaaatcgaaaggtttccgggagcaatcattcaaagtgaattggacctcacaaaagtattctttggacat

SEQ ID NO: 80056 - DNA, 681 bp, Saccharomyces pastorianus
atggatagcgttgcaacaagattgagtccatactgtgaattgaaaattgaaaacgagcaggtagaaaccaattttgtcttgcctactccagtaactttgaattggaaaatgcccattgaactttataacggagatgattggattggtttgtataaagtcattgatacaagggcagatcgtgaaaaaacaagagttggatcaggtggtcattggagtgcgacttctaaagattcatatatgaaccatggattaagacataaagaatctgtaacagaaataaaggcgactgaaaagtacgttcaaggtaaagtgacattcgacacgtctttgctttattttgaaaatggtatctacgaatttaggtatcattctggtaactcccataaggtgttattgatttctacaccatttgaaatttcattgccggtactaaataccacgacgcctgaactgtttgagaaggatttgactgagtttttgacgaaagtcaacgttttgaaggatggtaaatttcgtccattaggaaataagttcttcgggatggacagcttgaaacaattgattaagaactcaattggcgtcgaactttcgtctgagtatatgaggagagtcaatggtgacgctcacgttatttcgcatcgcgcttgggatataaaacaaacgcttgatagtcttgcttga

SEQ ID NO: 80057 - DNA, 1422 bp, Saccharomyces pastorianus
atgccaaaggagtatgatttatttgcctatccagaagagatcaacgtctggttgatatttcgccagtttgtcgatttaatcttgatgcaagattttgtgacttacattatttacgtttacctttctattccatatagctgggttcaaatcttcaactggagatctttgctaggtgttattttgattttatttaacatctgggtcaagttagatgcgcatcgcgtggttaaagattatgcttggtactggggtgatttcttctttctggaagaatctgaattgatttttgatggtgtcttcaacatctctccacatccaatgtattctattggttatttgggttattatggcctatcattgatttgtaatgactacaaggttcttctggtgtccgtatttggacattattctcaatttttgtttctgaaatacgtcgaaaatccccatattgaaagaacgtatggtgatggcactgattccgattctcaaatgaatagcagaattgatgacttgatatcaaaagagaattacgattattcaagacctctaattaacatgggtctttcttttaacaacttcaataagctaagatttactgactatttcacaattggtaccgtagcggcacttatgttaggaacaatcatgaatgctaggtttatcaatttaaattacctctttattaccgtttttgtaacaaaactggtttcatggttatttatctcgacaatattgtacaagcaatctcagtctaaatggttcacgagattgtttttggagaatggttacacacaagtttattcctatgagcaatggcaatttatttacaattattatttggtattaacctacacacttatgataattcatacagggcttcaaatttggagtaatttttccaacataaacaacagtcaattaatttttggtttaattcttgtggctttacaaacatggtgtgataaggaaacgagactagcaatctctgattttggttggttttatggtgattttttcttgagcaactatatctcaactagaaagctgacttcccaaggtatctacagatatttgaatcacccagaagcggtattaggcgttgttggagtttggggtaccgtattgatgacgaattttgccgttacaaatattatcttggctgttttatggacattgacaaattttattcttgtcaagtttattgaaacacctcatgttaataagatatatggtaaaactaaacgagttagtggtgttggaaaaactttactaggcttgaaacctctaagacaagtttcagatattgtcaatagaattgaaaatattataatcaaatcattagttgatgaaagcaagaactcctatggtggggcagaacttttgcccaaaaattatcaagataacaagaatggaatattttaa

SEQ ID NO: 80058 - DNA, 678 bp, Saccharomyces pastorianus
atgatgtcagaagagtactatgcagctgcttctgctaagagaagaggtttaggtttggttcgtttcatcggtttcctataccgtctgaatctgttgactggaaagatgatgttcgaatgtttccgtagactaatgaaggatttgacggattctccatctgaagaaactctagagtccgttgttgaattgttaaatactgttggtgaacaatttgagaccgatagtttcagaacgggtcaagcaacattggagggttcgcaattgctcgatagtttgttcggtattttagacaatattattcaaactgctaagatttctagtagaatcaagttcaagttgatcgacattaaagaattaaggcacgacaagaactggaacagtgataagaaggacaacggtcctaagaccattcaacagattcatgaggaagaggagagacaacgtcaattgaagaataattcaagatctaattcaagacgtacgaacaactccagtaatagacactctttcagaagggacgctcctcctgcatcaaaagatagctttatcacaaccagaacatattctcaaagaaatagccaaagggctcctcctccaaaggaagaaccagctgcaccaacttctaccgcaacaaatatgttcagtgcattaatgggagaaagtgatgacgaagagtaa

SEQ ID NO: 80059 - DNA, 2016 bp, Saccharomyces pastorianus
atgacagacgaaactgctcaaccgacacaatctgcttcaaagcaggaatctgctgctctgaaacagacaggcgatgatcagcaggaatctcagcaacaacgtggctacaacaactacaacaatggtagcaactatacccaaaagaagccttacaacagcaacagacctcatcagcaaagaggtggtaaatttggaccaaacagatataacaaccgtggcaactataatggtggcggtagtttcagaggtggacacatgggagccaacagctcaaacgtgccatggactggttactataataactaccccgtttactaccagccccagcaaatggcggccgctggtagtgcccctgctaatccaattcctgtcgaagagaagtcacctgttccaactaagatagaaatcactaccaagtctggtgaacacttagatttgaaagaacagcataaagccaagctacagtctcaggaaagatctactgtgtctccgcaaccagagtcaaagttaaaagaaacttctgattctacttctacttctactccaactcctaccccttccactaatgactctaaggccagttctgaagaaaatatatctgaagctgaaaagacaagaagaaatttcatcgagcaagttaaacttcgtaaagctgctttagaaaagaagagaaaggagcaacttgaaggttctagtggcaacaataatattccaatgaagactaccccagaaaatgtggaagagaagggatcggacaaacctgaggtaaccgaaaaaaccaagcctgctgaagaaaaatctgctgagccagaagttaagcaagaaactccagctgaagaaggtgaacaaggagaaaagggccaaataaaggaagaatccactccaaaggtgttaacctttgctgaacgtttgaagttgaagaaacaacaaaaagaacgagaagaaaaaacggaggggaaggaaaacaaggaagtgccagtacaggaagagactaagagcgccatcgagtctgctcctgtgcctcccagtgaacaggttaaagaagaaactgaggtcgccgaaaccgaacagtcaaacattgatgaatctgcaacaactccggctatccctactaaatctgatgaagctgaagctgaagttgaggctgaagcaggtgatgctggaacaaagattggacttgaagctgaaatcgaaactacaactgatgaaactgatgatggtacaaacaccgtttctcacatattgaatgtattgaaagatgctacaccaattgaagatgtcttttcttttaactatccagaaggtattgaaggtcctgatatcaaatacaagaaagaacacgtcaaatatacatatggcccaactttcttgcttcaatttaaggacaaactaaacgtcaaagcggacgccgaatgggtccaaagcactgcttctaaaattgtcattccaccaggaatgggcagaggaaatagatctagagattctggcagattcggcaataattctagtcgtggccatgactttagaaatacctcagtgagaaatatggatgacagagctaattcaagaacttcatcaaagagaagatcaaagagaatgaatgacgacaggagatctaatagatcttatacatcaagaagagaccgcgagagaggctcctacagaaatgaagagaaaagagaggacgataaaccaaaggaagaagttgctccacttgttccaagtgctaataggtgggtgccaaaattcaagtctaaaaagactgaaaagaagctagcccctgacggaaagaccgaactattggacaaggatgaagttgaaagaaagatgaagtcactattgaataaacttactttggaaatgttcgatgctatttcatctgaaattttggctattgcaaacatatcagtatgggaaacaaatggtgaaacgttaaaggctgtgatagaacagattttcttaaaggcctgtgacgaacccccattggtcttctatgtacgcgcaattatgtggtaa

SEQ ID NO: 80060 - DNA, 270 bp, Saccharomyces pastorianus
atggggcaaatcatttttattgcaaaaaaaagcactcacgatgggggtcgaacccataatcttctgattagaagtcagacgcgttgccattacgccacgcgagctactgtttgttggaagctttctattattaacaagtacataccaaccttagctaacattactataacgaagctgagaaagctatacaaaagatttgtcgatcgagaatcattgtttcttatttttttcaggaaggatgaacacattgttcagaatattatcaattaa

SEQ ID NO: 80061 - DNA, 126 bp, Saccharomyces pastorianus
atgatagtagagccaatgaccaaaccaagaaagcctacagtacagaggtgccaaagtttttttactaatggggcaaatcatttttattgcaaaaaaaagcactcacgatgggggtcgaacccataa

SEQ ID NO: 80062 - DNA, 273 bp, Saccharomyces pastorianus
atgaataatgggactatccccaattcgcccttgacactggaaaatcagtaccaactgcataataaatatagaaaaattgcggaggggattatactattatccaacgattacaaaattccagttgtacctccgagagaaacatacttcgtggacttacgatttattggtattatgtccggatattatggcaccctctccggacttaaggtattggatttaaatacaaatgaacttatagaagttggaaatggcgcatctgtgttaatccagtaa

SEQ ID NO: 80063 - DNA, 1269 bp, Saccharomyces pastorianus
atggaatgttttgtaccgctgcgttgcgacttagatggaagtaatatagaacagttacgtcaatcacacttaagccgtaaatttattatatttgatgagcaactgaatctttggctgtggtttcaaggtaattcgcaagagaacaagagatctgtactacaaaatatgataatatcaataaatgaagcgcaagttaccagaacaagcactatcgatgattattttacccaagttgagaacaatgaaaatctctggaagttgaaaaacgactgttgttcgaagattcttttcaaatcaaatgttgttatgaataatggttataataatcagatcaaatttgtctttgaatataaatctgtggatgcaaatttcaataaccaggattcattacaagatccacaggcaaggtatacattagataagtactctagcgaggagattttgccaagttttgagccagtttattcctggtcttctacagccaccaaatcatccaaaaatactaataatcatctggagaaaaatagcagggcgactcatcgagttagttctaaaaatagcgaagtccacgaagcggacgtttctagaaatccaaatacatttactcttaagctccaatacccaatattctcacttttgaatatgagattgagaaacatctccttgaaatctgagcattgcatattatcatcgttagactttcaaacttctaaagcatccgaacaattgaccaaaaaatttatttatccgcaagaacacaattcttttctcaaactaaactttcaagaaatatcgtataaactaatcgacggaacttctcaaattgaactagatccaatctgtcctttgaaagtgccactcactgcattttcatacgatagcattagcgctacttttaaactggttctgttacccaaatcaactcaaccacatcgtgtgaaaatcaccttagcgtacgaactcgagctgcatcccaatctgaagttacctgtgagaacatcatgggaaacagaagtcacattgaagcgttctatgccaatttcctcgacatcttctcaatactcgagtaacaacaataatactaatcatagcgcttcttttaatggtgcggccaacaacgttaattctggtggtttggccaatctaagattaggtggggtttcctcctcaagatttagtcttgcagctgcttcgactacatcattggtgaatagcaaattaagcaatgtaaaattcaagtttattaatagcaatagggatcctctagag

SEQ ID NO: 80064 - DNA, 714 bp, Saccharomyces pastorianus
atgcacagtgttcccaactatacaagaatcgaaggaaatatgggtgaaaggaagaaaatttctattaagaaactagccaataactataatccagaaacatttaatgacaataactgcagtattggtatatttagactggcgccacaagattatcaccggtttcactcaccatgtaatggtacgattggaaaacctgtatatgtggatggagagtattatactgtaaatccaatggccgttcgtagtgagttagacgtctttggtgaaaatatcagagttattatccccatcgattctcctcaatttggcaaactactgtacatacctattggtgcaatgatggttggatccatactattgacctgcaaagaaaacgatgtagttgagagtggacaggagctgggctattttaaatttggaggttctactataataatcattatcccgcacaacaacttcatgtttgattctgaccttgtgaaaaactcttcagaacgcattgaaacgttagtcaaagtcgggatgagtataggacacacatcaaatgtgaatgaattgaagagaatccgtattaaagtagacgacccaaagaaaattgaacggatcaagagaacaattagtgttagcgatgaaaatgccaagagtacaggaaatgtaacatgggaatatcatactttacgggaaatgatgaataaagattttgctgggctatga

SEQ ID NO: 80065 - DNA, 2778 bp, Saccharomyces pastorianus
atgaggattattaagggcagaaagcgaggcaagaacaagaaaccaacgctaattttaaaaattcatgtcattcaagctgaaaatattgaagccttgaagacattcaattgtaacccggtatgttttgttaccactaatacattttatagtcaaaagacgaacaagctcaagaactcaaatacacactggaatcaaactttgaggatcaaacttccgagaaatccaacatctgaatggttaaggattatagtatacgacgccctaccaaccggagccccccctactacccccagtagaccaaggacaaccactgcaaatacatcttcatcgacactgtcaaattcaggcctaagttctcactctcattcgtcgagaaatttgaatgttacgtccaaaggtaatcaaacttcaacatcaattaattcagtatcatcttcagctacaccggccccttcacattcttcctcttctctctcaacaacaggtcccgggtccacacacaaaaataggattaatagctatctatatttgggtgaagcaaaaatttcattactggatttattcaagaggaaggacaccacgacgagctataaattttcgattgaagctcagcggtaccatctatacgatatgaaaagagggaaagaccaagattccttgaactgcaactttctagtgggcgatattttgcttggatttaagctagaatgtaacgttaaaagaaccccgacttttcaggctttcaatgcttggagaaatgagttgaatacttacttgggcagaatagatagaaataaggcccgcatgagatcttctagttctttgccacctccactagaagatatgttgagcaatagttcagctgttagtggaaatgaaatacgacgcgagaaaccatatagcgatactgatctagcccacgatgaagaggtcaatgccgaggatgaaatagatgctgaggaatctattgaagatatgaatagcagcggcagcatttgtacggggaggaggtacgatatagacaatgatactatattcgactctatatctgaggttgtttcgctaaatgatgaagaactagatattctaaatgattttgaagaagcagatcatccaaatgtgccagacataaatgtgcatgacatcgacgaagatacccgtatcagtctatcttcaatgataacagctttagatgaatatgatatcgtagaaccagaagatgttgcaaaattacctgcaatgtcggaaaatgacataacatcagtggatgacgaagaatctgaaaaccaacaggaaagtgatgaggagtttgatatatataatgaggatgagcgtgaagattctgattctcaatcaaacgaatacattgggagtcggcttttacacctgcaaaggggtaaacataataaatcatatgcaaattacttatacagaagagcaaaaagtaacttttttatatcgaaaaaggaacatgcgatgggggtagtattcatgcatattggggctatcaaaaatttacctgcattaaggaatcggttgtccaagactaattatgaaatggatccatttatcgttatttcgtttggtagaagagtattcaaaacatcttggagaaaacatactttaaacccagaatttaatgaatatgccgctttcgaagtttttccccatgaaacgaattttgctttcagtatcaaagttgttgataaagactcattttcattcaatgatgacgttgcaaaatgcgaactggcttggtttgatatgctgcaacagcaacaacatgaaaacgaatggataccttatgagataccattggatctcactgttgagccagcacatgctcctaagcaaccggtattatattcgagcttcaaatatgtttcatatccgttcttaaaaaagagcttttggaaagaagctgttgacacatcagtcaacttagaaagactcgacattattcaagtaatgctctatcttgaacgtcttggttcattcacgatggccgattcttttgaactctttcagcatttcaataaatctgcttgggccggccagagcattactagatcacaattagttgaagggctacagtcatggagaaaatccactaattttaaacgcatctggacatgtcctagatgcatgcgttcatgcaaaccaactagaaatgctagacgttctaaactggttctagaaaatgacttgataacccattttgccatatgtacgttttcaaaagaacacaaaactttaaagccgtcgtacgtctcatctgcatttgcatccaagagatggttctctaaggttttgataaaattaacttatggtaaatatgctttgggatctaacaatgcaaacatcttggttcaagaccgagacacagggataattatagaggaaaaaataagcgcacacgtaaagttgggaatgaggattatatacaatggtaaaagtcccgagtctaaaaaatttagatccctcttgaagactttatcaatcaggcaaggtaaaaaatttgacagcactgcatctgccaaacaaattgaacctttcataaagtttcactcactagacctttcacaatgccgagataaagattttaaaacattcaatgaatttttttacaggaaactaaaaccaggaagccggctgcctgaaagtaataataaagaaatattgttttcaccagcagattcaagatgcacagtgttcccaactatacaagaatcgaaggaaatatgggtgaaaggaagaaaatttctattaagaaactag

SEQ ID NO: 80066 - DNA, 792 bp, Saccharomyces pastorianus
atgtctttgttcaatgctaagaatcctgctcctatgcacggtcacgttattcttggtagtgatcatatgccaatcttggtttaccaaatcagtccagaagaaacaagaatcctttgtgcttacaactctccaaaggtcccagctgatatcaagagttggatgattaaggatgtccaacctttcattccaaagagtctacgtccttcatttgatgaagccgtcagccaaggtaaatttagagctatgccaaactcctacttgccagctagacaaaacgacgtcactggtatgtgtgttatcggtgacgctctaaatatgagacatccattgaccggtggtggtatgactgtcggtttgcatgatgttgtcttgttgattaagaaaattggtgacctagacttcagcgaccgtgaaaaggttttggatgaattactagactaccatttcgaaagaaagagttacgattccgttattaacgttttgtcagtggctttgtattctttgttcgctgctgacagcgataacttaaaggcattacaaaaaggttgtttcaaatatttccaaagaggtggcgattgtgttaacaaacccgttgaatttctgtctggtgtcttgccaaagcctttgcaattgaccagggttttctttgctgtcgctttttacaccatttacttgaacatggaagaacgtggtttcttgggattaccaatggctttattggaaggtattatgatcttgatcacagctattagagtattcaccccatttttgtttggtgaattgattggttaa

SEQ ID NO: 80067 - DNA, 612 bp, Saccharomyces pastorianus
atgtctgctgttaacgttgcacctgaattgattaatgccgacaacacaattacctacgatgcgattgtcatcggtgctggtgttatcggtccatgtgttgctacaggtctagcaagaaagggtaagaaagttcttatcgtagaacgtgactgggctatgcctgatagaattgttggtgaattgatgcaaccaggtggtgttagagcattgagaagtctgggtatgattcaatctatcaacaacatcgaagcatatcctgttaccggttataccgtctttttcaacggcgaacaagttgatattccatacccttacaaggccgatatccctaaagttgaaaaattgaaggacttggtcaaagatggtaatgacaaggtcttggaagacagcactattcacatcaaggattacgaagatgatgaaagagaaaggggtgttgcttttgttcatggtagattcttgaacaacttgagaaacattactgctcaagagccaaatgttactagagtgcaaggtaactgtattgagatattgaaggatgaaaagaatgaggttgttggtgccaggttgacattgatggccgtggcaaggtggaattcaaagcccacttga

SEQ ID NO: 80068 - DNA, 972 bp, Saccharomyces pastorianus
atggacaaaaaaagtggtgaagcgccacgttggttgatgaagcatttggataatataggtacaactacaactagatatgacagaacaagaagaaagcttaaagccgtcgctgatcaacaagctatggatgaagatgatcgtgatgacaattcagaagtagagttagattatgatgaagagtttgccgatgatgaggaggcacctattatagatggtaatgaacaagaaaataaagaatcagaacaaagaatcaagaaggagatgctgcaagctaatgcgatggggcttcgtgatgaagaagctccttccgaaaacgaagaggatgagttatttggggaaaagaagattgatgaggatggtgaaagaattaagaaggcattacaaaagacagaacttgcagcactatactcatcggatgaaaatgagatcaacccatacttatctgaatccgatattgaaaacaaagagaatgaatcgcccgttaaaaaggaagaagattcggacactctatccaaatccaagagatcttctccaaagaaacagcaaaagaaagccacaaatgcgcatgtgcataaagagccaactttgagggtgaaaagtattaaaaactgtgtcattatcttgaagggggataagaaaatactgaaaagcttcccagagggagaatggaatccacagacgacaaaagctgtagatagtagtaataatgcatcgaatacagtgccttcgccaatcaaacaagaggaaggcttgaattctacagtggcagaaagggaagaaactccagcgcctacaataacagaaaaagatatcatcgaggctattggtgatggcaaagtcaatatcaaagagtttggaaagttcatcagaagaaaatatcctggcgcagagaataaaaagctaatgtttgccattgtaaaaaaattgtgtcgaaaggttggcaatgaccacatggaattaaagaaagagtag

SEQ ID NO: 80069 - DNA, 1821 bp, Saccharomyces pastorianus
atgagtattagtactttaatgttgtgtacagtatttcaaagacagacaagagaggtttccaacacaatgtctttagactcatactatcttgggtttgatctttcgacccaacaactgaaatgtctcgccattaaccaggacctaaaaattgtccattcagaaacagtggaatttgaaaaggatcttccgcattataacacaaagaagggtgtctatatacacggcgacactatcgaatgtcccgtagccatgtggttagaggctctagatctggttctctcgaaatatcgcgaggctaaatttccattgaacaaagttatggccgtctcagggtcctgccagcagcacgggtctgtctactggtcctcccaagccgaatctctgttagagcaattgaataagaaaccggaaaaagatttattgcactacgtgagctctgtagcatttgcaaggcaaaccgcccccaattggcaagaccacagtactgcaaagcaatgtcaagagtttgaagagtgcataggtgggcctgaaaaaatggctcaattaacagggtccagagcccattttagatttactggtcctcaaattctaaaaattgcacaattagaaccagaagcttacgaaaaaacaaagaccatttctttagtgtctaattttttgacttctatcttagtgggccatcttgttgaattagaggaggcagatgcctgtggtatgaacctttatgatatacgtgaaagaaaattcagtgatgagctgctacatctaattgatagttcttctaaggataaaactatcagacaaaaattaatgagagcacccatgaaaaatttgatagcgggtaccatctgtaaatattttattgagaagtacggtttcaatacaaactgcaaggtctctcccatgactggggataatttagccactatatgttctttacccctgcggaagaatgacgttctcgtttccctaggaacaagtactacagttcttctggtcaccgataagtatcacccctctccgaactatcatcttttcattcatccaactctgccaaaccattatatgggtatgatttgttattgtaatggttctttggcaagggagaggataagagacgagttaaacaaagaacgggaaaataattatgagaagactaacgattggactctttttaatcaagctgtgctagatgactcagaaagtagtgaaaatgaattaggtgtatattttcctctaggggagatcgttcctagcgtaaaagccataaacaaaagggttatcttcaatccaaaaacgggtatgattgaaagagaggtggccaagttcaaagacaagaggcacgatgccaaaaatattgtagaatcacaggctttaagttgcagggtaagaatatctcccctgctttcggattcaaacgcaagctcacaacagagactgaacgaagatacaatcgtgaagtttgattacgatgaatctccgctgcgggactacctaaataaaaggccagaaaggactttttttgtaggtggggcttctaaaaacgatgctattgtgaagaagtttgctcaagtcattggtgctacaaagggtaattttaggctagaaacaccaaactcatgtgcccttggtggttgttataaggccatgtggtcattgttatacgactctaataaaattgcagttccttttgataaatttctgaatgacaattttccatggcatgtaatggaaagcatatccgatgtggataatgaaaattgggatcgctataattccaagattgtccccttaagcgaactggaaaagactctcatctaa

SEQ ID NO: 80070 - DNA, 561 bp, Saccharomyces pastorianus
atggtgtggatttttgctgcaaatatgtacatgagaacaaaagacaatgatgaggatgccaaggccgccatcaaagaagcctccaatgtcgaaagtaaattcaagaatttaaattgtaatattgctaacggttatttatcaataataaaagatgaaccaggcgtggcattaaaggaattcgaaacagttctgtactacgatgagaataatttagatgccttggtcggattcgctgaattaattttccctgaagagctaggcgtcgaggaaactaatcttgagcgttattatactctcagccttgataaaaaaccaggtaagagggccaaacttacgttcgttaatgacacagataggtcagcagcgtatgcaaggctaaaatttctattggagtgcgcaatactagaatcgatcgaggcttactattccccagaagtttggtggtatttgtccctcatttacgagaaatatcaagatgacgagtacaaaaactctttgctaaaatgtattaaataccaagagttgaatcccattcgctccctaaggtattgcaattactaa

SEQ ID NO: 80071 - DNA, 1926 bp, Saccharomyces pastorianus
atgcctaactcaaatgttcggattcctcctactgttccatcgaagataatagatgtggtcgaccaagcgctaagagcgcgactcttaggtggcagcaccttcaattcagggtttgatagtttagattccgtacttaacttacagtttaggctacattaccatgttattggatcgaatgggcctgcaaaaccagtttgtgatgttttactgaaggaaagtcaaaatttagaaaagaatatgagtatgatggaggagttgaatgactatccggagattacaaaactagtggagaaaattctgttcaattgcctcggtatccttttcttccacaggggccaatttcaggaatcgcagcggtgcttgctgcactcgttgaaaattcataataacactgcatcgcaaagaacagcacttatggagcagtatgataggtatttgatcgtagaaaacctgtactaccgtggtctagtttcgcaagacataaatatcatgcaaaatgttttttacaaagaactactggcccacgtggatacgatccctcccgaatcaaacggtcttcttttcgaatacatcagcttgatcgtcgcaaaactcaggttcaatcaaattcaggatttagcagaaaattttaaaactaccgtcgaaaatccttttattcttttcctttacatgataaagaagttccagtcacctctcaaaaagcacattgataatgatgatctttatttgaagttcggacagaacgttttgttgaaggccaaatttcctactgctagtgagactaatgatgaagctttggagcattttaatgtctttttgcagtattatttcaaattcactcacataaaaaaaataaaagtgaatcccagttggtataatttcataatatcttcaatggaaaagacttttcaaagtattgaagtttcgaaaacagcaatgtttcttttccaaaacttaagcgataacagtaatgacgaaataaagaagaagacatttaaaagagaatctatactaaattttgttaattttgtgaaatacaacgacaagtactatcaactgcacgataactcccaccgtgacataatttcattcattgatgcgtattcttttattttacaaaactcctccaaaaccgattcaatcgaaaatgtttttgattacgataatacggtatctacgtttgcgacttccttgaattccttctacaaagaatataatttgccattaatgagccaatcagaatctttagattggctagaaaacagcaccagatgtgtatacccaggaaacatttcgaaagttctaacaaatgcgtggtcaacattgtacgaaattagaaaatatcagttagatttccttgtatctaataatttgacttcatatctatgtaatgcaatgatgctgtccacaaaagaaaaagacaatgctgatgtagaagagcaggaagaaggagaggaggagaaggcattacgtgaattacaatttaaatattcttacactctagcacaacagaggcacattgaaactgcaatcaagactctagaatcattgatattaagtaaaaacccaaattactacaaagcttggcatctattagctctttgtaggtctgtgcaagaggataaggaaatgtcgtacaagatagtttgctctgttctagaagctatgaatgaaagtcttcagaacaatactttacttctgaatgatagatggcaatttattcacctaaaattaacgcaattggcgctaattgaagaaatttttggcactttagaggcactggagacacttccagaggtctttgaattatacgcaacattatttccagattcacaacctgaattgaacagcatgggtcccaaatattctcaaactaaagaatatcttttacaatggtgtggatttttgctgcaaatatgtacatga

SEQ ID NO: 80072 - DNA, 2364 bp, Saccharomyces pastorianus
atggtggatgttcactcccgaagcatttttataggtgctaacaagcaaactcaggttagcgatatacacaaagttaaaaaaatcgtcgcatttggcgcaggtaaaactattgcattatgggaccccattgaaccaaataataaaggtgtttatgcaactttgaaaggccacgaagctgaagtgacttgtgtcagatttgtcccagattcagattttatggtatctgcatctgaggatcaccatgttaagatctggaaatttactgattactcacatttacaatgtattcaaaccattcaacattactcgaagacgattgtggcattaagcgctttaccaagtcttatttcagtcggttgtgctgatggtactatcagcatatggagacaaaatattcaaaatgatgagtttggtcttgctcatgaattcaccataaaaaagggattcttctatccactgtgtttatcactgtcaaaagttgaagaaaaaaagtatttacttgccattgggggtactaatgtgaacgtttttatcgcgtctttcattttaagtgattctggcattgagaagtgtcgagtggttgcagaattggaaggtcatgaagactgggtcaagtcattggctttccgtcaccaggaaactccgggtgattatttgttatgctcaggctctcaggaccgttatattagattgtggagaattaggattaacgatttaatcgatgactctgaagaagattcaaagaaattaacattattgagcaataaacaatataaatttcaaattgatgatgaattgagagtaggcataaattttgaagccttaattatgggccatgatgattggatttcatcccttcagtggcacgaaagtcgcttacaactactagctgctactgctgatacttcattgatggtatgggaacctgatgagacttcaggcatttgggtgtgcagtctacggttaggagaaatgtcctcaaaaggtgcctcaactgcaacgggttcctctggaggtttttggtcctgtctatggtttactcatgagagaatggatttctttttgaccaatggtaagactgggtcctggaggatgtgggctacaaaggataatattatttgcgatcaaaggttgggcatatccggtgccacgaaggatgtgacggacattgcttggtctcctagcggcgagtacctattggctacttctctggatcagaccactagactctttgctccatggatttatgatgccagcgggagaaaaagggaaatagctacctggcatgaattttctaggccacaaatacatggttatgatatgatttgtgttgagacagtgacggataccagatttgtaagtggtggtgatgaaaaaatcttgagatcatttgacctacctaaaggggtggcaggaatgttacaaaagtttgttggtattcaatttgaggaaaaaagtgaaatgccagactctgctaccgttcctgtgttaggtttgtctaataaagctggtgatgatgacgcaaatgaagatgatgaagaggaggaaggtggtaataaagaaacaccagatatcactgatccattgtccttgctagaatgtccgcctatggaagaccaattgcaaagacacttgttatggcctgaagtggaaaagctttacggacatggttttgaaataacgtgtcttgatatttctccggatcagaaattaattgcttctgcttgtagatcaaataatgttcagaatgcagttattagaatattcagcacagaaaattggttagaaataaagcctgcattaccgttccacagtctaacgataacaagattaaaattctctaaagatggaaaatttttattgagtgtttgtagagacagaaaatgggcgctttgggaaagaaatatggaagataatacttttgaattgagattcaaaaatgaaaaaccacacacaaggattatatgggatgcagactgggcaccattagagtttggtaatgtttttgtcaccgcgtccagggataaaactgtcaaagtatggaggcaccaaaaggagccagctgatgactacgttctggaagcatcaattaaacacactaaagctgtcactgctatttccgtacatgacagcatgataagagagaaaattttgatatcggtgggtcttgaaaacggtgaaatttatttatacagttatactttgggaaagtttgagttaataacgcagctaaacgaggatataacaccagcagacaaaattacaagattgaggtggtcacatttaaagagaaacggtaaattatttttaggtgtaggaagtagtgatttgtccacccgtatatactcattagcatatgaatag

SEQ ID NO: 80073 - DNA, 330 bp, Saccharomyces pastorianus
atggttgatgtcaatgccaagctcttcttctatagcgacttgttgtggcgcaacccagaaatcaaatctttagggatagtattcaccaccgataacattaacaatgtttatggctggagactacaacaggagcatgaactaatatcaatggtcggaaaggggatgaccgacgaacaattgcatgcttttgtggatagatacatgccctcctataaactttatttgaacgactttgtccggagtgaaagtttaggttccattgctacattgacgttaggaatcgactccaacaggaatgtatattctacgaaaacgagatgtattgaatag

SEQ ID NO: 80074 - DNA, 90 bp, Saccharomyces pastorianus
atggaagagccaaagactaagtcacctggtgtgaaattgaattctgtggatgaattgattgaaaagttaaaagaagttaaggccatttaa

SEQ ID NO: 80075 - DNA, 165 bp, Saccharomyces pastorianus
atgccagatttgtacttctacagagaccctgaagaagttgaacaagtcgctgaagaagccgccaccgaagaagctggtgaagaagaagccaaggaagaggttactgaagaacaagctgaggccactgaatgggctgaagaaaacgccgacaacgtcgaatggtaa

SEQ ID NO: 80076 - DNA, 138 bp, Saccharomyces pastorianus
atgtccttaccagctacttttgacttgactccagaagatgcccaacttttgttggctgctaacactcacttaggtgctagaaacgttcaagtatgttatactcattcccgattatataatagagtaatgtgtgattga

SEQ ID NO: 80077 - DNA, 4314 bp, Saccharomyces pastorianus
atgcaattctgtggtggttacctagatccagtaaccaaacgtaaacaaaattatatctatgaagacggatcagaaggttctgtttcaaaaggctttctttgcccacaatattcgaaatgtgtttccaatgccaacccctacaacggcagaattagttttgataatattgttaattccatggagctcgtttttgtcattatgagtgcgaatacttttactgacttaatgtactatacgatggattcggatgaaatggctgcctgtttgttttttattgtttgcatctttgttttaactatctggctgctaaatctactcattgcagtgttggtatcatcttttgaaatagccaatgaggagtacaaaaagaaaaagttcatatatggttctagaaagacaggttatgttgctcgcatagtaacaggctactggaaatattttaagcttaaggcgaatcagacaaaattcccaaattggtcccaaaaaggactagctatttattcccacgttgagtttatctttgtcatacttattatttgcgatataggtatgcgcgcctctgttaaagtatcgacttcggcaaactataacaatatccttctaaaaactgacaggggaatttcgattgttctcttcatcgaatcactggcaaggttagtattatatctgcccaatatgtggaagtttttaacaaaacctagttacgtttacgattttattatatcaattattactctggttattagttgcctggctgttgaaggggttctaggacatatgtatgcctggctatccatattccacatatccagattttacagggtgattatttctttcaaattaacaaaaaaactatggaaacaaatattgagtaatggtgttatgatttggaacttatcgtctttttacttttttttcacctttttgattgctataatcatggctgtgtatttcgaaggcgtgattcctccagaagaaatggcagaccagccatttggaatgtattcactaccgaattcatttctttctttgtttataataggttcaactgaaaattggacggatatcctatatgccctccaaaaacactcaccaaacatctcctcagcttttttttgctcagtattttttattatatggtttctactatccaactcagtgatcttgaacattttcattgccctaatatcagaaagcatggaagtgaaagaagaagaaaaacgaccacagcaaattaagcattatcttaagttcgtctatcctcagaaaatacaagaatatacacacgctagtttggttgcgagaattcgtaaaaaattctttggaggtcataggaacgaagatacaagagattttaagcaatttcttatgagaggaaccgcgataatgaacatagcgcagaatatgggggagttggccgatgaattcaaagagccaccttcagaaaacctatttaaaaagggcttatcaaagctcacaattggggttccgtcactaaaaaggctgagaatgtttgctaataatccattttataaaaatagtgacgttgtgtttacagaaacgaacgatataaatgggaggacgtatatcttggagttgaatgagtacgaggatgagaagctagattatttaaaaaagtaccctttattcaattactcatattatttcttttctcctcagcatagatttcgaaggttctgtcaacgcttggtaccaccaagcactggaaaaaggactgatggatcacgatttttcgaggatagcactgatctatacaataaaaggagctattttcatcatattgaaagagatgtatttgtattcattttcgcacttgccaccattttactaattgtttgctcatgttatgttacgcctctatatcgtatgcatcacaagatgggaacttggaattggtcctcggcgttagattgcgccttcattggtgccttctcaattgaatttatcgtgaaaacagtagctgacggatttatatattctccaaatgcttacctgaggaatccatggaactttattgatttttgtgtcctaatctcaatgtggattaatttaattgcatacctaaaaaacaatggaaatttgtctaggattttcaagggattgacagccctgagggccctcagatgcctcacgatcagtaacacagctcgtcaaacatttaacctagttatgtttgatggtttaaataaaatttttgaagctgggttgatttcactcagtttgctatttccatttacagtttggggcttaagcatttttaaaggccgtttaggtacttgcaatgacggaagtttgggccgtgcagattgttacaatgaatattcaaattccgtttttcaatgggatatcatgtctccaagggtttaccagcaaccatatcttcatttggactctttcgcaagcgcttttaattcattataccaaatcatttctttggaaggatggattgatttgttggaaaatatgatgaatagttcaggaataggtacacccgctacggtaatgggttcagcagggaatgctttattcctcgttctgtttaattttttaagtatggttttcatcctgaacttgtttgtttcattcattgttaacaaccaagcaaggacaacaggaagcgcttactttaccattgaggaaaaggcgtggctggaatcccagaaacttttatctcaggccaagccaaaagctatcccaaatttaattgagttatcaagagttaggcaatttttctatcaacttgcagtggagaaaaaaaatttctactacgcatcgtttcttcaggtagtactttatttgcacataatcatgctcctgagtcgaagctacaatccaggaaacttgataggttatcaaggtgtttattttatgttttccactagtgtttttttaattcaagaggcacttcacatgtgcggtgaaggaccaagattatattttaggcaaaaatggaacagcatacgactcagtatcataattatagcctttattatgaacgctgtagcattccacgttccagcctctcactattggttccacaatataaaggggtttttcctgttagtgatatttttgtttattattcctcaaaatgacacactaactgaactattagaaaccgcaatggcaagcttaccgcctattctatcattgacctacacttggggggttttatttttagtatatgctattgctttgaatcaaatcttcggcctaacaaggttagggagtaatacgaccgataacataaattttagaactgtaatcaaatccatgattgttctgtttagatgtagttttggtgagggctggaattatatcatggccgacctaactgtgtcagaaccttattgctcctctgatgataattcaacctatacggactgtggatcagagacatatgcctatttgttattaatgtcgtggaatattatttccatgtatatttttgtgaatatgtttgtttcgttgattattggtaatttcagttatgtttaccgtagcggtggatctcgctctggcatcaacagatcggagataaaaaaatacattgaagcttggtccaaatttgatactgatggaactggcgagcttgagctgtcctacctcccaagaataatgcattcatttgacggtcctctttcatttaaagtttgggaaggtagattgacaataaaaagtctagtcgagaactacatggaggttaacccagatgatccatatgacgtcaaaatagacctgatcggactgaacaaagagctgaatacgattgataaagcaaagatcatacagaggaagttacagtacagaagatttgtacaaagcattcactatacgaatgcttataatggatgtatcagattctcggatttgttattacaaatacctctctatacagcttattctgcaagggaatgtctaggtattgatcaatatgtccatcatctatatatcctgggtaaagtggacaagtacttagaaaatcaaagaaacttcgatgtattggagatggtggtaacaagatggaaatttcattgcaggatgaaacgtaccattgaacccgaatgggatgttaaagatcccacagtatcgtctcacatttcgaatataaacgtaaatctggaacctgctccaggaattttagaaagagaacctattgcgacacctagaatggactacggtgttaacaattttatgtggtctccgagaatgaatcaagactctacgatggagcccccggaagaaccaatagataataatgacgatagcgcaaatgatctaattgatagataa

SEQ ID NO: 80078 - DNA, 1119 bp, Saccharomyces pastorianus
atgggacaagatttctatccacaattggttcacatctatgacaatatgcttcagctatacagagctgtttcttcgatgatttctgctcaagttgccgcagaaggtctaattgctacgaagacaccaaaggttcgtggtttgagaaccatcaaaaaagagattctgaagcttgttgagacctatatatccaaggcgagaaatttggatgatgtcgttaaagtgttagttgagccattattgaatgctgtacttgaagactatatgaacaacgttcctgatgcaagggacgccgaagtgctaaattgtatgacaacagtagtagagaaggttggtcatatgatcccacaaggtgttattttaattttacagagtgtattcgaatgcactttggacatgattaacaaagacttcacagaatatccagagcatcgtgtagaattttacaagttattgaaggtcatcaatgagaaatcatttgctgcatttttggaactacctccggctgcctttaaattgtttgttgacgctatttgttgggcgttcaaacataacaatagagatgtcgaagttaatggtctacagattgcattagacctagtgaaaaacattgaaagaatgggaaatgtcccatttgcaaatgagttccacaagaattattttttcatttttgtcagtgaaacgttttttgttttaaccgattccgaccacaaatccggtttttctaagcaagctttgttactaatgaagttgatttctttggtttatgataacaagatttcggtaccattatatcaagaagctgaggtaccacaaggaacttcaaatcaagtctacttaagccaatatttggctaatatgttaagtaatgcattcccccatctaacatccgaacaaatcgcaagttttctctctgcattaactaaacaatacaaagacttagtggtcttcaaaggcactttgagggactttttggtgcaaatcaaagaagtcggaggtgatccaacagattatttgtttgctgaagataaagagaatgcattaatggaacagaatagactagagagggaaaaagctgccaagattggtgggctattaaaaccttccgaacttgatgattag

SEQ ID NO: 80079 - DNA, 2142 bp, Saccharomyces pastorianus
atggaaggaattttggatttttctaacgacttagatatcgctctattagatcaggtggtatctacattctatcaaggttcaggtgttcagcaaaagcaagcccaagagattttgactaaatttcaagataatccagacgcttggcaaaaagctgaccaaattcttcaattctcaactaaccctcaatcaaaatttattgccctttccatccttgataaattaattactagaaaatggaaattgttgccgaatgatcatagaattggaattaggaacttcgttgttggtatgattatctccatgtgccaagacgatgaagtatttaaaacacaaaagaacctgatcaataagtcggacttgactttggtccaaattttaaagcaggaatggcctcagaattggcctgaatttatcccagaactaatcggcagttcaagttcctctgttaatgtttgtgaaaataacatgatcgttttgaaactgctatccgaagaagtcttcgatttctctgcggaacaaatgacacaagctaaagctttacatttgaaaaattccatgtcaaaagaatttgaacagatttttaaattatgttttcaagttttggaacaaggttcttcaagctctctaatagtggcaaccttagaatctttactgagatatttacattggattccttatcgttatatttatgaaaccaatattttggaattattaagcaccaaattcatgacatcgcctgatacaagagccatcacattgaaatgtttgactgaggtttcaaatctaaaaattccacaagataatgatttgataaaaagacaaactgtactttttttccaaaatactctacaacaaattgccacaagtgtgatgcccgtgactgccgatctgaaagccacttatgcaaatgctaacggtaatgatcaatctttcttacaagatttagcaatgtttctaactatatatctcgctcgtaatagggcccttctagagagtgatgaatcgttaagagagttgttgttgaatgcgcaccaatacttaattcaattatccaaaatcgaagaaagagaactatttaagacgacattggattactggcataatttagtagcagatttgttttatgaggttcagcgtttgcctgctaccgaaatgagcccattgatacagttatcagtcggttcacaagctatctcaactggatctggcgccctaaatccggaatatatgaaaagatttccattaaaaaaacatatttacgaagaaatttgttcacagttgagattggtcattattgaaaatatggttagaccagaagaagtccttgttgttgaaaatgatgaaggagaaattgttagagagttcgttaaagaatcagacactatccaattatacaaatcagaaagagaggttcttgtatatttgacccatttgaatgttatcgatacagaagaaatcatgatcagtaaattggcaaggcaaatcgatggttccgaatggtcatggcataatatcaacactttatcttgggctattggttccatatctggtacaatgagcgaagatactgaaaaaaggtttgtagttactgttattaaagatttactagatttaacggtcaagaaaaggggtaaagataataaagctgttgttgcatcggatattatgtacgtcgtgggccaatatcctagatttttgaaggctcactggaattttctaagaacagttattttgaaactttttgaatttatgcatgaaactcatgagggtgttcaggatatggcatgtgacacattcattaagattgttcaaaaatgtaaatatcattttgttattcaacaaccccgtgagtctgagcctttcatccaaacaataattagggatattcaaaagacaactgctgacctacagccgcaacaggttcatacattttacaaggcttgtggtattattatttctgaagaaagaagcgtagcggagagaaatagattattaagtgatttgatgcaactgccaaatatggcttgggacactatagtggaacaatccactgctaacccaacattgttgttagattctgaaactgtcaaaattattgcgaatataataaaaaccaatgtagctgtctgcactcaatgggag

SEQ ID NO: 80080 - DNA, 270 bp, Saccharomyces pastorianus
atgaaaaggtatggattcaagggtttgagagcatctcatggtacatctattatgcatagacacggtggttcttatggtcaaaaccaagacccaggtagggtactgccaggaagaaagatgcctggtcatatgggaaacgagcatgttactatccaaaatgttaaagttttgaaagtcgacgatgaaaataatgttatttgggttaaaggctctgtggctgggcccaaaaacagtttcgttaaaattcaagatgcaatcaaaaaaacttga

SEQ ID NO: 80081 - DNA, 156 bp, Saccharomyces pastorianus
atggccttcacagccgctttatgtggaagaacaaactttttaataggtttatccaagtcggaaatatcccataagctacaagaattatcattgccgccgactgcaagcaggtttgcatgttcattcagagaaatacctgtagaaaatatttgttag

SEQ ID NO: 80082 - DNA, 210 bp, Saccharomyces pastorianus
atgtgttgtttcgataccctccatatactctataatattagatccataaatcccactctcttgaatttcattaattatttcctccttatcgttccacagttcataaaatcttatcgtttcatcgttagtggcaacgcaaattgccatggaacttggagagattactgcgctcagtacacgcaaagggttgggcgacctaacttcgagtag

SEQ ID NO: 80083 - DNA, 195 bp, Saccharomyces pastorianus
atggaacttggagagattactgcgctcagtacacgcaaagggttgggcgacctaacttcgagtagttttgataattttggatatgagtatagtgttattaatacaggattcttggtatcaccgaatccaaaagtagcaacaatctgtttatgtctcaacgaccatatcaaagacgtcacctgtcccgaggtgtaa

SEQ ID NO: 80084 - DNA, 114 bp, Saccharomyces pastorianus
atgtctacattatcagctttgatttcatgctctgcttgtccaaggctttctgtatttacagttgtagtctccgcttcgctaggttctgttttcacaattttgacagattcgtga

SEQ ID NO: 80085 - DNA, 2703 bp, Saccharomyces pastorianus
atggagatggaaatcgaaaactggtataaggaaattttgaatatagccacggtgaaagatgttcaaagaaagcatgcactactaagaaacttcagagaaaccaagatattcacatatctgctacaaaattcctcagaatcttttcataaaaatgtcttttctttgttgaaggagtgcttaacgacgctgtttttattactggtggctagtcctttggacgataactctctgcatattttctataaaagcaatcaggatcatattgatctgtcatattgtgacgaagatgatcaagtattttcacgaaaaaacgtatttcacgaggctgcaagttgtccagaaaaatcacgcttatttattctagatgaggctttaacaacatcaaagttatctaaagaaacagtacaaaaactactgaatgcccaagatatacattcgcgggtgccgctacattatgctgcagagctaggaaaactggaatttgttcactcgttgctaatcaccaatcttttagaggacgttgatcccattgatagtgattctaagacacccttggttttggctatcactaacaaccacatagatgttgttagggatctgctgactattggtggtgcgaacgcatcacccattgaaaagccaattctggattatagtaagaatgtaatcagctctactaaagtccagttcgatcctttaaatgttgcttgtaaatttaataatcatgacgccgccaagttacttttagaaattcggagtaagcaaaatgctgataatgccaagaacaaaagttcacaacacttgtgtcaaccgcttttcaaaaagaactcaacaggtttatgcactcttcatatagtgggaaaaattggcggcgatccacaattaattcaactattgatacgttatggggcggatcccaacgaaattgatgggtttaataaatggacgcccattttttacgctgttcgttcaggtcattctgaagttattactgaactattgaaacataatgcacgtctggatattgaagatgacaacggccattcgccacttttttacgccttatgggagagccacgttgatgttttgaatgcacttttacaaagaccattaaatttgccatctgcacccctgaatgaaataaattcgcagtctagtacgcaacgccttaatacaatagatttaaccccaaatgatgacaaatttgatttagacattcaagatagcattccggattttgctttaccaccgccaatcattccactaaggaaatatggtcataactttttggagaaaaaaattttcatcaaactaaagttaaggccaggtctcgagtctatcaagttgactcaggataacggcattattatgtcatcatcaccaggcagaattactttatcctctaacttacctgaaataataccgcgaaatgttattttacctgttagatctggcgaaattaataacttttgtaaggatatcagtgaaacgaatgatgaagaagacgatgatgaaattagtgaagatcatgatgatggagagataattttccaagtagattcaatcgacgatttttcaatggatttcgagatatttccttcatttggcacaaggataattgccaaaacaacggcaatgccattccttttcaagaaagtggcaataaatagtattgcaaccatgaatttacccttattcgacacaaggctaaataatattggatctctcactttggattaccaaattatttttccttatccgggaaatccactgaaaatcataaaatatgagccgtattggaaatctacaggaagtgatttaatgacctctagtaaagacggtaattttgttacttcttcatcgttgaatggcagtttcattagtgtattagtttgtgctctgaatgatgaaaccatagtggctgcgccaaaaccatacgttgaattcaaaggcacgaagattctgttaaatgatttaacgaaagaacaactggaaaaagtagtggattatgacttcggtaaaattgatggaagcttcgatgaagtaacattgaaacaatacttatcttcgagagtggtgtctctcagaagcctactagaagttattcccgggtcagtccagctggtaattcgtgtatattttcctacagataaggaaattgacacaattcccatcaaaatatcgccatttataaatatcaatcaattcattgataagcttttactaatcattttcgagcatgaacgttttttgcgtcacagcggaagtgggagtatgcgccaaatagttttcagttcatgcaattgggaagcttgctcgatccttaactggaaacaacccaattttccggttttgttgcaaatgaaaaatctgctcagagattcaaccacaggcaaatttgtaggtgatactcctaattgtttaaaggaactggccgtaaatcctcaaaaaatgtcgtatttaaacacggaactaataaacatacatacaatggttcaatttgctatgaacaataatttgttaggtgtaacgcttccatatgaagtactgaagatatgcccgtcgttggctaggatcatcaaacaaaacggactactgttgattgcatcggtcggggaaaatgaccaaataccagctgatgggggttacagcgggatctactacgcttgtgagttactttttgagaataatattgatatgtaa

SEQ ID NO: 80086 - DNA, 309 bp, Saccharomyces pastorianus
atgacaggttccgttttggcaagaagaagaacatggcttcttcgtgcaaccatgcccattatactggggtcttgttgttttgcgtatgcaatgccaacaaccttcaggaacaccatgggtctcatccataatctagaaatgaacacctttccacactttaccgaaagacaagatcgtgtttggaaagaaacaaagagattaagtaccgcgtctgtgcaatactactatgatgccaaaaaatggttgaacaaagatgtagaaaaaacagggaatgcaatcaaaaattggactggcgttaacgtgaagtga

SEQ ID NO: 80087 - DNA, 525 bp, Saccharomyces pastorianus
atgacaaaagatttttaccgtcagctagatcccgttgaggagaagattgttccaccagaaaacgctatagtaatttcttcggaggccaaagaggctactgttaatgagaaggaagccaagcaaggtgttctttcgcaaagggttatgaaatatattggagaaaatgagctggtagacggtatttcagtacgtgatcctgactacttgaagaggtttttcaacgaaagaagaaaacaattttccgctaaatgggacaaggtgacaaataaaatagatgatatcgcaggcagatattatgcccgtgaagagagctttacatcaacaattgctagtttacataccgatccaaacgagcgcctaataccggggttgttgtccattttggttgcttccatgacaggttccgttttggcaagaagaagaacatggcttcttcgtgcaaccatgcccattatactggggtcttgttgttttgcgtatgcaaatgccaacaaccttcaggaacaccatgggtctcatccataa

SEQ ID NO: 80088 - DNA, 84 bp, Saccharomyces pastorianus
atgaaatatattggagaaaatgagctggtagacggtatttcagtacgtgatcctgactacttgaagaggtttttcagtacgtga

SEQ ID NO: 80089 - DNA, 1974 bp, Saccharomyces pastorianus
atgttcaggtcaagaagaaggacttcagtgaggttgcctccccctccaaaagtatccgtgctaaaaaaatctcgaaaagctgctgatgaacagggccctattgatgatattgatattggtgatttggattttgagctggaaagaaaaatgaccaaaatgaccgaaagaaacactcaaaaaaattctggatcaaggaaaggctatacgcaagctgcatttgccaatcttaatgaagttgaagatagaattgagaccaagtcaatggtagatttatccgaaagcgaaaatatggagagctcaaagaaaaggtccaagtcgtttgccgggatgacagacgaagaattagccaaattagaggaattttatataagtaaaggaagatcgaacaagactaagatagatcaatttgattttggtgagcaagttccagtctatttgaacacaacagagtcaaaaacggattcaagcaacgtgacggaccctttagcagcaatttatccatcaaggcctacaattgttcacaatgcaatttcaatgacaattgatcatccagactatgaaaattatatttccaatacaaaagaaaagctcaattgcaaagacaaagatgacgatgtagatttaagagttgtttcgtgttatatatcaggtaggagatatacttggtcatctgtggactggtatgttgaaaatttggcaagaaatggtgatcatttagtcataattactacaattcctgagtttgaagcaaagattgatactctagcatataaggagaaaagaaggcaccgcttagaaaggatgactagcaatactagtgaaagcatgactaccgcgtcacatagccttataggcccggaactctctagtcctttatcaacgggaataagaatagaagctattcataatgaggctaagcaaacttgtagcgatattttaaattactacgcgagaagattggcaactaaaatagttaggattagtattgagatggtaaaagaagattcaacaagatcagccataatatctgcgacctctctgtataggccaagtttgcaagtaatcagcaccgttagtgccaacattcaaatcaagtttagaaatggaaaagtgaaactaccattttttttaatgaaacactttgcaatgccagcatttgttgtcccattcgaattcatcaagcctgagcttttaataaaacctagagtggataaagatgaacaggacaacaccgatgatttgaaaacggaagtgagaaaaaaggaacgattgcaatggctaagtgcattaatcaggagaactttggaaaaccctttcacgaaacataaagtggttgattcggatgatgaagaaagtgatagtgatgagtcaatagcctctgtaaatgagtacttcccaatctcacctgaaaaaaaggaagaaatggaattcttcgataagatgggatatgttagaccaaaaccgtcaagacaagtactattggatgataacactcttatgaagtacgacagttctggccgaaagctaactcctatagaatcgagaaattcgaggcgcagctcaaagcggagttcaagaatacaattcaacaataacggcatttataaaataaagtccatggttgatgacatttacaaccacgaaactgcctctacgcctcatatcaagacagcactaaaatgggacaatgaggatccgaaaatgaagttcacttcacatccaatgagaaaaacaaaatccgcagggctatcacccagaacatcctccacttcatcttcttcaggacagagaaaagcgcatcaccaccaccatcaccacaaccacgtttcaaggacgaaaactaccgaaagcaccaaatcaggcaacagcaaaaaggacagttcctcatcctcaacaaacgaccatcaatttaaaaggtctgaaaagaagaaaaaaagtaaatttggctcgatcttcaaaaaagttttcggatga

SEQ ID NO: 80090 - DNA, 255 bp, Saccharomyces pastorianus
atgtcatctgcaaagacatttactaagcatatctcgtttgatgatctggcaccttccttaattgatgaccaagctaccattattaaaaatgacagtcaccatgttggcttgaataatcattttttacatatacctccacaatttaatcctgtttacaaaaatactttgaccggtagccaggctctaatgaccttgccactgacgaaagcttggactcacccgaagacgaagaagcttcttcgccactacaactag

SEQ ID NO: 80091 - DNA, 1617 bp, Saccharomyces pastorianus
atgcttaaacttccccgtatgaaggagggcatacctcaagaacgctctggacattctgtaaccttaatgaagaatgagaagcttcttatcatgggtggcgacaaaactgactatgccagcccaaatattcacgatctacaaacttcagaaactgaccaaggcgaaggaactttactgtataccttagatttatcatctttgaatgagctatgcccaggaataatgtgtgaatcactacatgcaggagaaagtttttctaatagtctttccgggggctttacaccctctaagtctactgaaagtgaaaatcaagagataataaacattcttacaccaagattgcctgatagcaaagttttgagttataatgatattgatgaaggggctggaagttactccagcgctttggatgataaggcatttgaacgaaaatcagatagggaggaaaagaaaccccaatcttccaaagttgattcaagcatcaataaggaaagtccgggaactggtatcaaagtatctaaaaaaaatttccctgttctacgaggactagcagtggattcagaagagtatggctcttcttcatataaggacacatcatgtcaaaaaggaattcccaaaaatctttttgatgatttaaacctgaacctacaaacattacgtctcgaagctcaacaaaaggaacttgaaactgctagacatatttcagaattagaaaaggaagtccagagactcatggtaataaaagaagcttcaaaagattcaaattttcaaacagcacggcttaaaaatctagaaattcagaaaacctttttagaatctagaattaatgatttaaaaaacttattgatggtcaaattatctcaggcaagtaaactctgtgaccaaattacgattcaaaataatggacttaaaacatgctccgaacatgtcactattaaaagggatatcatcgatcttgagaataaatgtgatgttttgaagcgccagaacgaaatacttgtaaataatatgcaaaaaataacccccgaacttcatacctatttgaacgaatcgtcctgctatctgggtaaattattaaaaagctatcctaccagtgcacggccaccttcaagtgagaaagataatcaaatatatgagaaagattcgctgaacaaaatagaaaaagtaataaatgaaatgcacgaaaccgtgcgtgctaaagagaaattgcaccttgaaactcagaagcttaatgatgaaagagattctttgcgggctaatttactcgacaataacaacaagttggatgcgctaagaaaactctctgatggaagctcgaagtctatggacctaacaaagaaggctattcacctatcacaatccgagctcgaaaaatatcgtaaaaacaacgacgatttacagaaggagattgatagaattaaaactgaacaagctgaacaggatgacaagcaggagcagcgtggcgccatcactcatggaaattttgatgcgttccacagaatgaaaatcaacaatctgaaagcggaactgtatatgtcgaaagataatagagattccctcaaggacgaactgctagctttaaaaaaaaaactatatactctcgaacaaaaaaaatag

SEQ ID NO: 80092 - DNA, 1089 bp, Saccharomyces pastorianus
atggtacctttcaagctgacaaataaggtacctacggacacgggaccttctctgatttcagcgcaaagtgtacccagaccaatagtttttatggataatcgaaacaatacgcgaatagtaacacctacgctacctccaaaccagcatagaggcatatcaggcgcgtcgactgctcttccctggtctccagagagtaagaatgcagggaagtatatttggaatagggtcaaactaaaaaactctccgtttccccgttatcgacactcttcctcatttattgttacgaatgataacaggatttttgtgaccggtggacttcacgatcaatcggtatatggggatgtttggcaaatagccgctaacgcggatggtacgagctttacttccaagagaatcgatattgatcaaaatacgcctcccccaagggtgggacatgcctctactatatgcggtaatgcctatgttgtgtttggcggcgacacacacaagctgaataagaacggactgttggatgatgatctttatcttttcaatattaattcttataagtggaccataccacaacctatcggccgtaggccgttgggcaggtacggccataaaatttctataattgctagcaaccctatgcaaactaaactatatctttttggcggacaagtagatgaaacttattttaacgatctggtcgtctttgatttatcatcattccgtaggccgaattctcattgggaatttttagagcctgtcggcgacctgcctcctcctttaacaaatcatacaatggtggcatatgacaacaaattatgggtattcggcggggaaactcccaagacaataagcaatgatacataccgctacgatccagcacaaagcgagtggtctaaagttaaaaccacaggagaaaagcctccgccaatacaagagcatgctagtgtggtgtataaacatttaatgtgtgtgtttggcggtaaggatatccataacacatattccaacgatgtctattttttaaacttattatcgctaaaatggtataagcttccccgtatgaaggagggcatacctcaagacgctctggacattctt

SEQ ID NO: 80093 - DNA, 156 bp, Saccharomyces pastorianus
atgcgttctactaccaacagagaaaaagaaagaaggaagaactttgttatgtctattcacaagagatctgttagaggtaaacaaaaaatgtcactacgagacaagcaaaaagtgttacgtgcacacatcaccaaacaaaagaagaaggggtattag

SEQ ID NO: 80094 - DNA, 156 bp, Saccharomyces pastorianus
atggaagacttcatatatgatgccagattggtgtttaacaattgccgaatgtacaatggcgagaatacgtcgtattacaagtatgctaataggctagagaaattcttcaataataaagtaaaagaaatacctgaatattctcaccttattgattaa

SEQ ID NO: 80095 - DNA, 384 bp, Saccharomyces pastorianus
atgtctcgaccattcggggttgccttgttaattgctggccatgatgcggatgatggttatcaacttttccatgcagaaccatctgggacattttaccgttataatgccaaagccattggttcaggctctgaaggagcacaagcagaattattgaatgaatggcattcttctttaactttgaaagaagctgagcttcttgttctaaaaatcctaaagcaagtgatggaagagaaacttgatgaaaataacgcgcaattgagttgtataacaaagcaagacggattcaaaatatatgataacgaaaaaactgctgaattgataaaagagttgaaagagaaagaagctgcagaaagtccagaagaagcggatgttgaaatgtcataa

SEQ ID NO: 80096 - DNA, 213 bp, Saccharomyces pastorianus
  modified_base (205)..(205): a, c, g, t, unknown, or other
atgttcttaactagaagtgaatatgatcgtggtgtaagcacattttccccagaagggaggttattccaagttgagtattctttggaggccatcaaattaggatctacagcaattggtattgccacgaaagaaggtgttgtactaggtgtggagaaacgtgccacctcaccactgttagaatctgattctattggagaaatcgtgngagattga

SEQ ID NO: 80097 - DNA, 660 bp, Saccharomyces pastorianus
atgtacaatgcggtcctttacttggcaaaatatgatgacgaatttgatattagggatagagccaggatgatttcatccttgtttgattcagggaaatatgaaattgtgtcactactattacaagcacctaaacctacggcaagaagtgacgattttatcgtttctgcaagattggaaacacataccccagaaataaaagaattttttagaatgcttccttggaatactgaaattactgaggttggcgagacaggtaacgatattagagaaggcgcagaattgaaagactataacaaatacaaaaaaagtttttcatcccagtcttttattaccaacaactcagcaagatctttcacatctagctccaacgcaaaattgactgggatcaatgacggcgatagcaatagcatctcaggtaaaggtaacgtaaacaccttcacatctcaaaacgggaagaaatatcgtttgcaaagcctggacgagtttttttccgacattccagaaaggaagagtaaaccaaggaaaattataaaggtggtggaagaaagcagtgacgaggatgaagacgaatcggaagagagcagtgacgatgatgagtatagtgactcttctttgggaacgtcttcttcgggaacgtcttcttcgcatctggaactttag

SEQ ID NO: 80098 - DNA, 336 bp, Saccharomyces pastorianus
atgttggctggaaaagtttttggaaacattttttttttttgcgggcataaaataaaaactccgctgttcatcgcttcctacgcaatgttcttagccaagcaaaaaattatagttacaatgtttgaggtttcttccattctagagaaactgccgcagaatattttactgtttcactaccctcttccttccaaaatgggaaataatttattaatgtcgttcttaacacaaagatcgatcgatgaaaatgaaattgatgcattattacatcctaatgcggtctatcgtttctgcaatatgagaaccacattcagaacattatcctcatatggcaaataa

SEQ ID NO: 80099 - DNA, 165 bp, Saccharomyces pastorianus
atgcatttgtatagcatagccaagtcaacaacaatactgcgttttctaaggcatattttattgccatttttgcatctctctattcattttactagttgcttgtgcagaataatctatgttggctggaaaagtttttggaaacattttttttttttgcgggcataa

SEQ ID NO: 80100 - DNA, 741 bp, Saccharomyces pastorianus
atgaaaatacccacggaccaagcttctctgatcaactacaagacaaaatacgactcttttcttcatgacctacaaacatattccgcactggtaatttcagaaatgaaatggaaccaattttctattttccaaaatgatgaaacgactttatcaagatttgaacacatcacattaattttgcaaaccgtgctgacaaaatcgaaaatgattagaattttccagccaaacttgtacaagtttatgcaagatgatttaagaccaactttaatggagttggtgggtttcactgagtcaataaatgcaacaatagaacctggttttgcgaatgaacaatcgctacaatctgcaaacggattaaagaaattggccaaccaacttttatacttcgaacaggaaatatatggcgaaaagttccgcgtaaataggcccatccagcttcgtccaataacattatcagcaaactacaaaattgttattctggataagaagaacgccatacccgaaatatttcaaaccctactgaaattcatgacacaaataacgacatattttgttaaagatttgtcggaggtagaacttcatgggcacatgcattgtattgataaaaaaatgctggacaagtcaaaattcatgtatttatacgaagagaaaagcaacgaggaagtgaaagcagcttctgctcaaaaggagaagatagtagataatatcattggcctattatcaaatgatgaagaacattaa

SEQ ID NO: 80101 - DNA, 1074 bp, Saccharomyces pastorianus
atggtgaattggcaaacattgttcatggtctcattgaggagacagggcagttcctctcgttacaggtataagttcaatatggagaatatcacacatcaggtgttccctcgctgtaagcaagcgtttaagaagacaaacttatcttatgagtattgtgatctcgaaggagtactgtataatatttcactcacagacttgcaaaaactgctattacgtgatataaacgcccctcgtgaacacgcattcaagattgttagaacagatctaactcaaaaatcctcgaagaagaggatccaacactgggaacggattgcgcctatgtttgaccaccccttaagtctctacgagaagttgttcagcgaaatggatgaggacttcaagccatctttcgagtggcaacaattaataagggtacgatgcaaagatgataagttgaaactgcagcgtgtaatttggcctaagtcgatattttcaaacttttgtcggggaatcggggttaagaagaacacttacgatagactcttggaacaaaataatggtgaggtacccatgtttgtaaacccagctaatgcaaagcccttgcctcttttccaggtttccgatgaggcgatgattggggaattcgatggcattggtattttcccttactttgtagataaacatagagaatttttcgttactgaggtagacaaattgaagaccaagatagcctcgccactttgcaccttgaatgaacgaaagcgcattgagaaggctaacgctggtcggatactggcgaacgaagagggtaaaccattctatctggatgcaaacagtgccacaactcgaatcgctgatggtaatgtcgtcactttgaagcaacttttagaaagatcggttagccataagacattgtggagcaaacaatcaaacaaagacagaacgtgccctggagacattttaagagctacaatattatcaaacgacttctccatccggcaattaagggctgaattttgcaacaatttcattctctacaatatctttaccattttacaacgtaaacaagaaaagcatccgttccttctctggtaa

SEQ ID NO: 80102 - DNA, 135 bp, Saccharomyces pastorianus
atgccacatggatgcgcatgccataacccttgcatggttagcacacgccctcacgtgagtgaatttgccaaaatgatagtcaaatgtgttgatagttcgataagaggtgaagttggggaactaaaggtggaatag

SEQ ID NO: 80103 - DNA, 321 bp, Saccharomyces pastorianus
atgattgatttgtcatatatatgcagcgacgccacagttttttccggcaagagtcgcgtgatctttttttctaatccaatctgtgaacatactagaggaaacttctaccttttctacctgaattacattatcaacacttttgcaccaaaaaattgtggtactaggagatgcaaaccttttggtctccacatcaattgcagaaaaaagattgactgtttgcatgtgcaattatcttatatattatgtaaaaataaaagtaggaaatgccacatggatgcgcatgccataacccttgcatggttagcacacgccctcacgtga

SEQ ID NO: 80104 - DNA, 3357 bp, Saccharomyces pastorianus
atgataatagttgttgtaggactacttttcaactttttaggtgtttcagcttttgcaggaatttcaattatcttagtgatgttcccattgaatttcttgttagcgaatttgttaggtaagtttcaaaagcaaacactgcaatgtactgaccaaagaatctcaaaattgaacgagtgcttacagaacataagaattgtcaaatattttgcttgggaaaggaatattataaatgaaatcaaatcaataaggcaaaaggaattaagatccttattaaaaaaatctttggtgtggtccgtaacttcttttctttggttcgtgacaccgaccttggtgacaggtgtcactttcgccatctatacatttgttcaacatgaagatttgaatgccccgcttgctttcactactttgtcactcttcactttgttaaagacacccctggatcaattatcaaatatgctaagtttcataaatcaatcaaaagtctctctaaaaagaataagcgattttttaaggatggacgatacagaaaaatataatcaactaaccatatctccagacaaaaataaaattgaatttaaaaatgcgactttaacctggaatgaaaatgacagcgatatgaatgcattcaaattatgtggtttgaatattaaatttcaaattggtaagttaaatttggttttgggttctacaggatctggtaaaagtgcattgctgctgggtttactgggtgaactaaatctaattagtggctctatcattgttccgagcttagaaccaaggcatgatttaattcccgactgcgaaggtttaaccaattccttcgcatattgttcacaaagtgcgtggctattaaatgacacggtaaaaaacaatattatctttgataacttctataacgaggataggtacaacaaagtaattgatgcatgtgggctgaaaagagacctgaagattttaccagcaggtgacctaacagaaattggtgaaaagggtataactttatcaggagggcagaaacagagaatttccttggcgagagctgtttattcgagtgctaagcatgtcttactagatgattgtttgagcgctgtcgattcacatactgctgtatggatctatgaaaattgcatcacaggtccactaatgaaaaatagaacctgcattttagttacgcacaatgtttcattaacacttagaaatgcccatttcgcgattgtgttggaaaatggcaaagtgaagaatcaaggaactattacagaattacaaagcaaagggctttttaaagaaaaatatgttcaactttcttctcgagatagcgttaatgaaaagaacgctaatagattaaaagctcccagaaaaaatgactctcagaaaatcgaacctgtcaccgagaacataaattttgatgcaaattttgtgaatgatggccagctaatagaagaggaagaaaaatcaaacggtgccataagcctcgatgtttataaatggtacctgaaattttttggaggcttcaaagctttaacagccctgttcgctctttatatcacagctcaaattttgttcatcagtcagtcttggtggatacgacattgggtcaacgataccaatgtacgaataaatgctcctggttttgcgatggacacgctgccattaaaagggatgaccgactcttcgaaaaataaacataatgcattttattacttaaccgtatattttcttattggtatcattcaggcaatgctaggtggttttaaaacaatgatgacgtttttatccggtatgcgagcctccagaaagatctttaataatctgctagatctagttctacatgcccaaatacgatttttcgacgtgacgccggttggtagaattatgaatcgcttttcaaaggacatcgaaggtgttgatcaagaattgattccatacttagaagtaactatattttgcctaattcaatgcgcatcaattatatttctcattaccgtaataactcctcgctttttgacagtcgccgttatcgtttttgttttatatttctttgtggggaaatggtacttaacggcaagtagagaattgaaaaggttagattcaataaccaaatcacccatttttcaacatttctcagagaccttggtaggcgtttgcacaattcgtgcatttggcgacgagaggagattcattttagaaaatatggacaaaattgaccaaaataacagagcattcttttatttatcagttactgtcaaatggttttcttttagagtcgacatgattggcgcattcattgttttagcatcaggttcttttattctgctcaatattgcaaatattgactcgggtcttgccggcatttctttgacatatgccattttgtttacagatggtgctttatggttagttagactgtactcaacattcgaaatgaacatgaactctgttgaaagactaaaagaatattctagcattgaacaagagaactatcttggccatgatgaaggccgtattctacttctaaacgaaccatcgtggccaaaagatggagaaattgaaattgaaaacttatctttacgttacgcaccaaatttgcctcctgtcataagaaatgttagtttcaaagtggatcctcaaagtaagattgggattgtcggaagaactggcgcaggcaaatctaccataataacggcattattcagattactagaaccaataaccggatgtatcaaaatagatgggcaggatataagtaaaattgatctcgttacattacgtcgttccattactatcatccctcaggaccctattctatttgcaggtacaatcaaaagtaatgttgatccatatgatgaatatgatgaaagaaaaatattcaaagcactttcacaggtaaatctaatttcttcacatgaatttgaagaagtacttaactcggaggaacgctttaacagcactcataataaatttttaaatcttcaaacagagatagctgagggcggcttaaacctgtcccaaggtgaaaggcaattgctttttattgcacgatcattgttacgcgagccaaagataatacttttggacgaggctacttcctctattgattacgattctgaccatttaattcagggtattataagaagtgagtttaataaaagcacaattcttactattgcacatcgtttgagatctgttatcgactacgacaggataattgtgatggatgccggtgaggtaaaagaatatgatcgccctagtgaactgttgaaaaatgaacgcggtatattttatagtatgtgtcgtgacagtggggacctagagcttttgaagcaaatagccaagcaatccagtaagaggatgaaataa

SEQ ID NO: 80105 - DNA, 315 bp, Saccharomyces pastorianus
atgggttctggtgaacagtattgtaaccttcttcccacaattttaatgaaaagatttttagaaattgtggataacccaaaccgttcctcatcatgcatgaatttggcgtggctttatattattggtatgttcatttgtagattgacattagcaatttgtaattcccaaggtcaatttgtttctgataagatttgtttaagaataagagccatactcataggagaaattatgcaaaaggcttacgtaggaggctgtttacatctccaaaaaccagctctgattcagatagtatctccgcaaaccttggtaccataa

SEQ ID NO: 80106 - DNA, 1074 bp, Saccharomyces pastorianus
atgggaacggatccccttattatccgaaataatggttcattttgggaagttgatgattttactcgtttaggaagaactcagctattgagctactatttaccattggctatcatagcctcaattggcatttttgcactttgtcacagtggattatctcgttatgtaagatctgccgagtccgatttagtgaacgaatatctatttggcgcacaagaagagagaaaagaagataatagtatagaaagacttctacggaactcaaatacccaagccaattacgtcaacgtcaaaaagcaaggaaggattttgaaacttagacattttgatataacaactatagatgtcaagcaaatcgatgctaaaaatcatggtggactaacgtttagtagaccgtctactagtgaccacttaagaaaatcatctgaaattgtattaatgtctttacaaataattggcctttcctttttaagagtaacaaaaatcaatattgaattaacgaacagagatgttacaactttactattattttggttaatactactttccctaagtatcttaagagtttacaagcgttcaacgaatctttgggccatctgttttactgcccatacaactatttggatttcaacctggattccaatacgttcggtctatattggtaatatcgaggatgtaccctcacagatattttacatctttgaattcgtaattacttcaaccttacagctaataaagctcacttcaccaattaaagacaactcatccatcatctacgtaagagacgaccatacctctccttcgagggaacacatatcctcaattttaagttgcattacttggagctggattaccaattttatatgggaggcccaaaagaacactattaagctaaaggatatttggggcttatcaatggaagactatagcattttcatcctaaaagggtttaccaggagaaacaagcacattaataatttgacgctagcactgtttgaatctttcaaaacatatttactcataggaatgttatgggttctggtgaacagtattgtaaccttcttcccacaattttaa

SEQ ID NO: 80107 - DNA, 90 bp, Saccharomyces pastorianus
atgaagattaacacgagaaggaagaaaaacgcgtttgtattggccacgataaccaccctttgtatactgtttttgtttttcacatggtaa

SEQ ID NO: 80108 - DNA, 1083 bp, Saccharomyces pastorianus
atgcctttgattttcatagcatgcaatgatgaagataaagatttggaaaccttatataataaaatctggacggaagcttccagctctggcgccggtacggttaaattatacctgccagaaattttaaacgtactttgtgtgaatataaagtcgaatgatttctctattagaaaaacatgtgctaaatcagtcatacagttgtgtggcggtattaatgatagtattccttatccacaaattgttaagttatttgatatatcgagggaggcattaagtggtagatcatgggatggtaaagagcatatagtggcagcattggtttcattaacagaaaaattttctcaaactgtggccgacaataatgatctacaagaatcaattaatcatgtaatgtacactgaagtttcgagaaaaagtatgaaatatgttaagaagatactaccgctttacgcgagatatatcaatgtgaatccacaagaagagacgatcaccttcttaattgaaaaagccaaagaaatgattcgattgttgggcagcgaatctgatgacagtgaaggttccattaagcagacttccgatgaatccacaataaaaagaattaagcctaacactgaaattacacaaaagtcatccaaagagaacgttgagaacgaagagtatgtgatcaacttgttaaaagttagtgttgacatatgcaacaattctaaatcgaggtatccgatgaatttattggagttcattatagatgagattgcataccttttccataatgacagaattatacacacatggagaacgcaactagctgctagtgaaattggtatctcgatagttggaagatttagtaccataagtagcgctgactttatccaaaatgtggggagactatgggatcaaacttttccaataaattgtaacaaggaaaccattgagaatgtgaaattgcagatgataaagttcggtggcctgatcattcagaagattccaagcttgcagaacaatatcgaggaaaacttacggttgttgaacagtattgattcaacgagcagaattgagttggaattgaaaaatattggtctatga

SEQ ID NO: 80109 - DNA, 2925 bp, Saccharomyces pastorianus
atgtccatttcttctgacgaagcgaaagaaaaacagctcgtggagaaggcagaattgcgcctggctatcgcagattcccctcaaaagttcgaaactaatctgcagacttttttgcctccattattactaaagctcgcctctccacatgcctccgttagaacagcagtattttcagccttaaaaaacctcatttctaggataaatacgctgccccaggttcagcttcctgtgagggcgcttattgtccaagcaaaggaacccaatttagccgctcaacaagactcgaccaatgtccgcctttacagtctgctactggcgtctaaaggcatagataggctttccttgcaagatagacagcagttgctaccgttagtcgtttcgaacatctcgtgtctaacaggcacagtagccgccagaatgttccacatccttttgaagcttattttggaatgggttgcaccccaggagtcttcacatgagcaggaagaatttgttcagttccttcaactggacaacgacggtttttcgtttttgatgcgccaatttaccaggttttttctgctggtaccttcaaagcaagtccaggtttctcaacagcccctgtcgagaggttacacatgtccgggcctatctctaactgatgtggcattctttacttatgatgcgggcgttactttcaacaaagaaccgctgaataagttcaaaaaggctatttttcaatttgtttgccatggcatggcggctacccaaactattgagcagtcacctaggatgattgaactgatggaatttttgtgcgttgtctctacggattccacaaatttatctgatgatgcggctcagttcatgaaacggtttcccatgccttatgaaaacgaagagttcatcacctttcttcagacgctgtacatcggcaacacagcaaatggaagaccgccggtcaaggctatcttgcaagaaaaaatcctgtccatattaaacagaagtcacttcgccaccaccaaagcagaatgtatttcgttgatttgctctattggattgcattcatctgagtataaacttagatctttgactctttcttttattcgacacgtagcaaaattaaattacaaaaatttaaatcctgcttcttcatcaccttcatcaacagacttttccactagtattgtttccttgattagaaataatcttcatgccgaaggttggccgaagttacaattggggccccagaccccagctttcaatacagccattctgcagagacagctgcaatatgaaacattgggtgatatcttgaaaagagattttgagcttgtaagtgacttatcctatattgaatttctattcgagtccttgaaaaatgacttaccacagttccgctccagtattcaggagtctctgctttctctagtaggccatttatcaattctaccccaacaatctaaattaaaattaaaaaatttgctcaggaaaaacctgtcaattgacgagcaacagcgggaggataataatgatgctgttaattctataatggcactcaaatttgtatctataaaattcactaacgctgccttccccttccatgatcctgaggcaaggttattcaatatatggggtactgtacgaacaaatagatttgacattattgaagaatcctttaaggggcttcaacccttttggttcagggttaataatgcttccataaatacatcagctaccgtgaaaacatccgatctgttgggctctcacttgtcagagactgaatttcctccattccgggaatttcttcaggttttgatcgaccagctagattcggaagctgcatcaattacacgaaaatcactgaacaatgctgtcagatttagtaaacaatgtctcatttccaatgcaatatacggtaaaaaaacaatggttatacaagatgaggattggtcagttagaatagacaaagctttggaacttgacgacacagttgtgtcccgagttaatgaaatggttcaaggcatgaatgatgatattttcattcgctatttgactcttctgtcaaacgagtttacagctacgaacagtaagggtgaacaaattgcaatatttccatatcaagatccaatttttggttctgtcttattaactttattaaattttgtgagcaatgatgttttacggagattggaaattcttgttcccgatttataccatctagttatcatgaaatttcaatcgttgagtgataatgatcttgcagtctgtgcaaccatcatcggtataatttctactgctatcgcagactcgactcacgttaagcgaatcacaaaaatagcacaatcacaaacaatggcagagacatatgttgcatcttatgttgttccacgattatatttgaaagatcaaacaaatcacattgaatctgacagtatcctaaacctattaaacattttaacaactcatctatcgcatcctggcactaacaaggatatgatattaaagttggtctgccaagtgacaaaattcggtttacttctccaagtaagtgcacaagaaaggaaagatttcttgaaaaaagtcatggatactatacaagacaaattgatcaacgatgtgacagcaattcaaacgtggtcatacctatcactatattcaacagatttagagaattccagtctttttcaagaaaaattacttgaaactaacgtttctaagcaaaacgatttcttattttcagttggtgaatctttaagtgttgtggctggtaaatggtcaagtaagtacttgatcaaacagattgatattcctaatttcaatgttgagatcatgcaacaaaaattccctgctacaaatgttaccactatacttgatgagatcttttcaggttgcgactctacaaaaccctctctgaggaaggcatctagtattaggctgttatca

SEQ ID NO: 80110 - DNA, 2472 bp, Saccharomyces pastorianus
atgatattaaagttggtctgccaagtgacaaaattcggtttacttctccaagtaagtacacaagaaaggaaagatttcttgaaaaaaatcatggataccatacaagacaaattgatcaacgatgtgacagcaattcaaacgtggtcatacttatcactatattcaacagatttagagaattccagtctttttcaagaaaaattacttgaaactaacgtttctaagcaaaacgatttcttattttcagttggtgaatctttaagtgttgtggctggtaaatggtcaagtaagtacttgatcaaacagattgatattcctaatctcaatgttgagatcatgcaacaaaaattccctgctacaaatgttaccactacacttgatgagatcctttcaggttgcgactctacaaaaccctctctgaggaaggcatcttgtatttggctattatcatatattcagtacttaggtcatttgccagaagtaagttccaaatgtaatgatattcacttgagatttatgagatttttggcagacagagatgaatttatacaggattccgccgctagagggctttctttggtttacgaaattggtggttctgatttaaaagaaagtatggtcaaagggctacttaaatcatttacagaatcaaccgcagggtctgcatctacaagtgctactggcatctcaggttcagtctccgaagagaccgagttatttgagccaggagttttaaacactggagatgggtccattagcacttacaaagatattttgaatttggcatctgaagttggggaccccgcacttgtttacaaatttatgtctcttgccaaaagttctgcgctatggtcatctaggaaaggtatcgcattcggtcttggcgccattatgtctaaatcttctttagaagaattattactaaaggatcagcaaactgccaagaaattaattccaaaattgtatagatacagatttgatccatttcaagcagtatcacgctcgatgacagacatctggaatactttaattccagaatcctctttgacgatttctctctatttcaatgatattcttgatgagcttttatgtggcatggctaataaagaatggagggtcagggaggccagtacttcagctttattacaattgattcaatctcaaccgcaagagaaattttccgaaaaaatgctgaaaatttggacaatggcattcagaacgatggatgatataaaagatagtgtccgtgaagttggtaccaagttcaccactgtattggccaaaattttggcaagatctattgatgtggaaaaaggtgtgaatcctaccaagtctaaggaaatactagacaatattttgccatttttattgggtccacatggtctgaacagtgatgcagaagaggttagaaattttgcgctcacaactttgattgacttggtgaaacactcccctggagccatcaaaccgttcactccaaaattaatttacgattttatcacattgttttcttccattgaacctcaggtgattaactatttggcattaaatgctgcaaattataacattgatgctaacgtcattgatacgcaaaggaaaaatggtgtcacaaattcacctctattccagaccatcgaaaaattaattaacaattcagatgattgtatgatggaagaaataattaatgtggttattaaagctagcagaaaatcagtcggattgccatctaaggtcgcatcctcacttgtcataattatcttagtgaaacggtactctatcgaaatgaaaccctattctggaaagttgttgaaagtctgcttgactatgtttgaagatagaaatgagtcggttaatatagcatttgcaatttcaatgggatatttattcaaggtttcagcgttggataagtgtattaaatactctgaaaaactaataacgaaatattttgagcctacctcaacagaaaataacaagaaagttgttggtacagcgatcgactcgattttgaattatgcgaagtcagaattcgataatgtggcaagtgtatttatgcctttgattttcatagcatgcaatgatgaagataaagatttggaaaccttatataataagatctggacggaagcttccagttctggcgccggtacagttaaattgtacctgccagaaattttaaacgtactttgtgtgaatataaagtcaaatgatttctctattcgaaaaacatgtgctaaatcagtcatacagttgtgtggcggtattaatgatagtattccttatccacaaattgttaagttatttgatatatcgagggaggcattaagtggtagatcatgggatggtaaagagcatatagtggcagcattggtttcattaacagaaaaattttctcaaactgtggccgacaatagtgatctacaagaatcaattaatcatgtaatgtacactggggatcctctagagtcacctgca

SEQ ID NO: 80111 - DNA, 1656 bp, Saccharomyces pastorianus
atgtcaccaggtagcacttcttcatcatgcttaccatatcatagttcttcacacttgaacactcctccatacgatctattgggcgcttcggcagtttcacccaccacaccatcttcctctgactcgtcctcctcctctccattggcacaagcgcataacccggcaggtgatgacgacgatgcggataatgacggtgattctgaggatataacactatattgtaaatgggacaactgtggtatgattttcaaccaaccagagctgctatataatcatctgtgtcatgaccatgttggcaggaagtcacataagaacctacaattgaattgtcattggggagactgtaccacgaaaacggagaaaagggaccatatcacctcgcatttgagagttcacgtaccattgaaaccgttcggttgctctacgtgctccaaaaagttcaaacgtccgcaagatttaaaaaagcatttgaaaattcatctggaaagtggcggtattttgaaaagaaagaggggacccaaatggggctcaaaaagaacttctaagaaaaacaaaagttgtgcaagcgacgcagtgtcgtcttgttctgcatctgtgccttccgctatagctggtagctttaagtcacattctacttctccacagatattacccccattgcccgtgggtatatctcaacatctgccttcacaacagcagcagcgggctatttccttaaaccaactatgctcagacgagctatctcagtataagccggtatattctccacaattgagtgccagattgcaaacgatcttgccgccattatactacaataacggcagcacggtaagccaaggtgccaacagtcagagcatgaatgtctacgaggacggttgttctaataagaccatagcaaacgccacccaattcttcaccaaactatcgagaaatatgacaaataactacattttgcaacaaagcggtggtagtactgagtcctcgtcatcatctgggcgcatccccgtagcacaaacaagctatgtgcagccacctaatgctccttcataccaatccgtacaaggtggtagctctatttcggccactgcaaatacagcaacttatgtgccagtacggttggccaagtatccaactggtccttcgcttactgaacatttgccacctttacattcgaacactgccggtggtgttttcaaccgccaatcacagtatgctatgccacactatccatctgttcgtgctgcgcctagctattcctccagtggctgttctatattaccgcctctacaatcaaagataccaatgttaccatcgcgccgtacaatggcaggtggaacttcattgaagcctaactgggaatttagcctgaaccaaaaaagctgtactaatgatattatcatgagtaagctggcgattgaagaagtagatgacgaaagcgagatagaggatgatttcgtagagatgttgggtatagtgaacattatcaaggactacttgttgtgctgtgtcatggaagatttagatgatgaagaaagtgaggacaaagatgaagaaaacgcattcttgcaagaatctttagaaaaattgagtttgcaaaaccaaatgggaactaactcagttcgcatcttgaccaagtatcccaaaattctggtatga

SEQ ID NO: 80112 - DNA, 948 bp, Saccharomyces pastorianus
atgaaatcctcagagccagcgccagcgaccccgaccgggttcagaaattccatctggttcatcatcttctaccttttcgtcatccaagcgctaggttctgcaataatctcgggcggcatcgagtttgccatcgcatatgccatgtaccattcccgtgtagatcttatcaccttatgggcatttcctcacaccatttcaggcgattgtgcactaagtttattcatccaggtgggtcttacatgggctagcgaggaaattttagttggattcgatgactacaagaggcctgttttcagattgaataaatggattacgaaaccgtcaccactgaaaaccgaatctaacgaagaaataccaccccctaaaaagcgtttcattgtggattacttcgaatccgaagacaacgtcgttgcgaagcagaacactctgtatcataagcataattggctctttggctatttagaggtcaatagaggaatcattcccaaaggtaaagaagctacgttgaaaggttttctcacatctcagttcattcatgattctactcagtccaaattcatgaactttatagaatggtttgtgcagaaattcatcagatctatgatcctagccattgccatgttcattgtcatttggccagtcactatgggtatccttgctggtataggccataaggtcgggtcccacgactactacttcaacgattatccactaccgcaggtcatgaagttgatttatgccgttgtaattgcctttgtatgcactccagtggccatcatcgtcattgtgttgagaaaccagtttcacgaggaactttactatgaaggcttggcaaacggtacgctacagcaggatcaagaagtttgctccacgggtaatcgcagctcgggatcaaccgatcaagatatcagtactaccaaacaacagtctcaagaagcggtagcgtga

SEQ ID NO: 80113 - DNA, 645 bp, Saccharomyces pastorianus
atggtgaggttgaaagattttgaaatcaaacctaaactgaagaagtttaaaatccaaattgtaaccaaaattcaaacaaattttaaacccaccaactcaacgtcgaagctaaacgtgagaattcccctgacaaaagtcttccaggaatataaaatagacctcagcaagcaaattagattcaaggcaaacatcggcaaggtcgtgtttaacttgagtgacgattttctcctctgggagatacaaaccatgaaggggcaccgagaacatagcacaaacaagagctcacagtacaacagtgacgaagatgatccaaatacgtgtgcatccatggtggcagagttccccctctttaaccaggaagaatatgaccgcctgcaagaagaaatgaaaacctcaatgaatccaccgcccttgcgcacgggacccaggctggaagaactatatagacaagtgcacgaccaacaaacttcccacgttactcctcgagataagttggtcaacattgatttcgagattccgtactgtacatgcagtggcctgaaagttgagtacttgaaggtcgaagagccacaattgcagtaccagtctttcccctgggtcagatacaagaccgtcagcgacgaagagtacgcatatattgtttga

SEQ ID NO: 80114 - DNA, 1149 bp, Saccharomyces pastorianus
atgtcgtcaagcctttttatcctggatgaaaatctggagccattggtatcgaagaatattagagcactaccgaatctatcgtcggttctttcaagtttcaaacaatgttatcatgacgggtcgcctccaattctctcccaaaacgattggttctttatacatttgaagagagactttctgcatttcgtttcagtgatacataccacagacaaaccaaatatagacttaatgactatactagcctttttggaacaattttatcatcttttacaaaaatattttgaaatcgaggtcttaactaagaatgtcatactggacaacatcttacttgtcctggagttgattgatgaatgtatagactttggtattgtacaagtgacggatccaagtatcatcaaggactacattcgtgtgaaggtcaacgtaccaagagttacagtagacaatgaggagtggagccctggtgaagagagcagtagtagtagcggtagcgatagcgatagcgagtacagcaatactaataagaggaaggataagaagaagaaaaggaagaagaaaaagggcactaaagggaaaagcgtgggcaaaagtaaattaaaaagtataatggtaaacaataaagaaaataggggcataaacgtggtggaaactgtcaaggagacactaaggaacaagaatgataccggtaaagaagccgctaatgacgagctccccaatgacggtaatgatttatacatcaatggcgatattgcgaagacgattataatgcccatatcatggagaacaaaggggatacattacgccaaaaacgagttctttcttgatgttattgaacgtgttcagtacttgatggattttgaaaaaggagtgattaggaaaaatctgatacatggagagattgtgtgcagatgctatttatcagggatgcccaaactgaaaatatccataaacaagatactgaacagggacccccagttcatgtcgaattccagctttcatcagtgtgtttcactagattccataaacactattgaaaaagatgaagaaaagaatagtgacgatgatgctggtttgcaggccgccacagatgcaagagaaatcgaatttataccgccggatggcgaatttgttctttgccatacgagttga

SEQ ID NO: 80115 - DNA, 1107 bp, Saccharomyces pastorianus
atgtcttcattggatgtaatagttcgacaaacgcaaaatttgaatgtacgatataattcagacgttcctcttatatttatgacctcgcttgaaactgaatctcaagtatcaaacttccttgaagagcattattcttctagcaaagtgagatggaaaaccgtagttcagtcaagctttccacaaattgataaagatagattattacctatcgatttacaaataaattctcatgaaaatgatttttggtatccttgcgggactggtaacctaactgacactttgtatttttcaggagaattggacaaattaattgctcaaggaaaagagattttatttgtttcaaatgttgacaatttgggcgctacaggagatttgaacattttaaatttcatcataaatgaaaaaatcgagtatcttgttgaagtagttgaaaggactgcaaatgtttcaaacactggagtgttggcaacatataaaggtaaactacgatcggtttattacaactgcttatccaatgaaagtgcaagcacgtgtcgaattgtcaacactaataacatttggattgatttgaaaaagctaaaggagctaataaagtctaatagtttaaatttgccaattcattctagggaaagtaaaataacacacaaaaatgaagagatagagtgtcttcaatttaagacacagttggtcgattgtattgcgttctttccgaacagtcgagtattgaaagtatcaagagacagatttttacccctaaaaacatgtagggacttgtttttgttgaaatcaacattatatgatctcgattcaaatggaacatttaacctctaccctctgaaatttggattattaccttcaatcgacttgggcgatgagtttgcaacttatgagacttttaagataggagtaccagatattcctaatattctggaattagatcatttaactgtgatgggaaatgtgttttttggtcgtaatataactctgaaagggacggtcattataatatgtgatgaaaatgatgtaattactgttcccgatggctctattttggaaaatgtaacgatttggcataaatctcagctggaggatatgaatggatattaa

SEQ ID NO: 80116 - DNA, 174 bp, Saccharomyces pastorianus
atgacggttttctctggagtaaataaaatagagtttgaaggtactttcgaaggtattggaaaggatgttgttatgtcacaaatgataagggccttgcagaagcattttccttcgatacgtgacaagaattatgagtttagcctatttttgcacattttcaaagatatgtcttag

SEQ ID NO: 80117 - DNA, 1347 bp, Saccharomyces pastorianus
atggcaaagcctattcatgttaaattcatcataatgtcattccctatcataacttttgtaggcatcggatttacgcatgtcgttgcggatatgtctgcatccttcattgccatgctcaatggtgcggacgtttctgtgggtaaatatatatggaaactactaattcccgcttctttaggtaacatcgtaggaggactcttttttagcgcagtcgttcccttctacttacatttggtggttgtggaacgtgatagaaagagattatctttaccagaatacgaagcaagagatgaacaacctgaattgaatatggattcaagggttgttaggataccaaaaaatgagtgtgaggaagatataaaagacgaagttagtgacgatgacgcaactgaaaccggtggagacgtcgaagacttgacagagaaggattctgcaagcgcttataatacaatacacgatagctcgagttatttgactgggagaagcctaaattcgcttctatctataccttcatcagtcgtaacttccgacaatgctactatggaatcggacttgggagagcctgtaccattcatacccagaagcaattccaccgcaagatcttcacatttgaagttgcctcataataactctgccaagtccattgacaaacgccatattagcaagcgtcatagtttgagatcaccgcccggtgtctttcctgtaaggggaatgggagaaccactagaaagagaaattacgattgaagatgcaacttacgaccctaaggaatatgagcttttcttaagaagagccgaaacacataactcgacatttgtgagggataagaagaaagaaaatgataagctattaaggctagtgaaaactgaagaggatcgcgagcaagaagagtacgaaaaaaatggcggttacaatatcctggaaaataaaccaggtactaagctagagaaaataattacgcatcttgctgaaaatgtatcttctagggaagtgacccctccggtattacctagaacgacacaggatacttttcctcataacgctccagcctcgtctccatcatacacagacgatgctcattcattacgtaaagcaaacagtaccacgttaggcggactgtttagggcggtgtcgaaagaatttcactcaagcaaggatgcagaaagcccagatgacttactcaaaaaaatggctgctgttggcataaaccgcaaggctagaattacagcaaataatgtagccggaattgttaacctaaataaagaggacctggacagcactccaaggcggcaaaaatttactgagcccaaaaactcttataatcgtcacacatccccccagttatga

SEQ ID NO: 80118 - DNA, 159 bp, Saccharomyces pastorianus
atgttttgtcagtttgtctgggcaatagttgctggttcccttttcgtttcatacctttgtagtcatcttacaggtattggttctcaggagctttggatgaagggctcaaagcaaataatagacaaagggcttcctattcattcatacaaacctttctga

SEQ ID NO: 80119 - DNA, 741 bp, Saccharomyces pastorianus
atggaatacatggaaggtggctccttaactgatgtggtcacccattgtattttgacagaaggtcaaattggtgccgtttgtagagaaactttgagtgggttggaatttttacattctaaaggtgttcttcacagagatatcaaatccgataacatcctattgtccatggaaggggatattaagttaacggatttcggtttttgcgctcaaatcaatgaattgaacttgaaaagaactactatggtgggaacgccttattggatggcgcctgaagtggtttctaggaaagaatatggcccaaaagtagatatctggtcgttgggtatcatgatcattgaaatgatcgagggggagcctccatatttaaatgaaacccctctaagagcactgtatttaattgctacaaatggtacacccaagttaaaggaacccgagaatctatcgtcaagcttgaaaaaattccttgattggtgtttatgtgtggagcccgaagatagagcaagcgctacggaattgcttcatgatgaatatatcacagagatagctgaagccaattcctcattggctccgctagtcaagttagcaagattgaagaaagtagctgagaacatggatgctgatgaagataatgacgacgataacgacaacgagcatattaataagacaaacaattgtgacgacaataacgatagcaaagaaaccgtaaatttggacgtaactgaagatgataaacaaaagtaa

SEQ ID NO: 80120 - DNA, 2106 bp, Saccharomyces pastorianus
atgagcaatgatccatctgctgtatcggaactaccagacaaggacagtcttgataacggtatcagcaatgacaatgaaagggccatgggcggcaatggcgatggcggcgatggattacgattaccaaggaccactggaactttgaacgtcaatgccttacaaaaaggcactaatgctgcccatgaagctggtggatacaaatccatggatcctgcgaagaacgcggagacaaccaatgatgatgacaataatgtcgtttcactagatgaccctattcaatttacccgggtatcttcctcctctgtcatcagtggaatgtcttcatccatgagtcctcattctaacatcgatgaaaccaaatctctagaagcagtcactccaaacataaataccagcaatatgaccccggatcattctgctgacaacacattttctaccataaatgcgtccgagtcagatcaccagtttaatgacactttactatcaaaactgtcgttaacagattctacagaaactatagaaaataacgcgacagtgaagcaccagcagccagttgcatcttccacagtaaactcgaataagagctccactgatatacgaagggctacaccagtgtccactcccgttatctctaaaccatcgatgacaaccacgccaagacagatcaattcagcttcccattcgctttcgaaccctaagcataagcaacataaaccaaaagttaaaccgtccaagcctgaagcaaaaagtaaaccggtttctgtgaaaaaaagctttccttcgaaaaatcctttaaaaaactcctctccacctaaaaagcaaacagaaaaatcgtattattcttcctcttcgaaaaaaaggaaaagcggttcaaatagtggtacactaagaatgaaagatgtctttacgtcctttgtacagaatataaagagaaattctcaggatgataaaagggcctcatcgtcgtccaataattcttcctcatcttctataaccaccgctttgaggatatctacgccatacaatgccaagcatatccaccatgtgggcgtggactccaagactggtgagtacacaggtttgccggaggaatgggaaaaattgttgacttctagtggtatttccaaaagagaacaacagcaaaacatgcaagcagtcatggatattgtcaaattctatcaggatgtcacggaaacaaacggtgaagataaaatgttcaagactttcaacacaaccacaggattgccgggaagtcctcaagtttcaacaccgcctgcaaactctttcaataaatttcctccgtcgacaagtgattcgcacaattacggttccagaacaggtacaccaatgtccaatcacgtcatgtctccaaccttaaatacagattctagttcagcaaacgggaaattcctaccaagtagaccggctcctaagcccccatcttctgcgtccacttcagctccaattataaaatcacccgtcatgaattctgccgccaatgtttcgcccttgaagcagactcatgcacctacaactccgaacagaaccagcccaaacaggtcctcaatatcaagaaatgccactttaaaaaaagaggagcagccactaccaccaatacctccaaccaaatccaaaacgtctccaatcatctccacagctcacacaccacagcaagttgctcaatcgccaaaagcgccggcgcaagagacggtaacgacacctacttcgaagccagctcaagcaagaagcttgtctaaagaattaaatgagaaaaagagagaggaaagggaaagacgtaaaaaacaactatatgccaaattgaacgaaatttgctcagacggtgacccaagtacaaaatatgccaatttagtaaaaattggtcaaggtgcatcaggtggtgtttatactgcttatgaaataggtacgaatgtctcagtggccattaagcaaatgaatctcgaaaagcaaccaaaaaaggagctaatcatcaatgaaattctggtcatgaagggtagcaaacaccctaatatagttaatttcattgattcttacgttttaaaaggcgacctttggtcattatggaatacatggaaggtggctccttaa

SEQ ID NO: 80121 - DNA, 231 bp, Saccharomyces pastorianus
atggtccgcaatactctaatgtactcgtctatggattgtgggatctcaccgcgacacaagaaggaccgcaacagctgcggctacttagccttgtgttacggcagtgccttagtctgccatctaaagttgaattctatccagaaccgccttctagtagcgtgcctgcccgactattgcgattctgggaccatattatcagatagctgcattgtgttacatgcgatatcgtag

SEQ ID NO: 80122 - DNA, 453 bp, Saccharomyces pastorianus
atgcagtttgaagagctgttgcaacagctagtagaaagcgattggagcctggatcagtcaagcccaaacgtactggtgatagtccttggagacactgccaggaagtacgtagagttaggaggactgaaggagcacgtgactacgaacactgttgcaggtcacgtggcaagccgcgagcgggtatccgtagtttttttgggccgggtaaagtacttatacatgtacctcacccggatgcaagcgcaggcgaatggtccgcaatactctaatgtactcgtctatggattgtgggatctcaccgcgacacaagaaggaccgcaacagctgcggctacttagccttgtgttacggcagtgccttagtctgccatctaaagttgaattctatccagaaccgccttctagtagcgtgcctgcccgactattgcgattctgggaccatattatcagatag

SEQ ID NO: 80123 - DNA, 144 bp, Saccharomyces pastorianus
atgttatggggtggagctagcatgcttgggctatttgtattcacagaaggatggcctaagtttcaagatacgctatacaaaaagattccgttgttaggacctacattggaagatcatactccaccagaagataaacctaattga

SEQ ID NO: 80124 - DNA, 987 bp, Saccharomyces pastorianus
atgattatagatccagaaaacatatctatcgactctttgaatacccactgttgcgcagttttatcagatattggaaagcccaaagttcaatgcttgaaagaacacttgtctaaaattgctccttggtctgaaataaaagcaagggccaaggcctggactaaagaaaactcacacgatttaatttttgcagacggtgagtccccaacttttatcgtggattgtctagataatctagaatctaaggtagacctattagagtacgcccatcacaataaaatagatgttatttcttccatgggtgttgccacgaaatcagatcctacccgtgtgagtataaatgacatatccatgacagaatttgaccctatatctcgttgtgtaagaagaaaattgaggaagaggggtatcgccacggggatttccgttgtttttagtaatgaaatgctcgatccacgccgagacgacatactctctcctatagattgcgaacatcgtgcaatcaatgctgtcagagatgaggctctcagacatttaccggaattagggaccatgcctggtatttttggtttgagtattgcgacatggattttaaccaaagtgtcaggctatccaatgaaagaaaatgaggtcaaaaataggttaaagttttatgacagcatcctagagactttccaaaagcagatggcgcggttgaatgaaaataaggagcgatcgtcattgcttggattagaagaggtcggttatatagttgaagaaatatttagaggcaagtctcctattagcggatactctacgaaactagctctaacaaaatgggaagctaacaaagaaatctccttaaccaatgttgttctgatgacgaaagaagagcaagaaattcacgaaaaaaggattttgctggatggtgagaaactgacagctgtatactctgaagaagttctcgattttattgagaggctttttaaagaggaggagtactattcttag

SEQ ID NO: 80125 - DNA, 279 bp, Saccharomyces pastorianus
atggcaaataatacgtggaagttaattgctactacagctcttatatcggtgttttcaacccaacttgccaaaagtgtatggaaagaatacaaactttcatgtgcggctaataagaataaaaccgtatcgcgacctcgtcaatatgatgaccacttatttagggaacaattggctcgtaactatgcatttcttggcgaagaaggtatgaggaagatcaaagaacagtatatagttatagtcggagctggagaagtgggatcgtgggtatgcacatgttaa

SEQ ID NO: 80126 - DNA, 642 bp, Saccharomyces pastorianus
atgaaaatgataaagacttcggatggccaaacaaggttcatctcatccgacgaaagtgtttccgaaccagctttacaaaataagaattgtatagaagcgacagtaatgcagtccaaggaacgccttaatgacaagatcataccaaccaaaacagaaaaaaacgattttggaataggcactcaatggtttgaacgcaaacaaatatcaagacctacacaaactacacaatcaagaggacctacagaagtccaaaatttcaaagagtggtcaataatatctcccccaattttgtcaccccaaaatgcatcttctgtaccacaagagtatcaatcatcaagatacacattgcatatggattctccagcattatcctctgcctcatcagcgctatctcccctttcaggcgatccaataacaactacagaaacaaataagtcatacccattggattcagagcaatcgtcgttggagccagacaaaaccgaggaggacgcaatcaatcagtcaaaggaaagcaatatgatttccattaatgagatgttacagaagcaaatggactttgaacttctgggtgagaatcatttgaaggagactcaagattatctggccctttacaaaaaagcttatgggatagaattttaa

SEQ ID NO: 80127 - DNA, 1374 bp, Saccharomyces pastorianus
atgaagccatacgagtttttcgaagaatgtcaaaagaaatacggtgatattttttcattcgttttgttaggaagagtcatgactgtgtatttaggaccaaagggtcacgaatttgtcttcaacgctaagttggcagatgtttcagcagaggctgcttacgctcatttgactactccagttttcggtaaaggtgttatttacgattgtccaaattctagattgatggagcaaaagaagtttgttaagggtgctctaaccaaagaagccttcaagagctacgttccattgattgctgaagaagtgtacaagtacttcagagactccaaaaacttccgtttgaatgaaagaactactggtactattgacgtgatggttactcaacctgaaatgactattttcaccgcttcaagatcattattgggtaaggaaatgagagcaaaattggataccgattttgcttacttgtacagtgatttggataagggtttcactccaatcaacttcgtcttccctaacttaccattggaacactatagaaagagagatcacgctcaaaaggctatctccggtacttacatgtctttgattaaggaaagaagaaagaacaacgacattcaagacagagatttgatcgattccttgatgaagaactctacctacaaggatggtgtgaagatgactgatcaagaaatcgctaacttgttaattggtgtcttaatgggtggtcaacatacttctgctgccacttctgcttggattttgttgcacttggctgaaagaccagatgtccaacaagaattgtacgaagaacaaatgcgtgttttggatggtggtaagaaggaattgacctacgatttattacaagaaatgccattgttgaaccaaactattaaggaaactctaagaatgcaccatccattgcactctttgttccgtaaggttatgaaagatatgcacgttccaaacacttcttatgtcatcccagcaggttatcacgttttggtttctccaggttacacccatttaagagacgaatacttccctaatgctcaccaattcaacattcaccgttggaacaacgattcagcctcctcttattccgtcggtgaagaagtcgattacggtttcggtgccatttctaagggtgtcagctctccatacttacctttcggtggtggtagacacagatgtatcggtgaacactttgcttactgtcagctaggtgttctaatgtccatctttatcagaacattaaaatggcattacccagagggtaagaccgttccacctcctgactttacatctatggttactcttccaaccggtccagccaagatcatctgggaaaagagaaatccagaacaaaagatctaa

SEQ ID NO: 80128 - DNA, 216 bp, Saccharomyces pastorianus
atgtctgctaccaagtcaatcgttggagaggcattggaatacgtaaacattggtttaagtcatttcttggctttaccattggcccaaagaatctctttgatcataataattcctttcatttacaatattgtatggcaattactatattctttgagaaaggaccgtccacctctagtgttttactggattccatgggtcggtagtgctgttgtgtag

SEQ ID NO: 80129 - DNA, 489 bp, Saccharomyces pastorianus
atgatattttttctctccctagtattgaagaacaaatttgagaattcgccaaactttaagaagggttcacatttactaactatttcttttccttcctttttttacacagctgtcgttgtccgtggtcgttacgccggtaagaaggttgttatcgttaaaccacatgatgaaggttccaagtctcacccatttggtcacgctttggttgccggtattgaaagatacccattgaaggtcaccaagaagcacggtgccaagaaggttgctaagagaaccaagatcaagcctttcatcaaggtcgtcaactacaaccatttattgccaaccagatacactttagatgttgaagctttcaaatccgttgtttctactgaaactttcgaacaaccttcccaacgtgaagaagctaagaaagtcgtcaagaaggctttcgaagaaagacaccaagctggtaagaaccaatggttcttctctaagttgagattttaa

SEQ ID NO: 80130 - DNA, 597 bp, Saccharomyces pastorianus
atggaagaaattcctatgaatagtataataaggcaaggtgctttgaaaatcggctgttgtagcggttataccgttgtgccaaagaacgaccccttatctttgttagcattggcacgccagttggatgtagacattttattgtggggtggtactcataacgttgaagcttataccttagagggaaaattttttgttaatccaggtagctgtacgggtgcttttaatacagattggccaattgtctttgatgttgaggatagcgatgaagctgtgacatcagaggtggacaagccgactaaggagaatcagtcggaggatgacgatgccaagggtggatcaacaggaacggaacaacctgggtcttacacgcctaaagaaggcactgctggggaacgtgagaatgagaatgaaagtaacgttaagcctgaaaaccaatttaaggaagacgaggttgatatgtcagattcggatataaatgggtctaattcaccaagtttctgcctcttggatattcaaggcaatacctgcacgttatacatttatttatacgttaatggagaagtgaaggtcgataaagtggtttatgaaaaggaatag

SEQ ID NO: 80131 - DNA, 255 bp, Saccharomyces pastorianus
atgagcaatgtcgatgatttatcacataaaatgtcgaagacagggttaggtaatgaatccactgctacaaattcggcgacaccaacggctgttgttctctacaatttcgctggggaacaaccaggcgacttggctttcaaaaaaggtgatgttattactatcttaaaaaaatcagattctcaaaatgattggtggacaggcaggactaacggaaaagaaggaatattccctgcaaactatgttagagtttcttaa

SEQ ID NO: 80132 - DNA, 747 bp, Saccharomyces pastorianus
atggcaggtgctggtgcaggtggtatggtcggtgttgaattgacagattttgtttttattttaaattcggaagaggcagtgaggtccttttctgaatttggtacaattactttaggtggtaatgtgtcagtttccgcaggtcctcttgggagaagtgcagaagctgcagcttctgcatctacaggtggtgtctcggcagtttttgcctattccaaaagcaaaggtttatttgccggtgtgtctgtggaaggttcagccatcttggagagaagggaagctaatcgaaagttttacggcgataactgtacatcaaagatgattttgtcaggtagagtaaaagtcccaccagcagcagaccccctactccgtatcttggaatcaagagcattcaactttacacgccacgaccatgatgacaacgctagcggtgatgatttttatgatgacggtcaatacagcgacaacacaagccattattacgacgatattccagattcctttgattctactgatggatcctcaacacgtccaaacacaagatcatcaagaagaagaggaatgtcgctggggtcacgcagtcgttatgatgatgattatgatgatgatggttacggacgtggtcgcgggtatggagattttgatagcgaagatgaagattatgattacggaagatctccaaatagaaacagcagccgcaatagaggcccacagatagataggggtactaagccgcgtgcgaatacctga

SEQ ID NO: 80133 - DNA, 1446 bp, Saccharomyces pastorianus
atgttggactactacgatgtttctggctgttacatcttaagacctccttcttatgcgatctgggaaaacatccagaaatggttcgacgacaagatcaaggccattggtgtacagaatgcctatttcccaatgtttgtttcctcacgtgtgttggaaaaggaaaaggaccatgttgaagggtttgctccagaagttgcctgggtcaccagagctggctcctctgaattggaagaaccaatcgccattagaccaacttctgaaactgtcatgtatccttactacgcaaaatgggtccagtcttacagagatttaccattgaaactaaaccaatggaattctgtggttagatgggaattcaagcatcctcagccctttttaagaaccagagaattcttgtggcaagaaggtcatactgctcacttgactgccaaggatgccgaagaggaggttttgcaaatcttagatttctacgctggggtttacgaagagttattagctgttccagtggttaagggtagaaagaccgaaaaggaaaaatttgctggtggtgacttcaccacaacttgtgaaggctatattccacaaaccggtcgtggtattcaaggtgccacctctcaccatttgggccaaaacttttctaagatgttcaatttgtctgtggagaacccactaggttctgatcatccaaagatctttgcctaccaaaattcatggggtttatccactcgtgtcattggtgtcatggttatgatccactctgacaacaagggtttggttatcccaccaagagtgtcccaattccaatccgttgtcattccagtgggtatcacaaagaagacctctgaggaacagcgtaaacacattcatgaaacagccagaagtgtggaatcccgtttgaaaaaggttggcattagagcctttggtgactataacgataattacacaccaggttggaaattttcccaatacgagctaaagggtattccaatccgtattgaattaggtcctaaggatattgaaaaaaaccaagtcgttgtcgttcgtagaaatgactccaagaaatacgttgtttctttcgacgaattggaagcccgtatcccagaaatcttagaagaaatgcaaggagatttgttcaaaaaagccaaggagctgttcgacacccacagagttatcgttaatgaatggagtggttttgttccagcattgaacaagaagaacgttatcttagcaccatggtgtggtgtgatggaatgtgaagaagatatcaaggaatcttctgcaaagaaagacgatggtgaagaattcgaggaagatgacaaggcaccaagtatgggtgccaaatctttatgtatcccattcgaccaacctgtattgaatgaaggtcaaaaatgtatcaagtgtgaacgtattgctgtcaattactgtatgttcggtcgttcttattag

SEQ ID NO: 80134 - DNA, 171 bp, Saccharomyces pastorianus
atgaagaaatctgacatgatgaaatttctaagcaattttgaggatagtcaaaaagtggttgatttctcccaagaggtgtctaaggaaaccgctacagaaggcaagaaacaacagaaaaagcagcaaccttctaaggcaggcactgcagcagcagcagcagcagcagcttag

SEQ ID NO: 80135 - DNA, 339 bp, Saccharomyces pastorianus
atgtatcctacccaaccctacagttttcaaattactaacatcaatttttttgtgaaacgactttcgttttcgtttctatttatttcattacaggttttagttcaagatttgttgcacccaactgctgcttctgaagccagaaagcacaagttaaagactttggttcaaggcccaagatcctacttcttggatgtcaaatgcccaggttgtttgaacatcaccactgttttttctcatgctcaaactgctgtcacttgtgaatcatgctctactgtcttatgtactccaaccggtggtaaggccaaattatctgaaggtacttctttcagaagaaagtaa

SEQ ID NO: 80136 - DNA, 177 bp, Saccharomyces pastorianus
tgtcaaaattctgtaaagtttctggaccttttggatctaaatggtgtggaaaattatgacgtccacgtctttcctgactcagatcatagtataagataccataatgcgaatgtaatcgtttttgacaagctattggattgggcaaagcgtgctttcgatgggcaatttgtcaaatga

SEQ ID NO: 80137 - DNA, 831 bp, Saccharomyces pastorianus
atgcctgcaggtcgaattgctcctacagaactgtatgccacaagaagagaagttgaactatccaacgtaaagaaattacaggctctacctggtgatttatatgagtttaaagctgtagataacgcgcccgagagataccaagcgatactagattcttcattaatggtggaaaaagttgtcgcattgaaggaagatgcacaggtaatgatgttgaaaaataagcctgatgtagaattagttaatggatcattgggaaaagttttgttttttgttacagaatcgctggtggtgaaaatgaaggaaatttacaagattgtggatgacgaagttgtcatggacatgagattagtgagtcggatcattggtaatcccttgttaaaggaatcaaaggagtttcgtcaagatttgaatgccaggccattagctagattggaacgtttgaaaatcttgataaactatgcagttaagatctctccgcataaggaaaaattcccctatgtgaggtggacagtgggtaaaaacaagtacatacatgagctcatggtcccagagcgctttcccattgatattcccagagaaaatgtcgggttagaaagaactcagattccattaatgctatgctgggcattgtccattcataaggcacagggtcaaactattcaaagactaaaggtcgacttgaggagaattttcgaagccggccaagtttatgttgcactgtcaagagcggtaactatggacaccttacagttcctaaactttgatccaggaaagattcgcaccaatgaaagagtaaaagatttctataaacgtttagaaactttgaaatga

SEQ ID NO: 80138 - DNA, 1890 bp, Saccharomyces pastorianus
atgttcaggtcgcatgcctccggtaacaagaagcaatggtctaaaagatcctcaaatggtagcacacctgctgcttcggcatctggctctcacgcatacaggcaacaaacgttgtcttcgttctttatgggttccggcaaaaaatctgctgctgcttcaaaaaacagcacgacaataattgatttggaaagcggtgacgaaggtaaccgtaatataacagcacctcctaggccaagattaatacggaataattcgtcttccttattctcgcagagtcaaggttcgtttggagatgatgatcccgacgcagaattcaaaaaattggtagatgtgccgagactcaatagctataaaaagtctagcagatcgctgtcgatgaccagctctcttcataagactgcctctgcgtccacgactcagaaaacataccattttgatgaggatgagactttgcgagaggttactagcgtgaaatccaattctagacaattatcgttcactagtacaattaatattgaagattctagcatgaaactttctactgattcagaaagaccagccaagaggtctaaaccttctatggagtttcaaggtttaaagctcacagtaccaaagaaaataaaaccactgctaagaaagacagtatcaaatatggactcaatgaaccaccgaagcgcgtcttcgccagtggtacttacaatggagcaagagagagtggttaatttaatcgtcaaaaaaagaacaaatgtcttttacaccggtagtgcgggtacaggtaagtcggtcattttgcaaacgatcataagacaattgagctctttgtatgggaaagaatcaattgcaattaccgcctcaactgggctagcggcagtgactattggtggttccacattgcataagtggtctggtataggaatcgggaacaaaactatcgaccaattggtgaaaaaaatacaatcacaaaaggacttattggccgcatggaggtatacaaaagttttgataattgatgaaatttctatggtcgatggtaatctgttggataaattagagcaaatcgcaaggagaattcggaagaacgacgatccctttggtggtattcaattggtcctgacaggcgatttttttcaactaccaccagttgctaagaaggacgagcataacgttgtgaaattttgttttgaaagtgaaatgtggaaacggtgcattaaaaaaacgattttactgacaaaggttttcagacaacaggataacaaactaattgatattctaaatgccataagatacggagagctgactgtcgacattgctaaaacaataaggaacctaaatagggatatagactatgccgatggaattgctcctacagaactgtatgccacaagaagagaagttgaactatccaatgtaaagaaattacagtctctacctggggatttatatgagtttaaagctgtagataacgcgcccgagagataccaagcgatactagattcttcattaatggtggaaaaagttgtcgcattgaaggaagatgcacaggtaatgatgttgaaaaataagcctgatgtagaattagttaatggatcattgggaaaagttttgttttttgttacagaatcgctggtggtgaaaatgaaggaaatttacaagattgtggatgacgaagttgtcatggacatgagattagtaagtcgagtcattggtaatcccttgttacaggaatcaaaggagtttcgtcaagatttgaatgccaggccattagctagattggaacgtttgaaaatcttgataaactacgcagttaagatctctccgcataaggaaaaattcccctatgtgaggtggacagtgggtaaaaacaagtacctacatgagctcctggtccca

SEQ ID NO: 80139 - DNA, 141 bp, Saccharomyces pastorianus
atgcctacgtggtcaagggagacaaaaaataggtgggtacatcaacctagccgcattctactgtctaggtgtgcccatggcatatgtgttagcattcctgtatcatctgggtgtaggcggcttatggttgggtataactag

SEQ ID NO: 80140 - DNA, 561 bp, Saccharomyces pastorianus
atgaagaagaagggcgctgagcttcctgcactagaggtattgaatgatgagttacatcaagattacaaggcaaaaatgcataaaatcatagaagaggaggccggagacccgatgagtatattgagaggaaggaatgacgatggcgatgataataatgatcccgacgatggaacactaccaccattgctccctatcgagaacaaaatctccggagccaagatagaggagattgataagaacgagattgctcacagaaacctgaaacaggcatctgcacctgcacctgcacctgcaccgcacgagcagcaggaggacgtgccggaatacgaggtaaagatgaagaggttcaaaggggccgcctacaagctgcgaattcttattgagaacaaagctccgaactcgaagccggaccagttctctccgagctacaacttcgcagagaatattatatacattaacggtaagctgagcatacccttgccgcgcgacatagtcgtgaatgcagcagatatcaagattttccatatccgcaaagaacgcacactatatatatatatataa

SEQ ID NO: 80141 - DNA, 1020 bp, Saccharomyces pastorianus
atggccgatttcttattgagaccaattaagcaacgtcatagaaacgaggacaagtacgtgtcggtggacgctgcagacggatcggtgtctaaaattgagcccatcgcagattttgtaattaagacaaaactattatccgctaatgggccggaaaaactgcaagatggcaggaaggtgttcatcaatgtttgtcattctccgttagtgcccaaacctgaggtcgattttaatgcaaggatagtgttcccgctcatcatccaaaacgaatgggagattcctattattacatcctgctaccgcatggaccatgacaagaaggggcaggagtgctatgtgtgggattgctgcataaatagcgattgctcgcgctggatatgcgaggatatccaactgcgagagatactggtcgaatggtgcttggagtcatgtgagatccgagattcggtggtattgtgcagagatcgcattgcattccccaagatgaagaagaagggcgctgagcttcctgcactagaggtattgaatgatgagttacatcaagattacaaggcaaaaatgcataaaatcatagaagaggaggccggagacccgatgagtatattgagaggaaggaatgacgatggcgatgataataatgatcccgacgatggaacactaccaccattgttccctatcgagaacaaaatctccggagccaagatagaggagattgataagaacgagattgctcacagaaacctgaaacaggcacctgcacctgcacctgcaccgcacgagcagcaggaggacgtgccggaatacgaggtaaagatgaagaggttcaaaggggccgcctacaagctgcgaattcttattgagaacaaagctccgaactcgaagccggaccggttctctccgagctacaacttcgcagagaatattttatacattaacggtaagctgagcatacccttgccgcgcgacatagtcgtgaatgcagcagatatcaggatttccatatccgcaaagaacgccactata

SEQ ID NO: 80142 - DNA, 177 bp, Saccharomyces pastorianus
atgcaaaggtttccgcagccattatatgttgaaactaaaaccggttgcagtcaggaccgtttcttgaaaagcaaaattattcccttggacatcactgacaaggaaactcttggtacagaggatatgacattcaatgaatatttcaacttgttcaccgatctaggtggaagcaaataa

SEQ ID NO: 80143 - DNA, 81 bp, Saccharomyces pastorianus
atacttcaagatgatataaccaccatttgtgtagatggtggctcgtacttagtattaagaaggggtatacttttggaataa

SEQ ID NO: 80144 - DNA, 1833 bp, Saccharomyces pastorianus
atgacccaaaatctaaaatgcaccaaatgtggcgcctattattcgatggcttgttccctacgagaacagaatgtttggacttgtctattctgcaaccaatcaaactcaaatgctgaattgccactggtaccttccaacatctatacattgacttctgcaaagaaagaaatactttcaagacggaccattatgattatagacgctatttgcgatcctcatgagctaaattatttagtttccattctatgtaataattacatcacaagacaacaagagccactatcaataattactattcagcaatcaggtcatgtgattttacacaatgctgtgaatcacaaacgtgatgctgtgttttcaataaatgaatttatgaccaaatataatcttgataaattaaatgccagttacttcgagaaaaaaatttcagaaatcaatcaagaatcatactggtttgataaatctactcagggttctttaagaaaattgctacgggaaatatgcaagattgcaaacaaagcgaatatcagttctaaaagggacaagcgttgcaccggattagcgttgttcgtttcatccgtactggcgtctcagtgcagtttgtcagcctactgtcatatagtttcattcttgaatggtccatgtactaagggtggcggcaaagttatgtcaagagaacgtggtgaaagcatgagacaaaaccaccattttgaatccaaaagttcacaattgcaactatcaaaaagttcgacaaaattttacaagaaaatgcttgaaaaatttgcaaaccaatcgttaatctatgagttctttatagcttcattggatcaaatcggtatactcgaaatgagtccattaataacctcgtcaatggcagtttctcagtttgattcattcaatgatgagagattcgcaatgtcttttcaaaagtacctgaacttgcgtgaccataatgccatttacaattgtcattcaaagataatgaccgcaaagaacgctattgtcgttaaggacttcccaaaatatagcttaaaccctaaaaacctttctctaccattagaaatctcactaggtcacaattcagctgaagctcctatacagtttcaaaccacttttgaaaatcgaacggaaaaatacataagaattgaaaccttcttattgccaaaagccaatagatcatttggggcacaaaatgaaattgtgttttcaatgaaaaagatagcctcacgaattatcgatagctttgcttactcatccaagcacactaaagaattgatgaagcaattgtttctactaccaaatcaaatccggggaaaagacgtagatatggtcaatctgatacagtggtgttatcatatatataggtctccaattctatcggttcggaatacttcacctgatgaaaggtacctttttcttcaccgaataataaacgcttctaaagacacatgcctttcattatgcaaacctttcatctggagttacagtgatttgaaacacgactggatcgtattggatgtcccattaacaagagcccagatacttcaagatgataaaaccaccatttgtgtagatggtggctcgtacttagttttaagaaggggaaaacttttggaaaaagaaggtcgcgagctctgttgcaagcttttaaatgacatgcaaaggtttccgcagccattatatgttgaaactaaaaccggttgcagtcaggaccgtttcttgaaaagcaaaattattcccttggacatcactgacaaggaaactcttggtacagaggatatgacattcaatgaatatttcaacttgttcaccgatctaagtagaagcaaataa

SEQ ID NO: 80145 - DNA, 177 bp, Saccharomyces pastorianus
atgtgttctccgactaatttcttgtatgagcccttttccagcgatgctgtgacgcagaactatgacccaaaatctaaaatgcaccaaatgtggcgcctattattcgatggcttgttccctacgagaacagaatgtttggacttgtctattctgcaaccaatcaaactcaaatgctga

SEQ ID NO: 80146 - DNA, 177 bp, Saccharomyces pastorianus
atgataagtgtactggtgccgttgtttctcagcaatggtttggtaggcgcaagaatgagtggtaccgacgataaggctggtggtccaaacattttaagcagatttgtcagtattagaaacacaaaggagaacttctacgagttgactgatttcaaatatccatcgaattatgaataa

SEQ ID NO: 80147 - DNA, 618 bp, Saccharomyces pastorianus
atgtttggcatattgcagtcacagaatgttgtcccaatgaacacatccgcaagtccaatttctggtgggaatttgcggggatttatgggtcctgtcatccatgaacaaagtttcgacaaattagttaaagtaattgaagatgcaaagaaagaccccgagttggaaattctttacggtggacaatacgataaaagccaaggttggtttgtcggacccacagtcataaaagccaagagaccagatcatccatatatgtcaacagaattttttggccctatattaactgtttacgagtatccagatactgaatttaatgaaatctgtgatattatcgataatacgagtcaatacgccttaactggtgctatttttgccaaagatcgtaaagcaattgaatacgcagatgagaagttgaagtttagcgcaggaaatttctacataaatgataagtgtactggtgctgttgtttctcagcaatggtttggtggcgcaagaatgagtggtaccgacgataaggctggtggtccaaacattttaagcagatttgtcagtattagaaacacaaaggagaacttctacgagttgactgatttcaaatatccatcgaattatgaataa

SEQ ID NO: 80148 - DNA, 1083 bp, Saccharomyces pastorianus
atgctatcagcaaggtgcctcaaatctatatacttcaagagatctttctcacaactcggacacatcaagccccccaagcacataagaaatgaacctgttaagccatttagaaacacagacttaaaagactgggacttactgagggcttccttgatgaaattcaaaagttcttctttagaagtgccactggtcatcaatggggaaaggatatatgacaataatgaaagagcgcttttcccacagactaaccctgcgaaccatcaacaagtcctggcaaacgtcacacaagccacggaaaaagatgtcatgaatgctgtaaaggccgccaaggatgccaaaaaggattggtacaaccttccgttttatgacagatctgcgatttttttgaaagccgctgacttaatttccaccaagtatcgttatgacatgttagctgctacaatgctgggccagggaaaaaatgtgtatcaggcagaaatcgactgtatcacggaattatctgacttttttagatactatgtcaagtatgcatcagacttgtatgctcaacaacccgtagagtcagcggatggtacttggaataaagctgaatacagacctttagagggatttgtgtatgctgtttcaccattcaactttactgctattgctgcaaacttgattggggctccagctttgatgggtaatacagttgtctggaaaccttcacaaaccgctgccctttcaaattacttattgatgactgttttggaagaagcgggattgccaaagggtgtcataaatttcattccaggtgatccagttcaagttactgaccaggtattagctgataaagattttggtgccttgcattttaccggttctacaaatgtctttaagagtttgtatggcaaaatacaaagtggcgttgttgaagggaagtacagagattacccccgtatcattggtgagacaggtggtaaaaatttccatctagttcacccaagtgcaaatatatcacatgcagtactctctactattagaggcactttcgagttccaaggccaaaagtgctctgccgcttcgaggtttatcttccagagt

SEQ ID NO: 80149 - DNA, 594 bp, Saccharomyces pastorianus
atgcaggaaaagggtgagaaaaaggagcttttcaaacatgtcagccaccgtatcaaagagacagactttttggtgcaagggatgggcaagaacgttttccaaaaatgctgtgaattctatcgcttggctggaacaagctcttgcatagagggcgaagacggttcggagaccaaagaggaaagaacacagatcctacagaagagcggactcaaattctacacgaaaacgttcccttacaacaccacgcatataatggattcaaaaaaactggtggagttggctatacatgagaaatgcatcggagaattgttgaagaacaccacagtgatcgagtttcccacgatattcgttgccatgacagaggctgacctaccagagggctacgaggtgctacaccaggaaccccgcccacttgagcatacgagtacactgaacaagtttattgacaatgcaagggaggaggaagacgctgaagaggactctcaaccgacagaagaacctgtacagaaggaaacacaggacgccagcgacagcgacagcgacagcgacgatgactacaatccgggcttatccatggatttcctcactgcatga

SEQ ID NO: 80150 - DNA, 495 bp, Saccharomyces pastorianus
atggcggtgttgtgtggtgtatgcggaataaaagagttcaaatacaagtgtccaagatgtttggtgcaaacttgctctttggagtgttccaagaagcacaagacaagggacaattgctcaggtcaaacacatgatcctaaggagtatatatcgagtgaggcgttgaaacaggcggacgacgacaagcacgaacgaaatgcttatgtccagagggactacaactatctgacgcagttgaagcgaatggtgcatgtacaaaagatggatgctagaatgaagaacaagcgggttctggggcctgtgggcggccacaactctaatttcaagaagagaagatacgatatagatgaggatgatcgtgatagcacggagtgtcagaggataattaggaggggggtgaactgtttgatgctacccaaggggatgcagcgatcatcgcaaaacaggagcaagtgggacaaaacgatggacctatttgtatggagcgtggagtag

SEQ ID NO: 80151 - DNA, 465 bp, Saccharomyces pastorianus
atgtactcgataacgttccaccaccatggccggcagaccgtgctaatcaaggacaactcagcgatggtgacgactgccgcagcggcggatatccctccggcgctggtgttcaatggctcatctacgggcgttcctgagtccatagacactattttgtcgtccaagctgtccaacatctggatgcagaggcagctcatcaagggtgatgccggtgagacgttgatcttggacgggctcaccgtgcgactcgtcaacctcttctcctccactgggttcaagggtctcctgatagaactgcaggcggacgaagcgggcgagtttgagaccaagattgcaggcatcgaaggacacctagctgaaatccgggccaaggagtacaaaacctcatccgactcgttggggccggacaccagcaacgaaatatgtgatttggcgtaccagtatgttcgtgccctggagctgtga

SEQ ID NO: 80152 - DNA, 594 bp, Saccharomyces pastorianus
atgcaatcgattgcggtagaaatgtttgaggaatacgccaatgggaacaaacaggccatacctgcactgttcaaggcagttgttttcaacaccgttgccagacttggcggagaaaacaattacgaaaagattttcaacatctatcaaaaccctgtttcgtcagaagaaaagattatcgctttgagagctttgggcagatttgaagacaaagaacttttagaaaggacattgtcttatctgctagatggtacagttttgaatcaagatttttacatcccaatgcaaggcattagagttcataagaagggcattgaaatgttatgggcctggatgcaagaacactgggacgaaattgctaagagattacagccaggctcgcctgtgttgggtggcgtgttgacattgggtttaactaattttacctcttttgaagcccttgaaaaaattagtgcgttctatagtagaaaggtcactaaaggttttgatcaaaccctggctcaagccttagacactattagatccaaggcgcaatgggtgagcagagatcgtgaaatcgttgctacctacttgcgtgagcatgagtatgatcaatag

SEQ ID NO: 80153 - DNA, 1647 bp, Saccharomyces pastorianus
atgtcccgtgaagtactgccaaacaacgttaccccattgcattatgacattacactagaacctaatttccgtgcttttacgtttgaagggtcattaaaaattgacctgcagattaatgatcattcgataaactctgtgcaaataaattacttagaaatagatttccattctgcacgtattgagggtgtcaatgccattgaagttaacaaaaacgaaaaccaacaaaaagctactcttgtctttcctaatggaacttttgaaaacctaggaccttctgcgaagttagaaattatcttttccggtattctaaatgatcagatggcgggattttacagggctaagtatacggataaagtcacaggggagacgaagtacatggctactactcagatggaagccacagatgctagaagagcctttccttgttttgacgaaccaaatttgaaggcgacttttgcagtaactttggtctctgaatcgtttctgactcatttgtccaacatggatgtcaggactgaaacaatcaaagagggtaagaaatatacaacttttaacacgactccaaagatgtctacgtacttagtagcatttattgtagctgacctgagatacgtggaaagcaataatttccgtattccagtaagagtttattctaccccaggggacgaaaaatttggtcagtttgcagccaatttagctgctaggaccttgagattctttgaggacaccttcaacatagaatatccattgccaaagatggatatggtggcagttcatgagttttctgctggtgctatggaaaactgggggctagtgacttatagagttattgatttgttattagacatagaaaattcgagtttagatcgcattcaaagagttgctgaggttattcagcatgaactagcccaccaatggttcggcaacttggtcaccatggattggtgggaaggcttatggttgaatgaaggttttgccacttggatgtcttggtactcttgcaacaagtttcaaccagaatggaaagtttgggagcaatatgttactgacaatttacaacgtgctctaaatttagattcattgagatcttcccatccaattgaagttcccgttaataatgcggacgaaatcaatcaaatttttgatgctatttcttattctaaaggatcttctttattgaggatgatttccaaatggttgggtgaagagacttttattaaaggtgtgtcccaatacctgaataaattcaaatacggtaatgcaaagaccggagatttgtgggacgccttagcagatgcctctggcaaggacgtttgttcggtgatgaacatctggacaaaacgtgttggttttccagtgttatctgtcaaggaacacaagaacaaaatcacattaactcaacaccgttatttaagtaccggtgatgttaaagaagaggaagatacaaccatataccccattttgttagctttgaaagacagtacaggtatcgataacacattggtattgaacgaaaaatctgctactttcgaactaaagaatgaagagttcttcaagattaatggtgaccaatcaggtattttcattacctcttattctgacgaaagatgggctaagctatccaaacaggcaatttattatccgtag

SEQ ID NO: 80154 - DNA, 99 bp, Saccharomyces pastorianus
  modified_base (25)..(25): a, c, g, t, unknown, or other
gcggccgcattaacctcactaaagngaccacgcgcatgggtgagcagagatcgtgaaatcgttgctacctacttgcgtgagcatgagtatgatcaatag

SEQ ID NO: 80155 - DNA, 2652 bp, Saccharomyces pastorianus
atgatggacatgcaagtgagaaaagtgaggaagccgcctgcttgcacccaatgcaggaagagaaagatcgggtgcgacagggcaaaaccgatatgtgggaattgcgtcaagtataacaagccggactgtttttatccagatggacctggtaagatggtcgctgtgccctctgcgtccgggatgtccacgcacggcaatggccaaggttccaaccattttagtcagggaaatggtgtaaatcagaaaaacgtaatgattcaaacgcagtatccgattatgcaaacgtcgatagaggcatccaacttctctttcaacccctctgtggataccgcgatgcagtggaccaaggccgctagctaccagaataataacaccaataataatactgctcctcgtcagaatagtagtaccgttagtagtaatgttcatggaaacactattgtgagaagcgatagtccagatgtgccctccatggatcagattagagaatataacacacgattacaactggttaacgctcaaagttttgactatacagataacccatactcttttaatgttggtatcaatcaagactcggccgttttcgatctaatgacttctccgtttactcaagaggaagtattaatcaaggagatagactttttaaaaaacaaattgcttgatttacaaagcttgcaactgaaaagtttgaaagaaaaatcgaatttaaatgccgacaataccacggcaaacaaaattaacaaaacaggtgagaattctaagaaaggcaaggttgacggtaaaaaagccggatttgatcatcagacttcaaggacttctcagtcctcacaaaaatactttacagcgctcacaataacagatgtgcaaagtttagtccaagtgaaaccgttgaaggatacccccaactaccttttcactaaaaacttcatcatttttagagatcattatcttttcaagttctataatattttgcacgatatctgccatattaatcagttcaaagtaagtcctcctaacgataaaaatcaccaacaatatatggaagtttgcaaagttaacttcccaccaaaagcaataattattgagacactaaactctgaatcccttaacaatctgaatattgaggaatttttgccaatctttgacaaaaccctcttactagaatttgttcataactcttttccaaatagtgatacctgtccttcattctcaacggtcgatcttcctttatctcaactgaccaaactaggcgaattaactgtgcttctgctgttgttaaacgattcaatgaccctattcaataagcaggctattaataaccatgtttcggcattaatgaataatttgaggttgattcgaagccaaatcacattgataaacctggaatattatgaccaagagacaatcaaatttattgccatcacaaaattttatgaatctctgtacatgcatgatgatcataaatcaagtttagacgaagatttgagctgtctcttaagcttccagataaaagatttcaagttattccattttttgaaaaaaatgtattactcaagacattcgcttctaggtcagtcttcattcatggtacccgctactgaaaacctatctccgatacctgcctctattgatacgaacgacattcctttaattgctaacgatttaaaattactggaaacgcaagcaaaattgataaatattctgcaatatgttcctttctacttgccagtaaatttaaccaaaattgaaagtctgttagaaaccttgactatgggcgtgagtaatacagtagacttatattttcatgacaacgaagtcagaaaagaatggaaagacactttaaattttatcaataccattgtttatacaaattttttcctttttattcaaaacgaatcctctttgtccatggcagttcagcattcttctaacaacaataagacctcgaactctgaaagatgtgcaaaggatctgatgaaaattatttctaatatgcacattttttactcagtaacatttaattttatcttccccataaagtcgataaagtcattttcaagcggcaataatcgctttcattctaatggtaaagaatttttattcgcaaatcattttattgaaatcttacagaattttatagcaatcacatttgctattttccaacgttgtgaagtaatattatatgacgaattttacaaaaatctttcaaatgaggagattaatgttcaattgctattgattcatgacaagattttggaaattttaaaaaaaatagaaattatcgtatcctttttacgggatgaaatgaataacaacggaaatttcaaatctattaaaggtttcaacaaggttttgaatctgattaaatatatgctgagatttagcaagaaaaaacaaaattttgcgagaaactctgataataataatgttacagattatagtcagtcggcgaagaacaaaaatgttctcttgaaattccccgttagtgaactgaacagaatctatttaaaatttaaggagatttcagattttttaatggaaagagaagttttccaaaggagtataattattgacaaggatttggaatctgataatctgggtattactacggcaaacttcaacgatttctatgatgcattttataattag

SEQ ID NO: 80156 - DNA, 513 bp, Saccharomyces pastorianus
atgttagatattgtagaagaggctgccattatggccttaaataaagttgaacattttttgcagaatacacccaatgtatttgaatcaattaatgacgctgtcgattggcacgttcaacacgcgttatcgagattgaggtcaagcgccgaaattgctataccagctttatttgctccgctcaagtcagggaaagttgtcaggataacaaaccttaagacctttagccctttctgggacacatggtttaccgatctgtcgcactcctttgttggcttacctgttagtaaattattaatattggcgggaaacgaaaatctcgataaagaattaattgtggggcaaatgcaaggtaaatatcagttggtagttttccaagattccgggcatttcattcaagaagattcgcctataaaaacagcaatcactttaattgatttctggaagcggaacgattctaggaatgtagtaatcaagactaattggggtcaacacaaaaccgtgcaaaatacataa

SEQ ID NO: 80157 - DNA, 420 bp, Saccharomyces pastorianus
atgaaacgaatgtatgaagagtacgagagaaaactaaaggatgaggaagaaaggaaagcggaagaagaattggaaaggcaatttcagaaaatgatgcaagaatccatagacgcaaggaaaagcgaaaaggttgttgccagtaaaattccagtaatttcgaagccagtcagcgttcaaaaacctttattattaaaaaagagtgaagaaccttcttcaagcaaggagacctacgaagagttatccaagccaaagaagattgcatttacgttcttgactaaaagcggtaagaagacacaatcaagaattttacaattaccaacggatgtgaaatttgtctctgatgtccttgaagaagaagagaaactaaaaaccgagcgaaacaagattaaaaagatcgttttaaaacgttctttcgactga

SEQ ID NO: 80158 - DNA, 1266 bp, Saccharomyces pastorianus
atgatcacgaatcagatattgccacccaaccaacgattatgggaaaatgaagatacaaggaaattttatgaaatcttaccagatatctcaaaaacagtagaagaatcacaatcttctaaaacagaaaaagattcaaacgttaactcaaaaaatatcaatctattctttacggatttggaaatggcagattgtaaagatataatcgatgacctttcaaatagatattggtcatcatatttggacaacaaagccacaagaaatcgaatattgaaatttttcatggaaacacaagattggagcaaactgccagtgtattccagatttattgcaacaaatagcaaatatatgccggaaattgtttctgagtttattaactacctagacaatggcttcaggagtcaattacattctaataagattaacgttaaaaacatcatcttcttcagtgaaatgattaaatttcaattaataccatcgtttatgatttttcataagattagaacattaatcatgtatatgcaagttccaaataacgtagaaattttgacggttttgttggagcactcagggaaatttctgctaaataagccagaatataaggaattaatggaaaaaatggtccaactaatcaaggataaaaaaaatgataggcaattgaacatgaacatgaaaggcgccttagaaaacataattactttactttatcccccttctgtaaaatcattaaatgttacggtaaaaacaataacgcctgaacaacagttttatcgcatattaattagaagtgaactaagtagcctagacttcaaacacattgtcaagttggttcggaaagctcactgggacgatgtagctattcagaaagtgctgttttctctgttttcaaaaccacataagattagctatcaaaatattcccttattaactaaagttctaggcggtctatacagttaccgccgcgatttcgtcatcagatgtatagaccaagtactggaaaacattgagcgaggcttagaaattaacgattatggacaaaacatgcatagaatatcaaatgtcagatacttaactgaaatattcaactttgaaatgataaaatccgatgttttgttagatactatctaccacattattcggtttggtcatatcaacaatcaacccaatccattttatttaaacgactcagatccaccggataattatttcaggattcaactagtcactacaattctgttaaatatcaacaggaccccgaagctttactaa

SEQ ID NO: 80159 - DNA, 2664 bp, Saccharomyces pastorianus
atgagaactataatgtatactataaacatgttgaatggtgaaattatatcagcgttcggacctggttcaaaaaacgggtatttcgggagccagagtgtggattgctcacctgaggagaagataaaacttcaggaatgtgaaaatatgattgtaataggcaaaactatttttgagctgggaattcactcttatgatggagcaagctacaatgtcacttactctacatggcagcaaaatgttttagatgttcccctagcgcttcagaatacattttcaaaggacggcatgtgcatagcgcctttccgtgataaatcattgctagcaagcgatttagattttagaattgctagatgggtttctccgacattccccggaattattgttgggcttttcgatgtgtttaatgatctccgcaccaatgaaaatatactggtaccgcatccctttaatcctggtgatcatgaaagtatatcgagtaacaaagtttacttggatcagacttcgaacctctcctggtttgcattatctagtcagaattttccatctttagtcgaatcagctcccgtatcaagatacgcttccagtgaccgttggagggtgtcttcaatttttgaagatgagactttattcaagaacgcaatcatgggtgttcatcagatatataataatgaatatgatcacctttatgaaaactatgaaaaaacgaatagtttggacactacgcacaaatatccacctctgatgattgattcgtccgttgatacaaccgatttacatcagaataacgagatgaattcactaaaggaatacatgtcaccagaagaccttgaggcatatagaaaaaagatacacgagcaaatatcgagagaattagatgaaaagaaccaaaattctttgctactgaagtttggaagtctagtatatcgaattatagagactggagtatttctgttgttatttctcattttttgtgcaatactacaaagattcaaaattttgccgccactatatgtattattatccaaaattggatttatgcctgaaaaggaaatccccatagttgagtcgaaatcgctaaattgtccctcttcatcggaaaatgtaaccaagccattcgatatgaaatcagggaagcaagttgtttttgaaggtgctgtgaacgatggaagtctaaaatctgaaaaagataacgatgatgctgatgaagatgatgaaaaatcactagatttaaccacagaaaagaagaagaggaaaagaggttcgagaggaggcaaaaagggccgaaaatcacgcattgcaaatataccaaactttgagcaatctttaaaaaatttggtagtatccgaaaaaattttaggttacggttcatcaggaacagtagtttttcagggaagttttcaaggaagacctgttgcggtaaagagaatgttaattgatttttgtgacatagctttaatggaaataaaacttttgactgaaagcgatgatcaccctaacgtcatacgatactactgttcagaaacaacagacagatttttgtatattgctttagagctctgcaatttgaaccttcaagatttggtggagtctaagaatgtatcagatgaaaacctgaaattacagaaagagtataatccaatttcgttattgagacaaatagcgtccggggtagcacatttacattctttaaagattatccatcgagatttaaagcctcaaaatattctcgtttctacttcgagtaggtttactgccgatcagcaaacaggagcagaaaatcttcgaattttgatatcagactttggtctttgcaaaaaactagactctggtcagtcttcatttagaacaaatttgaataacccttctggcacaagtggttggagggccccagagctgcttgaagaatcaaacaatttgcagtgccaagtcgaaacggaacactcttctagtaggcatacagtagtttcatctgattctttttatgatccgttcaccaagaggaggctaacaagatctattgatattttttctatgggatgtgtattctattatatcctatccaaagggaagcatccatttggagataaatattcacgtgaaagcaatatcataagaggaatattcagtcttgatgaaatgaaatgtctacatgatagatccttaattgcagaagctacagatctgatctcccaaatgattgatcacgatccgttaaaaagacctactgctatgaaagttctaaggcatccgttgttttggccaaagtcgaaaaaattggagttccttttaaaagttagtgataggcttgaaattgaaaacagagaccctccaagtgccctgttaatgaaattcgacgccggttctgactttgtaatacccagtggagattggactgtcaagtttgataaaacattcatggacaaccttgaaaggtacagaaaataccattcatcaaagttaatggatctattaagagcacttaggaataaatatcatcattttatggatttacctgaagatatagcagaactaatggggccggtacccgatggattttacgattacttcaccaagcgttttccaaacctattaataggtgtttatatgattgtcaaggaaaatttaagtgacgatcaaattttacgtgaatttttgtattcataa

SEQ ID NO: 80160 - DNA, 405 bp, Saccharomyces pastorianus
atgcgtctacttcgaagaaacatgttagtattgacactgctcgtttgtgtgttttcatccatcatttcatgctcaatcccattgtcgtctcgcacctcaaggcggcagatagtggaagatgaagttgcctccactaaaaagctcaatttcaactatggtgtggataaaaatatagactcgcccattcctgctccaagaaccactgaaggtttaccaaatatgaaactcagctcatatccaactcctaacttattgaatactgctgataatcgacgtgctaacaaaaaaggacgtagggctgccaattctataagtgtaccctatttggagaatcgttccttgaacgaactgagtttatcagatatactaatcgcagccgacgttgagggtggattcatgctgtag

SEQ ID NO: 80161 - DNA, 1905 bp, Saccharomyces pastorianus
atgacatcaagcgtcagcataggaaagccggaagatttacccatgcctctacaaacagacaccccttatggaacaggaattccaccactaggtccaaaaattcactcacccacagaaacagtatacaaaccagcgcccaatgaaaaattagttaacgaatcaacaatacacgcttcgttagggcgggttgtcaatatattattcgggaaagatgtcagttatattatggccattttaaaagcgcaaaagaatagtgatatttcgccaatccctgttctcgttgattcacccacggtttctgaaggtaaaaggagagattattcctacgtaaaaacaacaccaggtgccattggacccggtaaaactaaatgcatgataactgaaaccattcaacactttaacttagaggagtatgttcaagtcttgcaaacaacaaaaactccggatgttccttctggaaattcattttatgtgagaacagtttatcttttatcatgggcaaacaacaatgaaacaaaactaaaagtgtatgtctctgttgaatggacaggtaaaagcttgatcaaaagtcctattgaaaagggtacatttgatggtgtaacggatgcaacaaagatattggtggaggagcttggtaatattttaacaagatctgctaccaaaaggaaaaggtcttcgaaggagaacactgttacagtatcaactttaccgaaaatggaacctagctcacatgcacctaccgagcctgatattcaaaaggataaggatgactctattataagggaaaatgagaatataccagctccattagggaccgtggtccaattgctatttggatcgaatacagagtatatgcagaaagttatcactagagataagaataatgtcaatgtggaaacgataccaaaattcacgccttcgttggttgaaggaggttcaagacactatgagtacacgaagaaattgaacaattctatcggacctaagcaaacaaaatgtttactaaccgagtctattgaacacatggatatcaataactatgttttggtgacacaaacaactaaaactccagacgtcccctctggtagcaattttgcagtagaaagtaaaatctttctattctgggggcagcatgacaccacgaatatgaccgttataacaaaaatcaactggacaagtaaatcatttttgaaaggtgcaattgagaaaggatctgttgagggtcagaaggtttctgtcgattacatgctatccgagttaagagacattattagcagggcaaaaagcaaaaaaccggtgaagaaagtaatgaagagtcatgataaacataggcctttccatagtaaggttgaacagaaaagttccgaaagccgtaagagcgatgataataaagacattttaactcatattttggatttcgttcagaataattttagttcagaaatttttatgaacaaattgctgagtcctcaaaaactattcttgattttggggttgatcattatgcttttctggtctcctcggcttcacgtgtttcaagaaaaaaataatcttcaaatcatcaagccaggaaggctgctgattgatggtcaagaatataattacgtgcccagtttcggcacactgtataactcatatgaaaacgccatatcatctgagaagaagagagaaaatgtaaattacgcaagggataagagtcctattgtaggaagggaaagcgatatttgggattggatcagtaacagagggagtgcaatatcacctcgaggtcgtgctatgttgagaaacgatgacgaacacaaattgcagcaattatcagaaagtatcaaaataacagaaatgcaactaaatcatatgaaaactatgttggacaacattgagagggacgcaaatgatctatcttaa

SEQ ID NO: 80162 - DNA, 1749 bp, Saccharomyces pastorianus
atgactagagattcaaaaaagaagcaccattggggcactgcctttttaaggacaattggagtcaaacgtaagcacaagaaggatcgtaattttttaaataatactacaggagagaatgttagcacaacagccagtgctgagcgattcagaagagtaggaggaaatccggatattccgtctttacttaagcccgaaactttcacggaatctcctgcaaaaggatctcaaaaggcggcggcatcttccttagcgcatagccaaggtgtattcaatattccaatcgttatagatcccatggaaacaaacaggcttgaaaagacaaacacgaatttgacggcaggttcattgaagggtcgctttcaggatggtaactcgaattcaaattctgtaccgagtttatccgtccaggcattagaaaaggaaaaactgcaaagtgggaaacgagaagggtccagcaatcaagctgaggaaaaaactccagacggccatgatgaacataccgcctttgaaacgtttctttccttcgcccataatgccgtaagccacattcccaaaataaacgtacaagacgctgacaatggaacaatttccaggaatgaaccaaaggacaggaaaaaaaactcatctaatatatcaggagccctttccgaaaatagcactaacaataaaaacacttcatcgacaaaagaaagcgatggcccatttttgaaaaatttagacaatattcttgcagcatccaaatcatcaactccaagtaaccaacagcttaatacaacggaagcaggaagtaaaagtaaaccatcatcattatctagattggcatttggaaatttgaaaggccatattcactcgaactcacattcaagctctaatgctatctcaggagatgatacatcattagatgacactagaaagatgacggatgatatggccaggaaagtggttttcgaacccatcagtcactctcatgataagcctacccccggagttggaaacttaaaattagagcacttcgatgattctcaagctactcttgaagggttagaggcaatgtcagcagaatcgctgccagaggcggatcaccttgacagcagaggcccggtacaacaaagtaatttggaaagaaaaactgttccttccaaatggtcagtagtcagttcctctacaacagatggagtcaagcctagaagaagagccaaatcaatgattagcgcaatggcagataaacaaaacaccagtagcgacgttttacaagattgtaaaaaaagattgtccttcaactcctctaatggcctaacgaataacgacccggagtatgaagaccgcgaacctagggaaatgtccaagaagtttcttaacaggaggtcattttcccccggaagcattagcatgggaatgaaagtactaccttcgacggcactgaaatattcgctaaacaaagtaaaaaacagcactgatattgcatcgaccatcataccgagacctagtatgtccaacggtcgtccatcttcgggattgaggagaagttctagtaaaagcttttcatctacccccgtaaatatcattgagccatcggaggaaaatggtagacaatccagcattagaataaagggagtcgaatacgcgagcgaaaagaaagatgcagaattccatgcaatattcaaggactctggtgtcagccccaatgaaaggttgattttagaccatagttgtgctttgtcaagagatatcctttggcagggcacatga

SEQ ID NO: 80163 - DNA, 609 bp, Saccharomyces pastorianus
atggaacaaaaatctaaaaatggggtttatgttccacctcatcataggaagagtttcaacttgggaacacaggtacctcctatgaatatgaagacaagtaacgaggccacgttgtcagtttcgcataattctgttaattttggtggatcttacaattccaggcgttccagtgctaatgaatctaacccactgcatatgaataaagcactcgagaagttgtcctcttcaccaggagctaaaagctccttcgttggcttccctaaacctttattacctcataatcattcaagcactacgattgcgttgcaaaatgaagacgtattcgcagactctaacaatgacgccataattttcgaagacgaagaatacgaaggagaaagtgacaagatggcacatggcaaaatggaaggtggtgacaacgaatcctcgtcaacctccccggatgaaaggcaaattttcggtccttatgaaatttatgctcaaactttcgctggctccactcacgataaaaaattaggagctggcaggaagacaagtattcaggatgaaatggtcggatcgttagaacaatacaagaataattggttaattttacagcaacaagactaa

SEQ ID NO: 80164 - DNA, 642 bp, Saccharomyces pastorianus
atgactttagattacgagatttacaaagaaggaggtattttgaataatcgatatcaaaaaatagaggatatcagtgaaggttcatatggttatgtatcattggctaaagatgttagagagaaaagattggttgcagtcaaatacattttcaaattagaagatgacggccagtacgatgggcctcaggacgacgaaaatgattgtgatagtagcgattgtgatgatgatgaagacacgaaagttgatacggatcgccatgaaaatgaaaatggtaatgcctccagtaataacgggtcaagtagagagaagaaacacaatctctacaaacacaaaaagtccctaatttcttcgaaagttaaatcaagactatctaataacatttgtctcgaagccatgtatgaagttgatattcaaacaaaaattggtagacaccaaaatattgctgctctattagatttcttcgactcttacatcatcatggaatattgctctggcggtgacctatatgaggcgatcaaagccgatgctgtgcctaagaaaaccaaatcgatcactcatattatcacacaaatcatggatgcaattgaatatgttcataacaagggcatttatcatcgtgatatcaaacctgagaacatttaa

SEQ ID NO: 80165 - DNA, 1578 bp, Saccharomyces pastorianus
atggatagaaatgtcggtagtgaaagatatatgtcccctgaactttttgatagtaatttggatatcaaggaaagaaaggaaccttatgactgtgccaaagtggatttatgggctatgggaattgtgtttcttaatattgttttccataagaatccttttagtattgccaatcaatccgacaagtcattctgttattttgctgctaatagagaagcgttgtttgatgtattttcgacaatggcttatgatttctttcaagtattaaggtatagtttaaccatcgatccggctaatagagacttgaaaatgatgagaactgaactacagaacttatctgagtatacattagacgatgaatactataataacttggatgaaggatatgaagaaactatgattgacggtttgccacctcagcctgttcctccatcttcagcaccggtatcattacctactcctatttcatctagtaacaaacaacatatgcctgaatttaaaaaggatttcaatttcaataatgtgaatgaaaggaaacggtctgatgtctctcaaaatcaaaatgttgcaagcggcttctttaaaaaaccgtctacacaacaacagaaatttttcaaccagggttataatacaacactatctactcatgaaagggctaaatctgctcctaagttcaaatttaagaagcgcaataagtacggaagaactgataatcaattttccaaaccagtcaatatcgaagatagaaagaaaagtaaaattttgaaaaaatcaaggaagcctcttggcataccaacgcctaatacacacatgaataattttttccacgattacaaagcaagggatgaattcaacaccagagattttttcactcctccaagtgtccagcacaggtatatggaggggttttccaacaacaacaataaacagtacagacagaatcgtaattacaacaataataacaacaacagcaataacaatcatggaagtaattataataattttaacaatggtaatagctatataaagggttggaacaaaaactttaacaaatacagaagaccaagttcctccagttataccggtaagtcaccactttcaaggtacaacatgagctataatcataacaacaatagttctataaatggttatgcaaggcgtggttctacgactacagttcaacattcaccaggcgcttatattccaccaaatgccaggaaccatcacgtaagcccaacgaatcagtttttaagagttccgcaatcaactgctcctgatatctctaccgttttaggtgggaagccttcataccaggaacactacactcaggatagtatggattctgagggcgatcacgattcagacgacgttttattcactcttgaagaaggtgatcatgatttcgtcaatggtatggacaacttatctataaatgatcacttaccgcatacaacggtaggtagccataatgaagtatttgttcacgcaagcactaatcacaataacaatggcaacaacaaccatatcgacaccaatagtaccactaatcaatatcatagacaatatattccacctccttag

SEQ ID NO: 80166 - DNA, 969 bp, Saccharomyces pastorianus
atgattggtggtatgatgtttgttcctgaatctccacgttatttggttgaagctggcagaatcgacgaagccagggcttctttagctaaagttaacaaatgcccacctgaccatccatacattcaatatgagttggaaactatcgaagccggtgtcgaagaaatgagagccgctggtactgcatcttggggcgaattattcactggtaaaccagccatgtttcaacgtactatgatgggtgtcatgattcaatctctacaacaattaactggtgataactatttcttctactacggtaccattgttttccaggctgtcggtttaagtgactcttttgaaacttctattgtctttggtgtcgtcaacttcttctccacttgttgttctctgtacaccgttgaccgttttggccgtcgtaactgtttgatgtggggtgctgtcggtatggtctgctgttatgttgtctatgcttctgttggagtcactagattatggccaaatggtcaaaacaacggctcatccaagggtgctggtaactgtatgatctgttttgcctgtttctatatcttttgtttcgctactacctgggccccaatcgcttacgttgttatttcagaatgtttcccattaagagtcaaatccaagtgtatgtctattgccagtgctgctaactggatctggggtttcttgattagtttcttcaccccatttattactggtgccatcaacttctactacggttacgttttcatgggctgtatggttttcgcttacttttacgtctttttcttcgttccagaaactaaaggtttatcattagaagaagttaatgatatgtacgccgaaggtgttctaccatggaaatcagcttcctgggttccagtatccaagagaggcgctgactacaacgctgatgacctaatgcatgatgaccaaccattttacaagagtttgtttagcaggaaataa

SEQ ID NO: 80167 - DNA, 771 bp, Saccharomyces pastorianus
atgaattcaactcccgatctaatatctcctcagaaatccaattcatccaactcatatgaattggaatctggtcgttcaaaggccatgaatactccagaaggtaaaaatgaaagttttcacgacaacttaagtgaaagtcaagtgcaacccgccgttgcccctccaaacaccggaaaaggtgcctacgtaacggtttctatctgttgtgttatggttgctttcggtggtttcatatttggatgggatactggtaccatttctggttttgttgctcaaactgattttctaagaagatttggtatgaagcaccacgacggtagtcattacttgtccaaggtgagaactggtttaattgtctctatttttaacattggttgtgccattggtggtatcgtcttagccaagctaggtgatatgtatggtcgtagaatcggtttgattgtcgttgtagtaatctacactatcggtatcattattcaaatagcctcgatcaacaagtggtaccaatatttcattggtagaattatctctggtttaggtgtcggtggtatcacagttttatctcccatgctaatatctgaggtcgcccccagtgaaatgagaggcaccttggtttcatgttaccaagtcatgattactttaggtattttcttaggtactgtaccaattttggtaccagaattactcaaactctgtccaatggagagttccattaggtttgtgtttcgcctgggccttatttatgattggtggtatgatgtttgttcctga

SEQ ID NO: 80168 - DNA, 1506 bp, Saccharomyces pastorianus
atggttgcttttggtgggttcgtgtttgggtgggatactggtactatatctggttttgtcaggcaaacagacttcattaggcgatttggcagcacccgtgcaaacgggactacctatctttccgatgtcagaaccggtttgatggtttctattttcaacatcggctgcgctatcggaggtatagttttgtcaaagctcggtgatatgtatggacgtaagattggtctgatgactgttgtcgtcatttactcaattgggatcatcatccaaatcgcctccattgacaaatggtatcaatatttcattggaagaatcatctcaggactgggcgttggtggtattacagttttggcgcctatgctaatttctgaagtgtcgcctaagcagttgcgtggtactctggtttcatgttaccaattaatgatcactttcggtatctttttgggatattgtactaattttggtaccaagaattactcaaactctgtccaatggagggtaccattaggcttatgctttgcatggtctatttttatgattgttggtatgacgttcgttcctgaatccccacgttatctggtagaagtgggaaaaattgaagaggccaagcggtccttagcaagagctaacaaaaccactgaagactctcctttagtaactttagaaatggagaaatatcattcttctattgaagctgagagattggcgggctctgcttcttggggggaattggttactggtaagccccagatgttcagacgtacactaatgggtatgatgattcaatctttacaacagctgacaggtgacaattacttcttttactatggtactacaattttccaggctgttggtttggaagattcatttgaaactgctattgttttgggtgttgttaattttgtttcgacttttttctcgctatataccgtcgatcgttttggtcgtcgtaattgtttgttatggggctgtgtaggtatgatttgttgctatgtcgtctatgcctctgttggtgttaccagattatggccaaacggtcaagatcaaccatcttcaaagggtgctggtaactgtatgattgttttcgcatgtttctacattttctgtttcgctaccacttgggcccccgttgcctatgtccttatctctgagtcgtatcccttaagagtacgtggtaaagcaatgtcgattgcaagtgcctgtaactggatttgggggttcttgatcagttttttcactccatttattacttcagcaatcaatttctattatggctatgtctttatgggttgtatggtgttcgcatacttttatgtgttcttctttgttccagagacaaagggcttaacattagaagaagtcaacgaaatgtatgaagaaaatgtgctaccttggaagtctaccaaatggatcccaccatctaggagaacaacagattatgacctagacgctactagaaatgatccgagaccattttataaaaggatgttcactaaagaaaaataa

SEQ ID NO: 80169 - DNA, 696 bp, Saccharomyces pastorianus
atggatgttacaggattatttggcggatctttccatcatgacggcccctttgatgcatgcactccacagagaaataagaataataaagtggcgcctgtactggccttcccagcagatggtccaaataatacagtaggcggccgcacaagtaagaagtctaccttagatgaggtgtttggtagggaaacagtagacgacgattctgagacgctgaaccaactacaagatagagcatatttattcaataaggccaattccagtactacgactttggatgcgattaaaccgaattcaaaaaatattacccagttcgactccaaaatgaaaactgaactagtccatgggcccattacgatgggtctaggctcaacgacgttcctggatggcgcaccagcgtcttccgctgccatagagcaagatgttatcaaccacgcacaagaatctcgtaggaaaaacagcatagcaagaaaaaagtctctcccctcaagaagacatctacaagtgaacaacaacaatttaaagctagtgaaaacacatagtggacacttggagcaaaaggacgtagacgataatagaacttctgttccggtcactgccacccaaggaagcggtcacgaagatgttgttaaaaaggaaaacaccggcaacaagctattaaggagggtgaaaagcttgaaaactagtaaaaagcactga

SEQ ID NO: 80170 - DNA, 8703 bp, Saccharomyces pastorianus
atgatacttactgcacgattgccccacgagagagaactttatgtggaattatgcatcactgtaccagttcggttaagtgtgcttgctccttatttgccatttttgatgaaaccattggtatttgcattacagcaatatcctgatctcgtttcgcagggtttaaggaccttagaattatgtattgataatttgaccgccgagtattttgatcctataatcgaaccggtaatcgatgacgtttcgaaggccttgtttaaccttctgcaacctcaaccatttaatcatgctatcagccacaacgtagtcagaatactgggcaaattaggaggtagaaatcgtcaatttttaaagccaccaacggacctcacggaaaaaacggaactagacattgatgcgatagcagatttcaaaatcaatggtatgccggaagatgtaccgctttctgtaacgccaggaatccagtccgctttgaatatattgcaaagctacaaaagtgatattcactacaggaagagtgcttacaagtatctaacctgtgtactactgttaatgacaaaatcatcagcagagtttcctacgaattacacggaactgttgaagacagcagtgaattctataaagctagagaggattgaaatagaaaaaaactttgatttggaaccaactgtaaataagagagattattcgaaccaagaaaatttgtttttgaggttactggagagcgttttttacgcaacttcgataaaggaactaaaagatgacgcaatggacctactgaataaccttttggatcatttctgcctattacaagtaaacactacgttgcttaataagagaaactataatgggacatttaacatcgatctaaagaacccaaacttcatgctagatagctcattgattctagatgctattccctttgccctttcgtactacattccagaagttcgtgaggtgggtgttttggcgtacaaaagaatatacgaaaaaagttgtctgatatatggggaggaactagctttaagtcactccttcataccggaattagctaaacagtttatccatttgtgttacgacgaaacatattacaacaaaagaggcggtgtcttgggtataaaagttctcattgataatgttaagtcgtcctcagttttcctaaaaaagtatcagtataacctagccaatggtctattatttgtgctgaaggacactcagagcgaggccccatctcctataacagatagcgctgagaaattactaatagatctattaagtattacgttcgcggatgtaaaagaagaggatttgggtaacaaagtcttggagaacacactgacggacatagtatgcgaattaagtaatgcaaatcctaaggtaagaaatgcctgccagaagtccttacatacaatttcaaacctcactggaattcctatagtaaaattgatggatcattccaaacaatttcttctatcaccaatatttgcaaaacctttaagagcattacctttcactatgcaaatcggtaatgtcgatgctatcacattctgtttaagtctaccaaacacatttctaacatttaatgaagaactgtttaggttactccaagaatctattgtcttggcagatgcagaagatgaatcactatccaccaatatccaaaagacaaccgaatatagtacttccgagcaattagtacaattaagaatagcgtgcataaaattacttgcgattgctcttaaaaatgaagaatttgccacagctcaacaaggaaacatcagaattcgaattctagctgtttttttcaaaacaatgctgaaaacttcaccagaaattattaatactacatatgaagctttgaaaggttccttagcagaaaactctaaattgccgaaagaattacttcagaacggattaaaacctcttttaatgaatttatctgaccaccaaaagctgacggtccctggtctggatgctttatcgaagcttctcgagttattgattgcatactttaaagtagaaatcggaagaaagttgttagatcacctcacggcatggtgccgtgttgaagttcttgacacattatttggccaagatttagcagagcagatgccaactaaaataatagtaagcattattaatatatttcatctactgccaccacaagctgatatgtttttaaatgatttgttgctcaaagttatgcttctagagagaaaactacgtcttcaactggattctccatttcgtacaccactagcgaggtacctgaaccgtttccataaccccgtaacagagtacttcaagaaaaatatgacgttaaggcaattagtgcttttcatgtgcaatattgtgcaaagacctgaagcaaaggagctggccgaagattttgagaaagaactcgacaacttctatgacttttacatttccaatataccaaaaaaccaagtacgtgttgttagtttttttactaatatggttgatctctttaatacaatggtgatcacgaatggggacgaatggctaaagaaaaaaggcaacatgattttgaaattaaaagatatgctgaacttgacattaaaaacaataaaggaaaactcgttttacatcgaccatctacaattaaatcaaagtattgcaaaattccaagctctttacctgcgtttcactgaattatccgaaagggatcaaaatcctctgctcctagatttcattgatttttctttttcaaatggtatcaaagcctcatattccctcaagaaattcatcttccataatataatagcaagttcaaataaagaaaagcagaataacttcataaatgatgcaacacttttcgttctatctgacaaatgtttggatgctagaatatttgtacttaaaaatgtcataaattcaactttgatttatgaagtggcaacatctggatctttgaaaagctatcttgtggaggataaaaaacctaaatggttagagttactccacaataaaatttggaagaactcaaatgcaattttagcatatgacgttctagaccatcatgatttattccgttttgaactcttacaactgtcagcaattttcattaaggcagatccagaaattatagccgagataaagaaagatataataaaattctgctggaatttcataaagctcgaagatacccttatcaaacaatccgcgtacctggttacatcatatttcatatccaagtttgatttccctattaaagttgtcacccaggtttttgttgccctattacgttcttctcatgtcgaagctaggtacttagttaagcaatcgctggacgttctcacccctgttctccatgaacgtatgaacgcagctgggacgcccgatacctggattaactgggttaaaagggtaatggtagaaaattcttctagtcagaacaacattttataccaatttttgataagccaccctgatttatttttcaattcaagagatttgttcatatcaaatattattcatcatatgaataagataacgttcatgtcaaattcaaactctgatagtcatactttagctattgatttggcgtcattaattctttattgggagaacaagaccttagaaattacgaatgtaaataataccaagaccgattccgacggagatgttgtaatgtccgattctaaaagtgatattaatccagttgaggctgacacaaccgcaataattgtagacgctaataacaactcgcctatatctttacatttacgcgaggcttgtacggcgtttttgataagatacgtgtgtgcaagtaatcaccgtgccatagaaacagaactaggattaagagctatcaatattttatcagaattaatctcagataagcattggacaaacgtcaatgttaaactggtttacttcgagaagtttttgatatttcaagatctcgattccgaaaatattctttactactgcatgaatgctttggatgtgctttatgtattcttcaaaaataagacaaaagaatggataatggaaaacttacctaccattcaaaatcttctagaaaaatgtatcaaatctgatcatcacgatgtacaggaagctctgcaaaaagttttgcaggtaataatgaaggcaataaaagctcagggtgtatcagtgataattgaagaagaaagccctggtaagacatttatccaaatgttaacctccgtgataactcaggatcttcaggaaacctcatcagttacagctggtgtaactctagcttgggtactcttcatgaactttccggataacatcgtcccattattaacgcctttgatgaagacgttcagtaagttatgcaaagatcacttaagcatttcacaaccgaaggacgccatggctctggaagaggcaaggattacgacgaaacttttagagaaagttttatatatattatctttgaaagtctcactcttgggtgactcccgtcgtcctttcctctccactgtggcacttctgattgatcactccatggatcaaaattttttgaggaaaattgtcaatatgtccagaagctggatattcaatactgaaatttttccaactgttaaagaaaaagcggctatattaacgaagatgctggcgtttgagattagaggggaaccttcattgtcaaagctattctacgaaatagtcttgaaactgtttgatcaagaacattttaataacacagaaattaccgttagaatggaacaacctttcctcgtaggaacgcgtgttgaagacatcggtataaggaaaagattcatgactattttggataatagtttggaaagagatatcaaagagagactatattatgttatacgggaccaaaactgggaatttattgctgattatccatggttaaatcaagctttacaattactatatggttcttttaatagagagaaggaattatctttaaagaacatttattgtttgtctccaccatcgattttacaagagtacctcccagaaaatgctgaaatggtaaccgaagtaaacgatctggaattatcaaactttgttaaaggtcatatagcttccatgcaaggtttatgtcgaataatctcttcggatttcatcgattctttgattgaaatattttaccaagatccaaaagcaattcatagagcgtgggttacgttatttccccaggtatacaaaagtattccaaagaatgaaaaatacgggtttgttcgatctatcattacattgctttctaaaccttatcataccagacaaatttcctctaggacaaatgtgattaatatgctattggactcaataagtaaaattgaatcgttagaattaccccctcatttggtcaaatacttggcgatatcatacaacgcttggtatcaatcgattaacatcttggaatccattcaaagcaatactagcatcgacaatacaaaaattatcgaagccaacgaagatgcgctattagaactatacgtcaatctacaagaagaagacatgttttatggtctttggagacgtagagcaaaatacacagagactaacattggtttatcatatgaacaaattggcctttgggacaaagctcaacaactttatgaagtggcacaggtcaaagctcgtagtggtgccttgccctactcacagtctgagtatgcactatgggaagataactggatacagtgtgctgaaaaattacaacattgggacgtattaactgaattagcgaagcatgaagggttcacggacttattattagaatgtggttggcgtgttgctgattggaacagtgatcgtgatgcacttgagcaatcagtaaaaagcgttatggacgttccaactccacgaaggcaaatgtttaagacctttttggctcttcaaaatttctcagaaagcagaaaaggagatcaagaagttagaaagctatgcgatgaaggaatacaattaagtctaataaagtgggtgtctctgccaattagatatacaccagctcataagtggctattacatgggtttcaacagtacatggaatttttggaagcggcacagatatatgctaacttgcatacaacaacagtacagaatctggattctaaagcccaagagattaagcgcatcttgcaagcttggagagaccgtctaccaaacacatgggatgatgtgaatatgtggaatgacctagtaacatggagacaacatgcattccaggttattaacaacgcatatctcccattaataccggcacttcaacaatcaaacagtaatagcaatattaatactcatgcatataggggatatcatgaaattgcctgggtaatcaacaggtttgcacatgttgcaaggaagcacaacatgcctgacgtgtgtatcagtcagctggcacgtatttacaccctaccgaatatagaaattcaggaggctttcctaaagttaagggagcaagctaaatgtcattaccaaaacatgaacgaattaacaacgggtctggatgttattagtaatactaatttggtttactttgttactgtccaaaaagctgaattcttcacattgaagggtatgtttttgtctaaattacgcgcatatgaagaggcaaatcaagcctttgcaacagctgttcagatagacttgaacttggctaaagcgtgggcccaatggggtttcttcaatgaccgtcgtttgtcagaagagccaaacaacattagttttgctagtaatgcaataagctgttatttacaagccgccggcctgtataagaactcgaagattagggagttattgtgcaggattttatggctcatcagtatagatgatgcttcgggcatgctcacaaacgcatttgactcctttagaggcgaaatacccgtttggtactggattactttcattccgcaactattaacctctctatcacataaggaggccaatatggttcgtcatatcttaatcagaattgctaaaagttatcctcaagctcttcacttccaattaagaacgacaaaggaagatttcgccgttatccaacgacagacaatggctgttatgggggataaaccagatacaaacgatcggaatggacggcgccagccttgggaatatttacaagagttaaacaatattctaaagacagcttatccattgttggccttatccttagagtctcttgttgcccaaataaacgaccgtttcaaatctactactgacgaagatcttttcaggttgataaatgtcctattgatcgatggaacgctgaactacaatcgcttaccatttcctaggaaaaatccaaaacttcctgaaaatacagaaaaaaatttggtcaaattttctacaactttgttggcgccttatataagaccaaagttcaatgccgactttattgacaataaaccggattacgaaacttatatcaagagattacgttactggcgaaggaggttggaaaacaagcttgatagagcatcaaaaaaagaaaatctagaagtattatgtccacatttaagcaacttccatcaccaaaaattcgaggatattgaaattcctggccagtatcttttgaacaaggataataatgttcactttattaaaattgccagatttttacccacggtcgattttgttcgcggaacacattcttcatataggcgtttaatgattcggggccatgatggcagtgtacattcatttgctgttcaatatccagctgttcgccattcaagaagagaagaaaggatgtttcaattgtacagattattcaacaagtcattatccaagaatgtggaaacaagacgtcgcagtatacagttcaatctaccaatagcaatcccgctatctccacaagtccgtatcatgaatgatagtgtttcttttactacccttcatgaaattcacaatgaattttgcaagaaaaaaggatttgacccggatgatatccaagattttatggcagataaactaaacgcagcgcatgatgatgctctgcctgcgccagatatgaccatattgaaagttgaaattttcaattcaattcaaacaatgtttgtaccatcaaatgttttaaaagaccattttacgtcgttgtttactcaatttgaagatttctggttattccgtaaacaatttgcgtcacaatacagttcgtttgtcttcatgtcttacatgatgatgatcaataaccgtactcctcacaaaatccatgttgacaaaacctctggtaatgtatttactttagaaatgttaccctcaagatttccatatgaaagggtgaaaccattgctaaagaatcatgacttaagtcttccaccagattctccgatatttcataataatgaaccagttccattcagactgacgcctaatattcaatctttgataggtgattctgctttagaaggtatatttgcggtaaatttatttaccatatcacgtgcattaattgaacctgataatgaactgaacacatacttggccctattcatccgtgacgagatcatatcatggtttagcaaccttcaccggccaatcattgaaaatccacagttacgtgagatggttcaaaccaacgttgacctaattattagaaaggtggcacaattgggccatttgaattcaacacctacagtcacaacccagttcatcctagactgtattggcagcgctgtcagtccaagaaacttagcaagaacagacgtgaacttcatgccatggttctag

SEQ ID NO: 80171 - DNA, 1347 bp, Saccharomyces pastorianus
atgtacggttgctactgcatgacacataagccccctggcaatagtactgtggcagatttcattcataatataagatctgaattacaactaagtgaaattgaaaaaacaataaagatttacactggatatctattggatgagtcattagccttaactgtacaaatcatgagtgcaaaattgctgcttaatttagttgaaagaatattaaaattgggaaaggagaacccacaagaggcccctagagcaaagaaattgttaatgataatcattgactcatatatgaatagatttaaaaccttaaacagacagtacgatacaataatgaagtactatggaagatacgaaacgcataagaaggagaaagcagaaaaggtcaaaaactctatacaggataatgacaaagagagtgaggaatttatgaggaaggtactggaaccatccgatgacgaccatttgatgccacagcctaaaaaagaagatatcaatgatagtcccgatgttgaaatgacagaatctgacaaagtggtgaagaatgacgttgaaatgtttgacataaaaaactacgcacctatattattactacccacaccaacaaatgatcccatcaaggatgctttttacttatacagaactttaatgtctttcttaaaaacaataattcatgacttaaaagtctttaacccacctcctaacgaatatacggttgctaatcctaaattgtgggcttctgtttccagggttttttcatatgaggaagtcattgttttcaaggatttatttcacgaatgtattattggtttgcaattttttaaagatcataatgaaaaattatctccagaaacaacaaaaaaacattttgatatatcaatgcccagcctaccggtctcagccaccaaagatgctcgtgagttaatggactatttggcatttatgtttatgcagatggataatgccacttttaatgaaataattgaacaggaactgccatttgtctatgaaagaatgctggaggattctgggctgctacatgtcgcgcaatcctttttaacaagtgaaataacctccccaaattttgctggcatccttttaagattcttgaaagggaaattgaaagatttaggaaacgttgattttaacacttctaatgtcctaatacgacttttcaaattgtcctttatgtccgtcaatcttttccccaatatcaatgaggttgttcttcttccacacttaaacgatctaatactaaactccctgaaatactcaaatacagcagaagagcctctagtatacttatatcttattagaactcttttaagaagtataggtgggggcagatttgaaaactta

SEQ ID NO: 80172 - DNA, 108 bp, Saccharomyces pastorianus
  modified_base (36)..(36): a, c, g, t, unknown, or other
atggcaaacctaatgggtcatacggggtgtggattnagatggtgtaaagtttcggcaaatcctctctccaagttcgaaaaaaaattatacaactttttgggattttga

SEQ ID NO: 80173 - DNA, 957 bp, Saccharomyces pastorianus
atgaaaccaatggcccatagcaaagataacaaggacattctcttgcaacctctgaacagcatacctagttcttctacacttaacactattagtggtaatagcagcaataatttaacctcatcaaactacttttccaacgaaaaggaaggctcaagggtcgatggtgactttaaacgcaacaacccaaacttaaaactacaaatgccactacctacacctgttgtgagaaataaacttcttgatccaaatacagcaacctcacagaataacaatggcatgccggggagcgctggcatatccacgaacgaaaatattaatcaatttggatttaacacaagcagtgcgtccaacatccctgtctcaatgactccaattagtgagaaacacattgattttgggggcaagatcaagagaagtcaaagcatttctaacaggaagaactcttctgcctcggaacacccattgaatattcttggctcatctgtttccggcaatgtttccggtatcggtaacaacaatgttggctctaacaacaacagcggccctaataacagtgttcctctttctgctaatacaggaaacactactatcaaagccaattctacgactatcacaacttcaagttctgccgcggcatcaacgactgcaccaatttcacaacagactattccatccggaacacaattcaatcatattctgagttccgccgcaacagctgcaaactcggttaattctttaggctttggcatgtgtcctcctccacagagtttacaaatggaaatgttcttggacttagaatcgtttctgccaggaaaacagaggcgggtagacaggaaaccccaggttctgaaagaactggaaaatcttttacaaatgttcgaagaaggtttgccctgcattgaacacgctttaaaggaacaacttatttcaacgcctatcaaggataatgagcattaa

SEQ ID NO: 80174 - DNA, 2253 bp, Saccharomyces pastorianus
atgacgacgaagccacaaaatagtaagcagggtttagccgaaggagagatggatgtgagttcacttttcaagagaacggaagttattgggcgagggaaatttggtgtggtttataagggctataacgtgaagactggacgagtgtatgctatcaaagtcttaaatttagattctgattctgacgaggtggaggatgtgcagcgagaaattcagtttttggcctccttgaaacagatttccaatatcacgcggtattatgggtcgtatttgaaagacacaagcctttggatcataatggaacactgcgctggtggttcactgcgttcgttgttaaggccaggcaaaatcgatgaaaagtacattggggttattatgagagaactgcttgtagcattaaaatgcattcataaagataacgtcattcatcgagatatcaaagcagcaaacgttctgatcactaacgaaggtaatgttaaactatgcgattttggtgtcgctgcacaagtaaaccaaacttctttacgacgtcaaactatggctgggaccccctactggatggctccagaagtgatcatggaaggcgtttattacgacactaaagtagatatatggtctttaggtattacaacgtacgagattgccaccggaaatccgccatactgcgatgtggaggccctaagggcaatgcaactaatcatcaaatcgaaaccaccaaggcttgagggcagatcatacagtacatctttgaaagaatttattgcgctttgtcttgatgaggatccaaaggagagattgtcagcagacgatcttttaaaatcaaaatttatcagggcccacaaggcgacgccaacgtccattttgaaagaactaatatcacgatatctactatttagggacaagaataaaaacaaatataaaatagagggcagtataccggaaaatgagccatcaaaacccagtgaatctccaaaaccatcacaaaatggcgggggtgatgaagcacaaaagtcaatagcatcaaatgataatgaaattaagagagtgaacgaaggcgatgtggaaatgaaatgggattttgattcattgagttcgtcggattatattattgaaaataatatcaacctcgatgctttggctgaggacaacaacgagtgggctactgcccaacatgacctgttcaactatgcataccctgacgaagactcttattactttgaccctacaagtcatagtactagaccctttgtttatcaagggacaacgataggaaagggctatcctggtacaatagctcaaaattctactttgaatgcaccagtaacaaataactatacgaactcaaaatacccttccaaaatggtagctggaactacaaacacctctggaacacatacggccggtccaatgacatcatctaagaagctggaaagtaaggctccaaaacaattacttgaactttttgaagacaatgaaattattactgctgaaaatgatgtcaatacagaagctcctaaaataagcaaatccatttcatctctaaatgctggtaatagttcacgagatgatttcattccctcaatatccaacgaggtcaacggaaatatcaataataataaaatgcgaccacaccttccacctttatccagtgggaacaattattatagccagagtacacctgctttgccgctactccaaacaaaatttaacaagacgtcaaagggccctccaacaagtggattaactactgctccaacgtctattgaaatagaaattcctgaagaactaccgaatagtgctctaccaacgcctgcgagcgcagatccggttttaataccaagcacaaaggccaggtcatctacagtgacggctggcactccttcgtcatctagctcaatacaatataaatcaccttcaaacgtgcccagacggttgacagtcagtagcaataggccagaacattgcccaagcaccataacaaatcaaaaattggggtccgcagttgcttctaattccggaatcagctccactccgaacaacagtaataactataacaacaacactgatagtgagaactcaagaggaagcagcggtagtaacactgcaaatagcacacaaatgggcataaccaatccaggtaatgtaacaaagttatctactcataaggcttcttcaccctcaaggccactatttggagttggaacttctcccaatagaaagcctgccggttcccccaacccaaaacattggtcataa

SEQ ID NO: 80175 - DNA, 1290 bp, Saccharomyces pastorianus
atgcctgcaggtcaagtacttgtgacaagaaatggctcttccattattgcgtttgctgttggtggaaagtgggagcctggtaatccaattgccattacgggtgctcacaccgactcccccgcattaaggattaagcctatttctaaaagagtcagtgagaagtatttacaagtgggcgtggaaacttatggtggcgctatttggcattcatggtttgataaggatttgggcgttgccggaagagttttcgtaaaggatgcgaaaactggcaaatccattgctagattggtggatttgaatagacctctgttaaagattcctactttggctattcatctggacagagacgtaaatcaaaaattcgagtttaatagagaaactcaactgttgccgattggtggtctgcaagaagacaaaactgaagcgaaaattgaaaaggaaattaataacggtgagtttacctccataaaaacgatagtacagaggcatcacgcagaacttttggggctaatagccaaagaactcgccattgatacaattgaagacattgaagacttcgaattgatcctttatgatcataatgcatccactctaggtgggttcaacgatgagtttgtcttctctggtagattggataatttgacatcttgtttcacatcaatgcacggtttaacgttggcggctgacacagaaattgaccgagaatcaggcattagattgatggcatgctttgatcatgaggagattggctcatcctccgctcaaggggcagattctaacttcttgcctaatatattggaaagattgtccatcctgaagggggacggttctgatcaaactaaaccattgttttactcggcaatattggaaacttccgctaagtcgtttttcctttcatctgatgttgctcatgcagttcatccaaactatgcaaacaaatacgaaagccaacacaaacccttattgggtggtggtcccgtaatcaagattaacgcgaatcaacgttacatgaccaattcaccagggttggtcttggtgaaaagactagcagaggctgctaaagtccctttgcaattgtttgtcgtagctaacgactcaccatgcggttctaccatcggccccattttggcctcaaagacaggtattagaactctagacttgggtaatcctgtgttgagtatgcattcgattagagagaccggtggctctgcagacctggagttccaaatcaagttatttaaggaattttttgaacgctacacttccatagaatcagaaattgttgtctaa

SEQ ID NO: 80176 - DNA, 258 bp, Saccharomyces pastorianus
atgttcaggatacaactgagaactatgtccagcaaaacatgcaagagtgattacccaaaggagtttgtcagtttcttaaatagctcacactctccttaccatacagttcataacatcaaaaagcatctggtgtcaaatggcttcaaagagttgagcgaacgtgactcgtgggctggccacgtcgcacaaaaaggaaagtactttgtgacaagaatggctcttccattattgcgtctgctgttggtggaagtgggagcc

SEQ ID NO: 80177 - DNA, 192 bp, Saccharomyces pastorianus
atggaaaaaattgacgaggccatagaattgtttgaagattctgcaattttagcaagaactatggatgaaaaacttcaagctactaccttcgcggaagctgcaaagatacaaaagcgtttgagggctgatccaatcataagtgcaaagatggagctaacattagctcgttataaggctaaaggcatgctttag

SEQ ID NO: 80178 - DNA, 1323 bp, Saccharomyces pastorianus
atggccgaaaactccctcctgaggtttatcaccaagaacaaagtggccatcctagcaacggtctctgcggggactgctgctgtgggtgcttatgtttactacctgcaaattaagcagcagcaacagcagcaattgaagggtacaaaagacaaccgacgtcaaagtgaggcctttgctggtcaaaatgaagacgaggcggacttaaaggacgacggcagcgtcgtaagtggaagtaataagaggaagaagaagaagaataaacgcaagaggaacaataaggcaaaattgggagaagggtttgactatccctccttgcccaatggcgagcctgatattgcccaattgaaaggcctatcaccctcccagagacaagcatatgccgtgcaactgaagaacagaggtaaccacttcttcactgctaagaattttaatgaggccatcaaatactaccagtatgccattgagctggacccgaatgaaccagtgttctattccaacatatctgcttgttatatttctacgggcgacttagagaaggttatagagttcactacaaaggcacttgagataaaacctgaccattctaaagccttgctgagacgtgcatctgccaacgagtcactgggcaacttcactgatgctatgtttgatctatctgttttgtcattgaatggtgactttgatggagcctccattgaacctatgctggaaagaaatttaaataagcaagcaatgaaagtactaaatgaaaacctatcgaaggatgaaggcagaggctcgcaggttttgccgtctaacacatctctggcgtcattttttgggatttttgactctcacttagaagtttctagtgtgaacaccagttcaaactacgatactgcatacgctctattgtcagatgctttgcaaagactatattctgcaacagatgaaggttacttagtagcaaacgatcttttaacaaagtccactgacatgtaccactctctactttctgcaaatacagtggacgatcctttaagagagaatgctgccttggcattctgctacacgggtattttccatttcttaaaaaataacctgttagatgcccaagttcttttacaagaatctataaacctgcatccaacaccaaattcgtacatatttttggcattgaccttggccgataaagaaaactctcaagaatttttcaaatttttccaaaaagctgttgatctaaaccctgagtatccgccaacctattaccaccgtgggcagatgtattttattctacaagattataaaaatgccaggaagatttccaaaaggcccaaagcttga

SEQ ID NO: 80179 - DNA, 1560 bp, Saccharomyces pastorianus
atgttgaaaaaagtaaatgatctatcccgtatacttcaaaagtttagtttcggaaggggcgaggcattagaacttattcaaatggcacgttcactagaggtttcaagagaaataagaaaatatttactaaataacacgtcgttgatgaaagctacattaaagagtcaaatcacacagctgactgagtctttaaattttgaaaaaaatttgattgatgatattttgaagtttttaaatgaggaagagctagcaaagtcacaagatgctaaacagaatgcagatgtaactagaatgcttgacatagatgtaaaagacaagaaagaaagtaacaaagatgagatttttgaattaagagattttatcgtaaacccttcgttcaataccaaacttaggaaattgcatgacacttatcagggcgtttggcaaaaaaaaactgagtacaatgctttattaaaaggtttttttgttggcgacctaggtgctaagactttcaccttgaaggaaaggcaaaacggtgagtatgccctccatgtgacaggaacagcctctagtttaaagaaaattgatgagttaattagtaaatcgacggagtaccacggaagttgcttccatattttgcaaaaatcaagccaaacacgatggttgagtcacaaaatttggacagacttggggcacgagttggaattattaaatttaaagattaggaatgaagaggccaatattattgatctttttaaaaggaaatttattgatagaagtaacgaggtcagacaagttgcaattacactgggctatcttgataccttatcgtcctttgctgtgttagctaacgagagaaatttagtctgcccaaaagtggatgagagcaataaactagaagtagtgaatgggagacatctaatggttgaagagggtctttccgcgcgctctttggagacattcacggccaataactgcgaattggcgaaggacaatttatgggtaattaccggaccaaatatgggtggtaaatctacattcttaagacagaatgcaattatagtcattctggcgcaaattggatgttttgttccatgcagtaaggcgcgtgtgggtattgtagataagctttttagccgagttggttcagcagatgatctgtacaatgagatgagtacgttcatggttgagatgatagaaacatcgttcatcttgcaaggagctacggaacggtctttagctattctagatgagattggccgtgggactagtggtaaagaaggcattagcatcgcttatgcaactttaaagtatttgttagagaacaatcaatgtagaacgctttttgctacacattttggtcaagaactgaagcaaatcattggtaacaaatgttcgaaaggaatgcgcgaaaaggtcaagttttaccaaagcggaatcactgatttaggtggcaacaatttttgttacaaccataagttgaagccgggcatctgcacgaaatcagatgccattagagttgcggaattggccggatttccaatggaagcgttaaaagaagcccgcgaaatattgggataa

SEQ ID NO: 80180 - DNA, 663 bp, Saccharomyces pastorianus
atgaagcatttctttaagctaccgacagaattccggcccatttctagggtttccttacgatattctagtactgataccgctcaaccaaaaatatcaaaactcaaaattagttttaataaaatttctgaatcaaatagcgaaaaaaaagataatttgggttcaattgacacacgaaattgtctttcgactcagcaagatgacaaactatcaagcactgagccctcgaaggcttcccttccaccatcattacaatatgttcgtgacttgatggatttgtataaggatcatgtggttttaacacaaatggggtcattttatgaactttactttgaacaagcaattagatacgctccagaattaaatatatcattgacgaatcgagcttatagtcatggcaaagttccatttgctgggtttcctgtacaccagttaagtcgacatttaaaaatgcttgttaacaattgcggatacagtgtaactatcgcagagcaattcaaaaaaaaggcacgtggccagcatcaatgcaagccaataaattctcataggagcagtgcactagcaatcgttactccccggcacttttcattgatgaagcatttgacactttgcagggcaacatcacatatctcctgcacacatcgaatttcctgcaaaactgtatga

SEQ ID NO: 80181 - DNA, 1041 bp, Saccharomyces pastorianus
atggcgcccaacatcatcacattatcaggatttgctcttatagttatcaacgtgttgactgtattctattacgatccaaaccttaacacagatacgcctcgctggacatatttttcttacgctttaggtgtatttctatatcaaacgttcgatggatgtgatggtgtacacgctcgccgtatcaatcaatcaggacccttaggagaactattcgatcatagtattgatgccattaattctactctgtctattttcatcttcgcatccgaaactggaatgggattttcgtataacttaatgttatcccaatttgcgatgctgacgaatttttacttaagtacttgggaagagtaccatacacacacattatacttaagtgagttttctggacccgtggaaggcatcctgattgtttgcgtttcattgatactgacaggtatatacggaaaacaggtaatctggcatacctacttatttacaattacagttggtgataaggtaattgatgtagacactctagatattgttttttccctagctgttttcggtttggttatgaacgcattgtctgcgaaaagaaacgtggataagtattatagaaacagcacttcttcggccaacaatatcacgcaaattgagcaagatagtgctataaaaggtctgttgcccttttttgcctattatgcaagcatcgctttactagtatggatacaaccaagctttattacactctctttcatcctttccgttggtttcacgggagcatttaccgttggaagaataatcgtttgccatttaactaagcagagctttcccatgttcaatgcacccatgttaattcctttgtgccagatagtattgtacaaaatatgtctatccctttggggaattgagtctaataaaatcgtctttgccctatcttggcttgggttcggtctctcactaggtgttcacattatgtttatgaatgacattatccatgaatttactgagtacctggacgtttatgctttatccatcaagcgctccaagctgacataa

SEQ ID NO: 80182 - DNA, 2541 bp, Saccharomyces pastorianus
atggctctgccaatagagggcaaattatccatggcaaataataggatcgaaaggttaaaatcaccctcgtcttcatcaacatgctcaatggacgaggttctcattacttcaagcaataacagcagctctatatgtttagagaccatgcgtcaacttcctcgggaaggtgtttctggtcagataaatattatcaaggaaactgcagcttcgtcctcttctcacgctgctctcttcatcaagcaaggtctttacgagcatatagatcccctccctgcttatccaccgagctatgatctagtaaatcccaataaagaggtccgctttcctatatttggtgacacggcaccatgcccaaagtcttctctccctcctttgtatgcacctgcagtatatgaattgacgttgatatccttaaaattggaaaggctttcaccttatgaaatttctagtaacaggagctggaggaatttcatcattgaaattaattcgactcaactaaatttttaccatattgacgaatctttgacgaaacacattaggaattattcaagcggggaaacaaaatctgaaaaagaggatagaattcatagtgacttggtccatcgcagtgatcaatcacaacatctgcatcaccgtctcttcactctaccgacgagatcagcttcggagtttaaaaaagcagatcaagaacgggtctcttatagagtgaaacgtgatcgatcgcggtatttaaccgatgaagctctttacaagtctttcactttacaaaatgcaagatttgggataccaacggattataccaagaagagttttgtgttaagaatgtcttgtgaaagcgaacagtttttattacggttctctcatatagatgatatgattgactggtctatgtacctatcaatcgggatatctgtgtctttggacttggaagtcagggagtatccagattatcgaattgttcccagaagaaggagaaggagaaggaggagaaggaggagaagaagacacactcatagaagtgagagttcgatggggtctttttcgcagagattcattcgttcgaattccagaccggacttaatccaaagatatagtaccgggtctagcaccaataacaatacaactatcagggaacgctcgaataccttcacagctggtctactagatcattactgcactggcctctcaaagacgcctacagaggcattgatatcttcggctgtatcaggagaatccagtgataacagtaccctgggatcaacaaggtcattatctggttgctcagcttcccgttcgattgcatctagaagtttaaaatttaaaattaagaactttttcaggcctaaaaattcttcacgcacagaaaagcttcacagactcaggtccaactcaagtaacttaaatagtgttattgaaacggaagaagatgatgaacaccatgaatcaaacgggggagatcatccagagcctggtgtttcagtaaataccaccattaaagtagagcgtccaatgcacagaaatagagctatttccatgccccaaagacagtcattgaggcgtgcaattagcgaggaggttgtccccatcaaatttccaaatagcacagtggatgaatcagttcattcaccctctcctattgagcatctttccgttgatggctgcgagattatgctgcaatcacaaaatgcggttatgaaagaggaattacggagtgttgcgtcgaatttggtagccaatgaaagggatgaggcatctgttagacctaaacctcaaagctcttcgatatacctatcaggattagctcctaatggggaatccgccacagatttatcccaaagcagtaggtcgttatgtctcacaaaccgtgacgctgaaatcaatgacgatgaaagcgctactgagaccgatgaggacgaaaatgacggtgacaccgatgaatatgctggcgatgatactaatgatgatactgatgacagtaatattggttatgcttatggcagtgaaagtgattattcatgtttaattgaagaacgaataagaaatcgaaggcgagcatcatctactctaagttgcttctccaatataccttacggaacggatgatattaaatggaaaccagctattaaggaaatttcaagaaggcgttatttgagggattctctgaagtgcatcaaaccatttctagatagtaacgactgtttgggtaaggttatctatattccagtttcgggaccaacctttgaaacaagtaataaaattcactttagcaaccgccagagcttacagaagcagaagaatcattttttaaaaggcttcatcgtgggacctacggcgttgatagaacttaattgtaaaaataagaatgcaattgttggaacaacaaaggacgctgaagatcatggggaggacgacggtgacggtgatgatggtgaggatgatgatgacgacgacgaagacgacgacgatgacgatgacgatgatgacgacgacgaagacgacgacgatgacgatgacgatgatgacggacagattactgcataa

SEQ ID NO: 80183 - DNA, 285 bp, Saccharomyces pastorianus
atgttgatgaagacgagggtgattttaacctttcgatcctattatttgccatggataatttgccctctattggcagagccatccttaacaaacgaacaacttgtatgcacgatgtcggatcaaaaatatactgtggccccaagaaacaacgatttcttttgtgctggtcaacaaaattgtaatcttttcggtggaccctattatgaaacttttctcttttttttttttcttactgtaagacagttagatgcacccacctcactgaagcttgatgattacgactaa

SEQ ID NO: 80184 - DNA, 246 bp, Saccharomyces pastorianus
atggtctctaaacatatagagctgctgttattgcttgaagtaatgagaacctcgtccattgagcatgttgatgaagacgagggtgattttaacctttcgatcctattatttgccatggataatttgccctctattggcagagccatccttaacaaacgaacaacttgtatgcacgatgtcggatcaaaaatatactgtggccccaagaaacaacgatttcttttgtgctggtcaacaaaattgtaa

SEQ ID NO: 80185 - DNA, 297 bp, Saccharomyces pastorianus
atgacaggaataagtactaacacagggatagtgagaaaaaggggcaaaggtgtgaagttagggagtttgcatccagagggtatatcatctatagatagaggtaattccccgagagagttggcggcttttgcagccgaaaggagatatagagatgatcgctggtgcggagagacgaagaataacaaagatcaaataataagtgataatattagcagctccttagaagttgtaatccttgatgatgatgacgaggtactcccgggagatactcttatcgaagttattgatctcacttaa

SEQ ID NO: 80186 - DNA, 84 bp, Saccharomyces pastorianus
atggagtgtataatgggcaccatgctgcacgaattaactcacaatttattcggtccacacgacaaaaagtctacaataagctag

SEQ ID NO: 80187 - DNA, 741 bp, Saccharomyces pastorianus
atgagtgatgttattaaattgtgtggattccttggtgttttaccaaaggaaagaatagaaaacgatgaaaaggccggcgacttcatgcaacctgtatatatcaattatgatttcctgtctctttcaaaaaattttacaaaattgaccgtgttttatttaagcagtgtcatcattaagaccatgaaagttttactggcaatggtaatggttatcttcaaatgtttttcaaaagttaacaaaactttatactattgtcttttgatatctgcggtaaccaatttgttctttgttggtaaatctattcattcatatttctccgtaaagtcagccgaaaccctatttcagaactatgccaatggtgatcagcgaggacttcaaatcatgcatcggtctttgacagtgcctgatttgaacctacttacaagaaaaatgatggataacgaccaggaaaatccagtattcaagagatttgacgaagacaaaaatgcataccagtacaaaggaacaaggcaagaaattgcaattaaacgaaaccaagtgctgacggaattaaaaattctacaaaatacggaaaaggaactcgtacagggaagttacagaaaattcataataacagaaagagacaaatgcatcaccactcagaatgaaatctttgatttatggataaacgataccaaactacaagattattgtatggcatgttttgcagagtacaacagattatctgccattccagtctga

SEQ ID NO: 80188 - DNA, 2811 bp, Saccharomyces pastorianus
atgcatgaacacaaagcggagctacggctaataaccgttgcacttaacgaagcatccaccgattccccctcttttagagcttctgtcaattatttccataccagaatggaatctctgagtagttggatgcacagtactgtggattatgtagaaaatacgtacaagccttcgttccaagacttccaaagaataaaggagacactattttcacagctgctcccttctcctatattactctccaatggatttgtcagtaaccagccatatactcccttgcttgtaagagactttactagagatgtcagtgacctttcaaatacggttatgaaaataattttaggtgatgaaaactcacaatacactgcggcattgtctgctttgagctctgatgctattaacccttacttcaacaagagaaaaacttttgaatactaccaaaggaagtatgattcgtttttaactgactttttagcggccactaatgatggcaatactttaattccacaaaatctgcaaaatgaaacattcaaattattcgatattaaacacaaatatatagaagcttccttggatttgactgaggctatttcgttaatgaaagttaatttggataaattcctgatagagacaatagacattgtgcgcaaaaataacgttattactaccaaggacaccaaggacgttatcgacattactcccgaacttacggaaacattaaaggattggaccgattggatagaaagtaaccttcagactttacaagcattgtcatccaagctatctgaagctaagtatgccattctgaagctcagcttggcaagaatgaagccatctcgcctgatacaagactatgatttgaaaagcatacaaaatttgaagtttaaccttccaaaatcgataagtaacggaaataattctgaggaaaaagggctatcgggttggttgtacatgaaaactacagttggtcatgatccgaaaagagttgtgtgggtaagaagatggtgctttctacagaacaatgtttttggagttttttcactgtcgcctagcaaaacttatgtcgaagaaaccgataaattcggtatattatggataactgtagaatatctgcccaaagaacctagaaatttttgtttcaaactgaggattcaaaatccaaattgcaaaacagaagaagaaaatacatacatagatatcatcctgcaagctgaaagtattgacgagttaaaatcgtggataaacaccttaacttctcacaaaagaatcgcattgtcgataaaggaggaaaacgatcctcgttatcaattggcgagaaaaaaaattgaacctcaatttttcgagtttgcttcaagtagctcaacgtcaacagataaattattaacttcattttccagtaaaactttgacattggtagaagagctaaaaaaaaattatatgtcagaggatgatatatactctatcattgataataaggcataccatctgagagtaatttctacaccgatagccacgcagttgactcatttggctttattctctacatttctatctgtatcaaattattatccgtgtgctacccaggcaaacacctggggtacggcaaattggaatgatttgtcctatttagtcaatccactcaaaggaagttcagtacacaagccagccacagtatcgaattcttccaggttttccgttagctaccccgactattatccatacagcctgaaagtcgatgatatacaatttagatcaattttcttttcagtgaatcatgattttttacaagtcccaaaagaacttgttcttttaagatattcatcggtgtggtgcccgaacaataaacaaaaatttgcatctatggcttttgttacccttaaccacatttatgtctatttaaatatttcaggcttttcatatttgagaagaatagatttactagatatcgactcaatcgaatatgataaaagcccaaaacatgtttcttcaagaatgctgcacatgcaaagaggcgatggactcaggtttaatatgtccgtcttttttacagatcgaagagcagttgcctcaaagttacaatttctgatagaaaataaggcaatgcatatcccaaagggcgaaaaagaggttttagaaaatttccaggaattagacgaagagattgagaacgaaaaaaaaatcatcaaagataatttgtcagaatcagaacattattcaaaagattatgattatctattgaagagcacgtatgaccatcattttgagaatactaacgaaacgcctatggaattaatgagcaggaaagtccgtttagaaagggaagcctggtgctactttcaagacaattttaaagtcggaagcaagacgctattccacgttctttttggagacaaatctcaagtttttccaagttcactatttctttgcaagaagggcagtaacttgaataacaattcatactgggagcgcattaggcgcgcgaaagaagatgcaagttgtcaatttgaactttgccgtaagttacagtttcaactgaatcgaacttctaattttatcaaagatctgttatggttgaaggatgacaatgacaacttcaaattagttcttcagcagcgtgtgacaaaaataaaacaaggttattattttgaggtggaagaaggtcccattattgtgaaatttccgctatgccatcccttactccttcgtgtgaggttcataattgcagaatgtatcacctctcaaggagagtccctcaaaaaatgtgacctggcaatactatatgacttcaactatgtgattctattgataagttga

SEQ ID NO: 80189 - DNA, 750 bp, Saccharomyces pastorianus
atggtgacagtcggtgtgttttctgagagggctagtttgacccatcaattgggggaattcatcgtcaagaaacaagatgaggcgctgcaaaagaagtcagactttaaagtttccgttagcggtggctctttgatcgatgctctgtatgaaagtttagtagcggacgaatcactatcttctcgagtgcaatggtctaaatggcaaatctacttctctgatgaaagaattgtgccactgacggacgctgacagcaattatggtgccttcaagagagctgttctagataaattaccctcgactagtcagccaaacgtttatcccatggacgagtccttgattggcagcgatgctgaatctaacaacaaaattgctgcagagtacgagcgtatcgtacctcaagtgcttgatttggtactgttgggctgtggtcctgatggacacacttgttccttattccctggagaaacacataggtacttgctgaacgaaacaaccaaaagagttgcttggtgccacgattctcccaagcctccaagtgacagaatcaccttcactctgcctgtgttgaaagacgccaaagccctgtgttttgtggctgagggcagttccaaacaaaatataatgcatgagatctttgacttgaaaaacgatcaattgccaaccgcattggttaacaaattatttggtgaaaaaacatcctggttcgttaatgaggaagcttttggaaaagttcaaacgaaaactttttag

SEQ ID NO: 80190 - DNA, 120 bp, Saccharomyces pastorianus
atggtaatagtggtatattatataaagaggaaaggcctcgaggataatagaaggcaatgcaccatcaattgctttacccctggtccgcgaccaaatggtgacagtcggtgtgttttctga

SEQ ID NO: 80191 - DNA, 810 bp, Saccharomyces pastorianus
atgtgcggcgatattgtaactttgtctaatttcctaatttatgataataaattaaaatgcgggaataacgaagtttttgctcaatctttagagttaccaatgcctgaggccttgtcgcaatataggaatgaatcggctaactctaagcagtggcttgaggatatactagagcctacaagaaaagtggtatttttaaattatgataactgcccggatattatcgaacaaagcgaaaaggataacattacgaatcacggggaggcagaattgactctacaatgtgtggaaggaatgttattgagcggcgtaccatgcgaagatattggcgtaatgacgttatacagagcacagttaagattactgaagaagatattcaacaaaaatgtgtatgacgggctagagatcttgactgctgatcagtttcaaggtcgtgacaaaaagtgcattattatttccatggttagaagaaattctcaattaaatggaggagcgctgctgaaagagctaagaagagtcaatgttgccatgacaagggccaaatccaagctgatcattataggttcaaaaagtacaatcggctctgttcctgaaataaaatcgttcgtgaacctgttagaagagcgtaattgggtctatacaatgtgcaaggatgcactctacaaatacaaatttcccgacagatcaaacgctattgatgaggcacgcaaaggttgtggaaaaagaacaggtgccaaacccatcacatcaaagtctaaattcgtaagcgataaacctatcataaaggaaattctacaagagtatgaaagttga

SEQ ID NO: 80192 - DNA, 504 bp, Saccharomyces pastorianus
atgaccgcggagatccttagaagaaccctgaagcagttggaagtgagggtagcgtcgttgcactctcaaatgccccaacaggaaagaacaaattccttacatagatttcgagctaacgctgcaagaatcctcatcgctacagatgtagcatccagaggtttggatatcccaactgttgagcttgtagtgaattacgatataccttcagacccagatgtattcatccatagatctggtcgtacggcccgtgctggcagaattggtgacgccatatcattcgttacccagcgagatgtttctaggatacaggccattgaggaccgtatcaacaagaagatgacagagacaaacaaggtacacgataccgctgtaataagaaaagccttgaccaaggtaaccaaggcgaagagggaatcgctgatggcaatgcaaaaggaaaacttcggtgagagaaaaagacagcaaaagaagaagcaaaatgacgggaaaagtttgcgctcttga

SEQ ID NO: 80193 - DNA, 219 bp, Saccharomyces pastorianus
atggcagactttaaatctttaggtctttcaaaatggcttacggaatccttaagagctatgaaaattactcagccaaccgctatccaaaaggcttgtattcccaaaatcttagaaggaagagattgtattggtggtgccaagactggttctggtaaaactattgcatttgcagggcctatgctgactaaatggtcggaagattcctttaggaggagttaa

SEQ ID NO: 80194 - DNA, 1092 bp, Saccharomyces pastorianus
atgaaagtttctggatgggaaaggaatgtgcaaggtaagctagcaccacgtgttgttgatttaagttcattgttagatcctttaaaaattgctgaccaatccgtggatttaaatttgaagctaatgaaatggagaattcttcctgacttaaatctagatatcatcaaaaacacaaaagtactactactaggtgctggtacactaggttgttatgtttcacgcgcattgatagcatggggggttagaaaaataacatttgtggataacggtacagtttcatattcaaatccagtgaggcaagcgttatataattttgaggactgtggaaagccaaaggcagaacttgcggctgcgtctttgaaaagaatatttcctttaatggacgctactggtgtgaaattaagtattcctatgatcggtcataaattagtaaacgaggaggctcagcataaggattttgatagattaagagcattaataaaagagcatgatatcatttttttattggtggattctcgagaaagcagatggcttccgtcgttattgagcaacatcgaaaacaaaaccgttattaatgctgctctggggtttgatagctacttagttatgaggcatggtaatagagatgaacagtcttcaaaacaactgggctgttatttttgccatgatgtggtagcaccaactgacagtttaactgacaggactttggatcaaatgtgcacagtaactagacccggcgttgctatgatggcctcttctttagcagttgaattgatgacttccttactacagaccaaatactctggttcagaaacaacagtattaggggatatacctcatcaaatacgtgggtttttgcataatttttccatcttaaaattagaaactccagcctatgagcattgcccagcatgtagccctaaagttatcgaagcatttacagacttaggttgggaatttgttaaaaaggccttggagcatccactttaccttgaagaaattagcggtttgtcagtcataaagcaggaggtcgaacaactaggcaacgatgtttttgaatgggaagatgatgaatctgatgagattgcttaa

SEQ ID NO: 80195 - DNA, 684 bp, Saccharomyces pastorianus
atgtcgtcagaaagggtcttaaattatgcaccagcttttaaatcatttctggatacatcttttttccaagaattatcgagattgaaactcgatgttctgaaattagattcaacatgccaaccacttactgtgaatctagatttacacaacattcctaaatctgctgatcaagttccattattcttaacgaatcgaagctttgaaaaacacaataataagcgtactaacgaagtgcctttacagggcagtattttcaattttaatgtattagacgagtttaagaatcttgataagcaactatttttacatcaaagagcattggaatgctgggaagatggaataaaggatatcaataagtgtgtttcttttgtgattattagttttgctgacctaaaaaagtacaggttttattactggttaggtgttccctgttttcaaagaccctcttcaacagttttacatgtgcggccagagccgagtttaaaagggctgttctcaaagtgtcaaaaatggtttgatgtcaattactcaaaatgggtgtgtatactggatgcagacgatgaaatagtaaattatgacaagtgtattattggaaaaactaaagttttggcgataagggacacgagtacgatggaaacgtcccttctgacctgcagccatcaagcgtgcactgccgtcgtttac

SEQ ID NO: 80196 - DNA, 1677 bp, Saccharomyces pastorianus
atgtttttgaagaagctattgaataatataagccaagactattgcacaatgctgtatgaatggctaacacagggtattttaaacgacccttaccaagaattcatgacttatgatgatttggaaggtaagacggataacatatttgacgcaagagacagagcgtgggatacgcaatacttcataagaaaagatgttttgttgcgggattgtgactcagaagaggataagaatctactattcaagatgttaaggaccggtattttactcaaagtgattcgagctagcttacaaatacccaccataccttctaatagcagtgatataaccattcaagaaatcaatgatttcgctgacttaatggagggttctaatcttgaactttacgtggataaatgttacagcagagccaatgaaatatttttaaagctattttttcaaggttacgatttgatcaatgtattaaaacatttgcaacaaatttttcttgggtatcaatctggtcataatgttttaaagtttctaacaaaaaatatgggtgagttgaccaaacactacaggaatgataataatgcaaactatgacaagctgctacaaaattttgagttagagagacaatccgaaaatccaaacaacctgatgaggcaactcctgatgatacagttcgatacagaaacacttccacaagtcttatcgcactacctccaaatttatccagaagtacctgagaataactcagcaaatgacgacagcgacccattgatgcacgcaaataatttcaagaatatgaatgccattctttttgatgaattgagcaaagaacgaacgggggcctaccatggatccaatctagaactatatactccaaaaagcgcaatttatcatttaaaatttgacatcaacataccttatccattgaatattattattagtaggacatgcatgataaaataccaaataatcctgcgctaccaactagttttacaataccactcaaggcttttagatgagacttggatggacttaaacaaaacacccagctggaaatacagaggctattcgcacactgtgaagaggaggatagtaagggccacgagagtgctgcatgctaaaatgaaccacttcatcaaaaccatcatggaatatttcaaccaaaacgtaattgataaagaggtatactcattagaaaagtgctacagaaatcctactcttgccgttgccatccaaaatgaactagaaggtggattaacaaatataatgacaaatcgttgcttgtctgacttgattccactacagttacaaatatttgacattgtatataagttttgcaagttcatcaaatctatgagagcaaaattatgtcaactggaccccgtactatatgagaaacacaaaagcgggatgatgaaaacactaaacgaaggctatcgtacaaacaatggcggtcaggaagatgttggttaccaagaagatgccgccctggaattaattcagaagctgattgaatacattagcaacgcgtccagcatttttcggaagtgtctcataaactttactcaagagttaagtactgaaaaattcgacttttatgatagttcaagtgtcgacgctgcgggtatagaaagggttctttactctatagtgcctcctcgctcagcatctgcttcttcccaaagatga

SEQ ID NO: 80197 - DNA, 753 bp, Saccharomyces pastorianus
atggaaatcaaagaggtagatgacagggcagagctactgagatataccaacaatattccgttacttggaaagctagtcaaccatcaaccattatggagtacaaatcctaagttaaagtccttttcgctagaaaaaatatcagcccctgatcaaaggcgtgtacaagaggcattagttgtaaaagacctattaaatgtattgattggacttgaaggaacatacatcagatattttaatgattatgaacctagtgacccagagacaccgatagaatttaagattgccaagaaaatggatccatcattcaaaacattcagtagaagaattgttaggtatggtaagcaatacatgatattaacaagggcgtatgaaaaatggtctgacacaagctttgggatggttttgcaaagatttgcttatgaaatcagaagattcttagaagacgtctacttaaaaacgttagttgaaaggcttgaaagggactttaacaaagtaccaaatttttctatcagagaactggaacaaatcattaatgaaacagaagtaaacaaacaaatggagttgctgtacaatatttatgaagaaatttgtagagaaatagaagaaagaaggacgaaccagtcttcacaagaagatttcaataattttatggacagtatgaaaaatgaaagcagcttgcacttacgattaatggtagcatttgacacaacagtatatccggtagacctgcaggcatgcaagctggcactgccg

SEQ ID NO: 80198 - DNA, 267 bp, Saccharomyces pastorianus
atgatagtgagatcaaagccagaaagcaatggagaaaaaaaattaatgaaccacgatgaaccaaatgatcaatacaaccaaagatactaccctagtgaggtgtatgctgacttggtatcacacttcatgaattttgcatatggcaaagtccacgaaagtgggcttcagaaaaaaggcgtgcggtgtgtagatgtatcaattagtggatgccagttttggaacgggattccactttccgcaagttggtgcacgtcgttagtgacataa

SEQ ID NO: 80199 - DNA, 300 bp, Saccharomyces pastorianus
atgacgtgcatgcaggttcatgagcatgctccgataattgcgacagggactaaacaaataaagatatggacgacatctggagatcttttgaattcttttaaaaactcacataataatggcgtaacaagtacattagccgctacgggaatcccaaagtcactgtcctactcttccacttctgatgcatttttatcttcgatggctttccatcctcatagaatgatgattgcggccaccaattctcacgattctattgtaaatatctacaagtgtgaagacgagagaattgattatttttga

SEQ ID NO: 80200 - DNA, 2355 bp, Saccharomyces pastorianus
atgtcaatagattacaaaaacacgcaaagtgaattaatcaagaaaagggttatatgtatttgttacaggttagtacctgattggggtgttcctggcatgtcagctacaaatggctcagccatgataaatagtgggaacccgttgacaatgactgcatcgcagaatataaatggtccatcttcaagatattatgaacgccagcaaggaaatagaacatccaacttgggccacaataatcttccattttatcattctaataataccaccgatgaacaaaaagctatggctgtctttgttttggcatcattcgttcgaaactttcctctggggcaaaaaaattgttttagtttggaactggtcaacaagttgtgcttttatattgaaaattctgagatacccctactaagacagtggtgtgttattttattaggtttattgtttgctgataaccccttaaacaggtttgtatgtatgaatactggtgctgttgaaatattactaaaatctttgaaggaccctgtacctgaagttagaacagcttctatatttgcattgaagcatttcatatctggatttcaagatgcagaggtaattttgagattgcaacaagaatttgaagaacagtatcagcaattacattcgcaattacagcatctccaaaatcaatcccatctacaacaacaacagtcccagcaacagcagcagcatcttgagcagcagcagatgaaaattgaaaagcagattcgtcattgtcaagttatgcaaaatcaactagaagttattgatttgaggaagttaaaaagacaggaaattggcaacttgatctcaatcttacctttaatcaatgatggttcatcattagtccgtaaggaactagtcgtatatttttcgcatattgtgagtcgttactctaacttttttattgtagttgtattcaatgatttgttggaagaaataaaacttttagagaaaagtgatatcaatactcgaaacacttccgataagtattcagttagtcatggttccattttctacactgtttggaaatctctcttgattctagccgaagatccctttttagagaacaaggaattatccaagcaggttatagattatattttgcttgaattaagcgcccataaggaacttggtggaccatttgcagttatggaaaaatttttgttgaaaagaagctcgaaagctcaccaaactggtaaatttggatttaattcttcgcaggttcaatttgtaaaaagttcattacgatcattctcaccaaatgagagggtagataataatgcattcaaaaaagagcaacaacagcatgacccaaagatatctcatccaatgcggacatctttagctaaacttttccagagtcttggttttagcgaatccaatagtgactctgatactcaatcatcaaatacttcgatgaaatcgcatacctcaaaaaagggtccctcgggcttatatttattgaatggcaataataatatttatcctacagctgagactccaagattccggaagcatacagaacccttacaattgccattaaatagttcctttttagactattcacgtgaatatttccaagaaccacaaatgaaaaagcaagaggcggatgaacctggcagtgttgagtataatgctagattgtggagacgtaacagaaatgaaactattatccaggaaacacagggggagaaaaaattatcgatttatgggaattggtccaaaaaattgattagtttaaataacaaaagtcaaccaaaactgatgaagtttgcccagtttgaagatcagctgattactgcagatgatagaagtaccattacagtttttgattgggagaaaggaaagactttgtccaaattctccaatggtactccttttggcacaaaagttactgacctgaaactcattaacgaggatgactccgcccttttattgacaggttcttcagacggtgttatcaaaatatacagagactaccaagatgtcgacacctttaaaattgtatccgcctggagaggcttgaccgatatgttattgacacctagatccacaggtttactaaccgaatggttacaaataagaggatcattgttaacaactggtgatgttaaggttatccgtgtctgggatgcgcatacagaaacggttgaagtggacattcctgcaaaaacatcatctttaattacatccttgacggctgatcagctagcaggtaatatcttcgtagcagggtttgcagatggctccctgagagtatatgatcgccgtctcgatccaagagattccatgatacgtcgctggagagctggaaatgataagcagggagtttggatt

SEQ ID NO: 80201 - DNA, 1584 bp, Saccharomyces pastorianus
atgccggagatttatggacctcagccattaaagccactcaatacggtgatgagacatgggtttgaagagcaataccaaagtgaccaacttttacaatcactcgcgaatgatttcatattctactttgatgataaacgacacaaaactaatggaaatccgattcctgaagaggataaacaacgagatgtaaatcgttattaccagccgattaccgattggaagattatgaaagatcgacagaagacagtaagtgcggcccttttattatgcttgaatttaggtgtcgatccccctgatgttatgaagacacatccctgtgccagagttgaagcatgggtagacccattgaatttccaggactcgaagaaagcaatagaacaaattggtaaaaacttacaaacacagtacgaaactctgtctttgagaacacgctataaacaaagcttggatccttgtgtagaggatgtcaaacggttttgcaactcgctaagaagaacttctaaggaagataggatacttttccactacaacggacatggtgtgcctaagcctacaaaatcaggtgaaatttgggttttcaacagaggttatacacaatatattccggtatctttgtatgacctgcaaacttggttaggtgcgccatgtatatttgtctatgattgcaacagtgctgaaaatatattaatcaactttcagaagtttgtgcaaaagaggattaaagatgatgaagagggaaatcatgatgttgccgcgccatcaccaacttcagcttatcaagattgtttccaattagcctcttgcacttccgatgaacttttacttatgagtccggaactacccgcagatttgtttagttgttgtttgacctgtccaatagagattagcatccgtatctttctcatgcagtcacccttaaaagattctaaatataaaattttcttcgaaaatagtacttcaaatcaaccgtttggtgatagtaagaactcgttcaagtccaaaatacccaacgtcaatatccctggaatgttgtcggataggagaacgccgttgggagaactaaattggatttttacagctataacggacacaattgcatggacatccctcccccgaccacttttcaaaaaattattcagacatgatttaatgattgctacgcttttcagaaattttcttctagccaaaagaataatgccgtggtacaattgccatcctgtatctgatccagaattaccagatagtataactacacatccaatgtggaaatcttgggatttagccatggatgaagtactgactaaaatagtcattgatctgaaaaatgctcctcccgctactgccttagagagtcagatgattctacaacaacaagaaaccttacagaatggtggcagctctaagtcgaatgcccaagatacgaaagccggaagtattcaaacacaatcgagatttgcagtggccaatttaagtacaatgtctctagtaaataaccctgctctccaatcaagaaaatctatatctttgcaagctcacagcaacaattacaagcagcagcaacaacaacaaacaacaatttacagg

SEQ ID NO: 80202 - DNA, 399 bp, Saccharomyces pastorianus
atgttaattccagctaatacggacattgtaatgacttatcaattcgataaagctcttctgcaatttgccgagtatccaccagatgcaaaccatggttttgaaatcgatgcagctgtaatcaccgtgctatctttggagtcctcatcgtctctttatgaaatgagaacctctactctattgttatccctgtctacaccggattttagtatgccgtataacgtcatcattctaacatctacaatcatgggactcatattcggtatgctatacaatttgatggtgaagagaatggtcaccgtcgaagaggccgataagattacgttgcaatctggcttaaaatacaaattgctaaagctaaaggaaaagttcctagggaaaaaaaagactaaaacagactaa

SEQ ID NO: 80203 - DNA, 138 bp, Saccharomyces pastorianus
atgagagtttacgtatcctctcttcaaataacttctactacctctccgcaattgcaagaagacgatatcatcttagataaatactatttacaagcggccgatagaaaaagacctgccacttggagttcacgatgttaa

SEQ ID NO: 80204 - DNA, 450 bp, Saccharomyces pastorianus
atggtgtaccagttgcacaaacctttggacttaggcgaagacggggaagtaagggatgatatcaacaagaaggaggttgaaacgaacgaatcatcctcaaacgccaatactggcctggagactttaaaagcgttagaaaatttggaaaatgttacaatccctgaacccaaacacgaagtcccaaaggtcgtcgatgatactgccatattcaagaaaaggtcagtagaagaagtcattgaaagagagtctacatcttcacataagaaagtgaaattcgttgaagaaacaaccgtggataatggcgaagaattgattgtaaaaaaagctgtaagccaaactaaggaagaagagaagccaatggaggacagtgaagatgaagaacaggaggagtttgaaattcccgctatcgaattaagtgatgacgaagaagaggaggaagaagaagaataa

SEQ ID NO: 80205 - DNA, 921 bp, Saccharomyces pastorianus
atgcttgttgctttcatctctttaccaactccctttcccattcgagttccgctgggtggtattaattccctttgtgaagttttgttgggagttagtaacaaatatttaccgttaaaaaaagaattgcgtcgtgataatgaactaaatggggtcatcaataccatcttacctcaaatacaatttcaaggcattaggttatgggaaattatggtttcaaaatatggcaaatgcggtttatcatttttcgaaggaatcctttcttccattgaacttttcattccattaaaaaagaaaagtaacaatgaaattgattttaatgttgttgggtctttaaaatttgagtttgctactgttttcagattggtaaatatgattttgtctcatttaggccaccaactgaacataatcagcgtcatatcccaattaatcgaagtggcgttgttcttatctcatgataaaacattgattgattctttattcaaaaatcgtaaaagcatcatgaaacaacagactaaaacaaaacaatcaaagaggagtaaaagtgccgaaggtgcattttctgatatttatacgcacccagagctatttgtgtgtaaaaattccatgaattggttcaatgaaatcaatgatttttttattactgcactaaataattggattttgccttcaactccacatattcaaattttgaaatatagtatcacgcaatctttaagattaaaggaaagatttggttatattccagaaagctttgttaatctcctgcgttgcgaggttcttcacccaggtagtgaacgtgtttcaattttaccgattgcaatatcactattaaagaatatcaatgatgatatgtttgaattactgtgtcatcaaaagtgccagtcggtatggtgtaccagttgcacaaacctttggacttag

SEQ ID NO: 80206 - DNA, 549 bp, Saccharomyces pastorianus
atggccactgcgttgcagatcgctcagctgactttgaagcatcgccagaataaggtccaacatcaaaggattgtggcatttgtgtgtagcccaataagtgattctcgagacgaattgatcagattggcaaaaacactgaaaaagaataatgttgccgtggacatcatcaattttggagagattgaacagaacacggagcttttggatgagttcatagctgcagtgaacaaccctcaagaagaaactagtcatttgcttactgtgacgcctggccccagactgctgtacgagaacatcgcatcttcacccataattctcgaagaaggatcctccggtatgggcgcctttggtgggtctggcggtgattccgatgccaatggcacatttatggacttcggggtagacccatcaatggacccagaactggcaatggccttgcgtctgtctatggaagaagagcagcaaagacaggaaaggttaagacagcagcaacaacaacaagatcagcctgagcagtctgaacagcctgaacaacaccaagacaaatag

SEQ ID NO: 80207 - DNA, 288 bp, Saccharomyces pastorianus
atggtattggaagctacagtgttagtgattgataattcagagtactctcgcaatggcgactttcctaggacaaggtttgaagcccagatcgactcggtagagttcatatttcaagccaagagaaacagcaatcctgagaatacagtgggtcttatctctggtgctggcgccaaccccagggtgtatctacgtttaccgccgagtttgggaagattcttgctggactacacgacacgcagatcgagggtaagctgcatatggccactgcgttgcagatcgctcagctga

SEQ ID NO: 80208 - DNA, 591 bp, Saccharomyces pastorianus
atgcaacgtcacgtcaaagttgacggtaaggttagaactgacaccacctacccagctggtttcatggacgtcatcactctagatgccaccaatgaaaacttcagattggtctacgatgtcaagggtagattcgctgtccaccgtatcaccgatgaagaagcctcttacaaattgggtaaggtcaagaaggtccaattaggtaagaagggtgttccatacgttgttacccacgatggtagaactatcagatacccagacccaaacatcaaggtcaatgacactgttaagattgatttggcctctggtaagattactgatttcatcaagttcgatgccggtaagttggtttacgttactggtggtcgtaacttgggtcgtatcggtactatcgttcacaaggaaagacacgatggtggtttcgatttggttcacatcaaggactccttggacaacactttcgtcactagattggacaatgtcttcgtcattggtgaacaaggtaagccttacatttctttgccaaagggtaagggtatcaagttgtctattgctgaagaacgtgacagaagaagagctcaacaaggtttgtaa

SEQ ID NO: 80209 - DNA, 1413 bp, Saccharomyces pastorianus
atgttcttaggccaagttagactgtatccaatgattcataatttagcacatgcttcccaacaccaatggcacagtttgaaacctcgcgttatcgatgaagttgtgtccggtgatattttaatcaaatggacttacaaacagacaaagaaaagacattatggcccacaagattttgaagttcttcgattattgggtaagggtacttttggccaagtctaccaagttaagaagaaagacactcaaagaatttatgcaatgaaagttctctccaagaaagttattgtcaagaaaaatgagatcgcccacacaattggcgaaagaaatatcctagtcacgacagcgtccaaatcgtccccattcattgtcggattgaagttttcctttcaaacaccaacagatctctatttggtcactgattatatgagtggtggagaattattctggcatttacaaaaggagggccgtttttcagaagacagagcgaaattctatatcgctgagttagtcctagcgttagaacatttacacgataacgatatcgtttacagggacctaaagcctgaaaacattctactcgatgccaacggtaacatcgctctttgcgattttggtctttctaaagctgacttgaaggatagaacaaacacattttgcggcaccacggaatacctggcaccagaattgttactggacgaaaccggctacaccaaaatggtcgatttttggtctctaggtgttttgatatttgaaatgtgttgtggttggtcccctttctttgcggaaaataatcaaaaaatgtaccaaaaaattgcctttggtaaagtcaaattccccagagacgtactgtcacaagaggggaggtcttttgtaaagggtttactaaacagaaaccccaaacatagactcggtgccattgatgatggaagagaactacgagctcatccatttttcgcagatatcgactgggaggccttgaagcagaaaaaaattccaccacctttcaaacctcacctagtctcggagacggatacctccaattttgacccagagttcacaacagcttcaacttcatacatgaacaagcaccagccgatgatgactgctaccccgctatctccagcaatgcaagcaaagtttgctggtttcacctttgttgatgagtccgccatcgatgaacacgttaataacaacagaaaattcctacaaaactcgtactttatggaacctggctcctttatcccgggaaatccaaacttacctccagacgaagatgtcatcgatgatgacggggacgaggacatcaatgatggattcaaccaagagaaaaatatgaacaacagccattcgcagatggacttcgacggcgaccaacacatggatgacgaatttgtcagtggaagattcgaaatatga

SEQ ID NO: 80210 - DNA, 138 bp, Saccharomyces pastorianus
atgaagatgttcttgtttctgaacgaatcatacatctttgatagacttcgtatgtggagtactgttttatggcgcttatgtgtattcgtatgcgcagaatgtgggaattccaattataggggtgccggggtgccttga

SEQ ID NO: 80211 - DNA, 3318 bp, Saccharomyces pastorianus
atgatgatatcgggtattgttggcgacggcagtgaatacgattggaatgaagaaaaaacttttatctccagggatagtggtttaacatggaggttagtccataattccactggtttatatactactggtgatctgggaaatattatcatgtatattccatatcgttcgaatgaaaatggcgatgtgccttctaaattttattattccttggatcaaggtaagacatggggtgaatatgatctaatcatgcctatctatccatacagattaatcagcacaatatcagatggatctggttcaaaatttattctaacaggaacgtccattacagatgatccaatatccattacatattcaattgatttttcagcggtatttgattataaatcatgtgaagagggtgattttgaagattggaatctagcagatggaaaatgtgttaatggcgccaaatacaagtacagaaggaggaaacaggacgcccagtgtttggtaaaaaaagcactcaaagatttgagtttagatgaaacgccttgtaacagttgtactggatccgactacgaatgttcgtttgaattcgttagagatgcaaagggtgactgtataccagattataatctgattgccctttccgatatatgtgacaaatcgaagggtaaatctgtgctagtaaagccattacaactaatcaaaggtgataaatgtaaaacacccatgaaaattgaacccgtagacattccgtgtgacgaaattccaaaggagggttcgagtgacaaggaaatggtgactactgaaaacaaattcgactttgaaactaaattttaccaatacttcgatacagttgccgacgaatctttggtcatgctgaattcgataggagacgcctatatatcccacgatggtggacaaacgataaaaaggtttgacactgacggcgaaaaaattgtcgaagttgtgtttaacccatatttcaattcttcagcatatttgtttggctctaaaggtaacatattcttaacacacgatagaggatattctttcatgatagctaaattacctgaagccaggcaattaggcatgccactagattttagtgctagagcacaggatacttttatttactatggtggcaagaattgtgaatcaatcttaagtccagaatgtcatgcagtagcatacctcaccaaagatggaggtgaaacttttacagaaatgcttgataatgcaattcattgtgagtttgcaggcacactattcaaatatccgtcaaatgacgatatggttatgtgccaagtaaaggaaaagttttcgcaaacaagaagtttagtttcttcgatagattttttccaaggtgataataaaattatctttgaaaacattatcggctacttgtccactggtggctatattattgttgccgtacctcatgaagacaatgagttgagggcatatgtaactattgatggtactgagtttgccgaggcaaaattcccgtatgatcaagatgttagtaagcaagaggcattcactattttaggatctgagaaaggatcgatatttttacatttagcaacaaacttagaatcaggacacgattttggaaaccttttgaaatccaactcgaatggtacttcttttgtcactttagagcatgccgttaatagaaacacattcggttatgtcgactttgaaaaagttcaaggtcttgaaggtattattatcaccaacatcgtttcgaatagggaaaaggttggagagaacaaggaagacgaacaattgaagacgaaaatcacctttaatgacggttcagattggaactttttgaagcctccaaagaaggattcggaagggaaaaagtttccctgtgattctgtatcattagataaatgttctctacatttgcatggttacactgaacgtaaggatatcagggatacatattcctccggttccgcgttaggaatgatgtttggtgtcggaaatgttggcgataagcttctaccatatgaggagtgttccacttttttaaccactgatggaggagagacgtggactgaggttaaaaaaggcccccatcaatgggagtacggtgatcatggtggagtcttggttttggtccccgaaaacgcagaaactgattctatttcttactccaccgattttggtaaaacatggaaagattataaattctgtggcgacaaagtcctcgtaaaggatataatcaccgttcccagagattctgctttgaggtttttgctatttggagaagcaaaaaacatgggtagtggttcattcagaacgtatacaattgattttagaaacattttcgagaggcaatgtgagtttgatattacgggtaaaaaaagggcagattttaagtactctcctctgggttctaatactggttgtctatttggtcatcaaaccgagtttttacgtaaaaccgatgaaaaatgttttattgggaatattccactttctgaattttcgaggaacgtcaaaaactgttcatgtacgaggcaagatttcgaatgtgactataatttttataaagccagtgatggtacttgtaaattaatcaaaggcttaagttcggcgaatggtgccgatatctgcaaaaaggaacccgacttaattgaatactatgattcctctggctatcgaaaaattcccttatcaacctgtaaaggtgggctgaaattggatgcacatttagcaccacatccttgtccgggaaaagaaaaggcattcagggaaaaatactctataaacaccggcgcttatgcgctggtttttgttacaattcttctcgttattttctttgccgcatggtttgtatacgatagaggtatcaggagaaatgggagattttcaagatttgaagaaatcagattaggagacgatgggctgatagaaaacaataggaccgatagagttgtcaacatcattgtaagactaggattatgcatttctttaatcaccaagtctgcgtttcaacgcgcgaaggcaggtacagcgcaactttcttcaaaatttagggcaaggtttggcaacaaaaaaggtgccacttactcttcgctgcttcatgatcagctttcagatgaaccagatggcttgcatgaagattccaacgatttatccagtttcagaggtcaaggtagtaattctgaaattgagcaagaagatgttgacacatctcaacaagagcatacgtcgcggacagacctacttggtgctagcaatattccagacgctttgccagcgcgtagtgcttctcacgagtccgatttagcagctgcacgcagcgaagacaagtag

SEQ ID NO: 80212 - DNA, 669 bp, Saccharomyces pastorianus
atgtatgttggaagagagatttacacaactaatgatggagtatccttttcccaagttaaaccttcttttggaaaaattgatggtcatattagcacggcacgctgtgactttattaaatctagtgaggattctgatctgggcggtaatgatgcttcgatactctgtcttttccgaaacactgagtacattgaaagtacaggctcaactattgacaagtctgaattgattttaagtgccgatggaggtgaaacattcaaagaattagtccagttcaaagataaggttgttagtcgatacgagatacttaagcatcatgtgatcgttttgacacaagatgatatgtataatgaaatgtcatcaacaaacatttggatatccaatgatgtatccacttttcaagtggctcgtacacctactaagatacggcacgttaatatgggacaaattcatgaagattccatcggaagaatcgttttacctgtatccagagaaagagatgatgaagacagcaaccaaccgggagctgctgaagtgttaatatcagattctgaaggactaaaatttttgcctataaattggataccaaacaatcagtttggatatatcaatgtagcttatccaggtttcttaaaaggaacatttttttggttcgtttcatcccttcattga

SEQ ID NO: 80213 - DNA, 117 bp, Saccharomyces pastorianus
atggcattgtttcgtgccctgtatattatttgggtattcctactcattccactgtccaatgcagaagaattcaccccaaggttaccagaactttgtcaagatatgtattcgatatag

SEQ ID NO: 80214 - DNA, 954 bp, Saccharomyces pastorianus
atgacagttggtgaaatgcaacatgctactgatgagaccaagaggttgtatacaagtgcgtcaagacacgaacttaatgagttattcaacttttcccacactgatgtcgggacttcgcccaagttccgtcaaaatttgatcccatatgaactaaaggattggaaggttgcccttgctgaacttttcagatacgttaacggaactgattgttggtcaacaatttatctggaaaatcacgaccaacctcgttcaattaccagatttggtgacgattctcccaaaaaccgtgttatttctggtaagttgttgtctgtgttgttggtgtcactgagcggtactctatatgtgtaccaaggacaggaactgggtgaaatcaatttcaagaactggcctatcgaaaaatacgaggatgtcgaagttagaaataactatgatgcgatcaaggaagagcatggagaaaactcgaaggagatgaagaggtttttggaagcaattgcccttatttccagagaccatgctagaacacctatgcaatggtctcgtgaggagccaaatgctggtttttctggtcctaatgctaaaccatggttttacttgaacgagtctttcagggagggaattaacgctgaagacgaatccaaggaccccaactcggttttgaacttctggaaggaggccttgagatttagaaaggcacacaaggatattactgtgtatggatatgattttgagtttattgatttggacaataagaaactgttcagcttcacaaagaaatacgacaacaaaacattgtttgctgctttgaacttcagctctgattcgatcgacttcacgattccaaacaatagctcatcgtttaagttggaattcggaaactacccaagaagtgaagttgatgcgtcttccagaacattgaagccatgggagggcagaatttacatatctgaatga

SEQ ID NO: 80215 - DNA, 888 bp, Saccharomyces pastorianus
atgactatttcttctgcacatccagaaacagaacccaagtggtggaaagaggccacaatctatcaaatttatcccgcaagtttcaaagactccaacaacgatggttggggtgatatgaagggtatcgcctccaagttggagtacatcaaggagcttggcgccgatgccatttggatctcgccattttacgactcgccacaagatgatatgggttacgatattgccaactacgaaaaggtctggccaacctacggtacgaacgaggactgctttgccttgatcgaaaagacacataagctcggtatgaaatttatcactgacttggtcatcaatcactgttccagcgaacatgaatggttcaaagagagcagatcctcaaaaaccaatccaaaacgtgactggttcttctggagacctcctaagggttatgatgccgaaggcaagccaattcctccaaacaattggaggtcttactttggtggttctgcatggacgtttgatgaaaagacacaagagttttacttgcgtttgttttgctccacccaacctgatctcaactgggaaaacgaagactgcagaaaggcaatctacgaaagtgccgttggatactggttagaccatggtgtagacggctttagaattgatgtgggaagcttgtactccaaggttgctggtctaccggatgctcctgtgattgacgaaaactcaaagtggcaacccagtgatcctttcacaatgaacggaccacgtatccatgagtttcatcaagaaatgaacaagttcatcagtgttggaataaaaatcaactatcatctactaactagtatttacgttactagtatattatcatatacggtgttagaagatgacgcaaatgatgagaaatag

SEQ ID NO: 80216 - DNA, 1017 bp, Saccharomyces pastorianus
atggaaatgactcactatgaaaagacacctttgattcgtcaagtttttaacaatggtaagactaattcgtggttttacgttaagcatgagattttacaaccaggtggaagtttcaaatcgagaggaatcgggcatttgataaggaagaataatgaagaagcactaagcgagggttctgggaagcttgctgtattttctagctctgggggaaatgctggtttagcagcagcaactgcctgcagatcgatggcacttaattgcagtgtagtggttcctaaaactacaaaacctagaatggtaaagaaaattcaaagtgcaggagccaaagtcattatccatggtgatcattggggggaagcagatgaatacttgaggtacgaattaatggcgcaagaaagccaacatggttcgaagacactatatgtgcacccgtttgataatgagacaatttgggaaggtcattctacgattgtggatgaaatcatagaacaattgaaggaaaatgatatatccttacctagggtgaaagctttagtttgtagtgttggtggtggtgggctatttagtggcataattaaaggcctagagaggaatcaccttgctgaaaaaattccggtcgttgctgtagaaactgccggttgtgacgtattgcataagtctctcaaaaaaggtagtccagttactcttgaaaaattgacaagtgttgcaacttctttgggctccccatacatagcatcattcgcgtttgagagttttaacaagtatggatgtaagtctgtagttttatcagatcaagacgttctggcaacatgcttgagatatgccgatgactacaattttatagtggaaccagcctgtggagcatccttacatttatgttatcatccagagattcttgaagacattctggaacaaaaaatatatgaggatgatatcgttattataatcgcatgcggtggatcatgtatgacgtatgaagacttggtgaaagcgtcgagcacattaaacgtatcataa

SEQ ID NO: 80217 - DNA, 1368 bp, Saccharomyces pastorianus
atgtttgcctttttggatttaataaggaaaaatattgcaagggcagtttcagacaacttcattgttgacttgaaaatgaacacgaacgactacaaccttggccaaactgtttatctagttatatttctagcaagtgaactacccggcaatctgctgtccaaaagatttggtccagaaagggtcattccggttcaaattgtgttgtggagtgtaatttgtattactcaagctggtctgaaaaatcgaggtcaatttattgctactagatgcttattaggaatggtgcagggcgggttcatcccggacaatattctatacttgtcatattattatactggagctgagctcacattccgcctaagtttcttttggtgtgctatacctcttttccaaattttaggctctcttttagcttccggaatcatagagatgaggggtattcataacttagctggctggcagtacctatttataattgaagggtttctgtccctttctgttggcgtggcatccttttatttaatgcgtagaggacctacgcaaactggtgagtctgcatttcacaaaggaaaatcgttattcactgagtatgaggagaaaatcatggttaacagaattttaagggatgacccatcaaagggtgacatgagtaaccgacaaccagttaccttcaaggagattttgtacactctaacagaatttgatctatggccattgtttatccaaggtattacagcattcatatctcttcaaacagttggttcctatttatctctgatattaaagagtttaaattactctacatttctttcgaacattttagcaattccaggccaagcactgctgctaataaatttaccattagcggcactgttatcgcgtaaattgaaagaaaaatcactctgtgtgggaattgccaacgtttgggtgctccctttcatagtttctctggtcgctttaccgactgacacaaacccctggatcaagtatatattactaaccggtatacttggtcttccctatacacattccattcttgctggttgggtctccgagatttcaaattcggtaagatcgcgtacagtgggtacagcgttatacaatatgagtgcccaagttggagcaatcattgcttctaacatgtatagaaatgatgataaaccttactatactagaggtaacaaaatacttctaggattcacttgcttcaacatttgtatggcagttgctactaagttttactatattagtaggaataaatacaaggaccgcaaatggaactctatgacaaaagaagagcagatcaattacttggacacaactaaagataagggaatgaagcgtcttgattataggtttattcactag

SEQ ID NO: 80218 - DNA, 330 bp, Saccharomyces pastorianus
atgtccgtacaaaaagaagaatacgatattgtagaaaaggcccaattatctgtgtccgcagaaagcttaacatcagattcggagagtatttcacataacccatttgacgattttcataaagcagagcgttggagaaaagtctatgaatccagtggttatgaaggcttgtctaaattcgatcctgagtttacatggacaaaggatgaggaaaagaaattggtaagaaaaatggacttgaagattttttttgtgggtttttattatgtttgcctttttggatttaataaggaaaaatattgcaagggcagtttcagacaacttcattgttga

SEQ ID NO: 80219 - DNA, 282 bp, Saccharomyces pastorianus
atggtttactatagagcccttaggcaacatttttgtcaaacaaagtcgtttaagcattcctcgaaaagaaacgtctctatgatggtaataggcaaacatcgggcgtaccttaaaagtcttagacatcacataaagggatttataatcacattcctcgtcagtttttccagaaacctccatggaaaaaccctggacgtggggtcgattaacgctacgcgtatttcttcgcccccggataatttcctaaactgggttttttctttttattcctgttcagagtaa

SEQ ID NO: 80220 - DNA, 99 bp, Saccharomyces pastorianus
atgagaaactacatgaagcggtacttgaacttgggagagtccgtatacgactattcagttgccacttgtggctcctcgacgtatttcgctaggaaatag

SEQ ID NO: 80221 - DNA, 459 bp, Saccharomyces pastorianus
atgcaactactcaccaagggtgccggcgcagaggcggggaaccaaaggtccttcatcctctacacggacctgagcagcgagtccacctacgccctgacctatctcatgggcgcagctgtcaaccagggagacaccgtctacattgtccactgggagccctcgaagcccacggacgactcccagatgttcgccaacgttgccagaatcagaaagcacgtcatgcacctgtttgactgcgtcgcgggcgtgctcgacgacctcgacgtcgtcgtcctctccttgacccatccgtacccaaaacacctcctcaacgagatgatccacggcctcaagccagtcgccctgtgctgctccctctcggtcatcctgtccactctgcagaacttcgtctgctctgtgcccatcctcgcggttagaaagaagctgaaacgtgccaagcgcaagggcatcagcgagtga

SEQ ID NO: 80222 - DNA, 474 bp, Saccharomyces pastorianus
atgcagaagagcatattgctgactaaacctgacggaacacaatcgaatctacacagcatcaaaacggaaacgcccaccacggtggagttcgactcggagcagatggaaaggggccacagggaaagaggtcgtagcaagaagaaaagaggcgaacgagactcaaacgtgagcagtctgtcgcggtcgagaagcagggccagtagccgcagcagagtaagggaggaagagttcctcaagtggaccgtgttgaggcaggacccctcgatgcggttgagggtcgtggatgtggattctgaagaggaaggtgagggcaacgacgaagatgacgacgacggcgacggcgacgatatggacgaggaagagtccgatgaagagcaagtgagcgatatagagaacgatttagagattgacgaggagttccactacgatctgggcatgaaagtgttacccaacttttgtaccagcataaactaa

SEQ ID NO: 80223 - DNA, 858 bp, Saccharomyces pastorianus
atggtttattcgagaaggccatctaccatcggcctggatagagccctaggtaggacaagaagtctttcgtcacaatcttttgataacgaaacgtcgcctgcgcatccaagatctcccaacgaccatggttcaagactactaaggttttattcctacgctgacatgttgtccgatgacaacaataacaacgttagtaatgcgacatcaacatcatcaactgcgaaccccttgagaagacccccaatgcaaggtcactactcgttctcgtcgtcccttttgaattctccttctcatttgccttcccccccatcagcttcggcatcaccacctcaacatatgaacttcaccaaccctttcatcatatctagacgttactctaacacaacgatcaacaatgccaatgggggaaccagcgctagaagcactacgggggccgcactatcaagatcgccatcgaaccaacagtacttacttaaacaacaaaggtcaccttcagggagcgcccgttcaagaagaaacagcaataggcccggcagtgctgccaacattatgatcgggaaacctaaatccaaattccatatcgaatccagtggcagtgaagggttttcttccgaagaggaggacaacactatgattgaaagagataaactcaatctaaagcaaaaattgcagtcacaactggcacaaccaccatcaattgccaacatggttaacgataatcacaataatactaataaacacaagaatactattaataataacatcaaaaatagccctgcgttcacaaactcgaatccaagttcaaaatcaaattcaaactctacaataacctctatgaatccagacacaaccaaataa

SEQ ID NO: 80224 - DNA, 252 bp, Saccharomyces pastorianus
atggataccagcaaccacaaccaagaccacgactcccacgtggcggcacagagggagaacgacaataattatatgccaccttccccctccatgagcgagagttctatgatttttgaaagaaatgtagaggacccatcatacctttataaacgggttcaacaacgtgcaaatctcttctggcgagcacagaccgttgtcatcatatatctatatagacttcttattagcaagaggtgcggactcttgacttag

SEQ ID NO: 80225 - DNA, 609 bp, Saccharomyces pastorianus
atgagcatccattcattcatcaataataatcttcaaccaggtaagggtcatttagtaggtcgtttagcttccgttgttgctaagcaattattaaacggtcaaaaaatcgttgttgttagagctgaagaattaaacatttctggtgaatttttcagaaacaaattaaagtaccatgatttcttgagaaaggctaccgctttcaacaagacccgtggtccattccatttcagagccccatctagaatcttctacaaagctcttcgtggtatggtttctcacaagactgctcgtggtaaggctgctttggaacgtttaaaggtctttgaaggtatcccacctccatacgataagaagaagagagttgttgtcccacaagcattgagagttttgagattgaagccaggtagaaagtacaccaccttgggtaagttgtctacttccgttggttggaaatacgaagatgttgttgccaaattggaagcaaagagaaaggtttcatccgctgaatactatgccaagaagagagctttcaccaagaaagttgcctctgctaatgctactgctgctgaatctgatgttgctaaacaattagccgctttgggttactaa

SEQ ID NO: 80226 - DNA, 345 bp, Saccharomyces pastorianus
atgccaaacttagaacagaaagagattgcagataatttgacagaacgtcaaaagcttccctggaaaactctcaataacgaggaaatcaaagcagcttggtacatatcctacggcgagtggggacctagaagacctgtacacggaaaaggcgatgttgcatttataactaaaggagtatttttagggttaggaatctcatttgggctctttggtttagtgagactattagccaatcctgaaactccaaagactatgaacagggaatggcagttgaaatcagacgagtatctgaagtcaaaaaatgccaatccttggggaggttattctcaagttcaatctaaataa

SEQ ID NO: 80227 - DNA, 711 bp, Saccharomyces pastorianus
atgtctcccgtcctcactacgccaaagaggcacgcccctccgcctgaacaattacaaaatgtaacggactttaactatacaccatcgcatcagaagccgtttctacaaccgcaagcaggtacgacagttacaacacatcaagacatcaagcaaattgtggagatgacactggggtctgagggagtccttaaccaagctgtgaagttaccgcgtggtgaggatgagaatgaatggctagcggttcattgcgtggatttttacaatcagattaatatgttatacgggtccatcacagaattttgctccccacaaacatgcccgaggatgatagcgacgaacgaatatgaatatctttgggcatttcaaaagggtcagccccccgtttcggtaagtgcccctaagtatgtggaatgtttgatgaggtggtgtcaagaccaatttgatgacgaatctctttttccttccaaagtcaccggtaccttcccggagggattcatccaacgagtaattcaaccaattctaaggcgattattcagagtttatgcgcatatttactgtcatcattttaatgaaattcttgaactaaatttacaaaccgtactaaacacaagttttagacatttttgtctttttgcacaagagttcgaactactaagaccggctgattttggtccgctgttagaattagtgatggagttgagggataggtag

SEQ ID NO: 80228 - DNA, 342 bp, Saccharomyces pastorianus
atgttctatgcttcgaagcgccccccttgcgctgggcctcgaaccgcatccattgaacaacagcttggccttccctgtattctaccacatccattgctattgcccctctccccttctcctctctcttcttctccactatactgtgcttttcagcccattcggcgcgcgaaatcacaagctgtatatatacatttacatatacatatatatatatatatatgcataaatgtatgtacatatatgaatgccgggccgcgtggcgtctgtagcttgtgcgtgtacgtgtgtacacacttcaacatatatatacatacatatatatatctattattcgtgtactag

SEQ ID NO: 80229 - DNA, 276 bp, Saccharomyces pastorianus
atgtacatacatttatgcatatatatatatatatatgtatatgtaaatgtatatatacagcttgtgatttcgcgcgccgaatgggctgaaaagcacagtatagtggagaagaagagagaggagaaggggagaggggcaatagcaatggatgtggtagaatacagggaaggccaagctgttgttcaatggatgcggttcgaggcccagcgcaaggggggcgcttcgaagcatagaacattatccgcggaaacgggtattaggggtgagggtgaataa

SEQ ID NO: 80230 - DNA, 120 bp, Saccharomyces pastorianus
atgtatatatatgttgaagtgtgtacacacgtacacgcacaagctacagacgccacgcggcccggcattcatatatgtacatacatttatgcatatatatatatatatatgtatatgtaa

SEQ ID NO: 80231 - DNA, 801 bp, Saccharomyces pastorianus
atgcagattattctagataattttatttcggttttttttttctgttttgctaatttccaagaaccctttttcttctcttatcacaacgataagaggtacttaagaagatcttcatctttggattattattctttccctcttagaaaagtgaataatgagaagaatccattcttaaatttgggaatgcaacgtacgagggaattggaatcgagtgtcgcgatagaccaaactgaagtaccccgatccagattttttataatggttaaaaaattatcaagagttgccgatatcgtctatatagttgacacatttctaattccgccattgcatcctttaaagaagcagcatccaaaagttgcaaagtttttgaatgtacaacttgtctttgatttgatatcactgtttatttttgctacgcaccaactcctactgctagaagatggtagctttgggaagcactacttcaaaaggaaaacaaaacggtgctcgaaattttcgtgctctcgctgtaatgcaaacgctcaccaccccaagtggttcaaatttaaacattcactcctatgtctaggaacgttctgttttggggtttattcgttggtaaagattaataagttcttcaaaactgatcagactgttgatctaaacagactcatagagctattcttttggcaacttaatgcaattcttaatatgaagttattcgccttttacggggaccatttagaatcacatagtgcgcctcttgatgtgtatgaggattcttttgcaaacaaatcatcgtcaggtggtgacgaggtttaa

SEQ ID NO: 80232 - DNA, 1566 bp, Saccharomyces pastorianus
atgcaattagcatggcctataagattgaatccaaaagtcagaaggttcttgctggataagtgtcgacaaaaacgatatggtttcctctttttaggatgtatcttctccatactttactgtatggggacctggccatttttcacaaaagatattgtacatgatccaaataatttgccttattccttacaggattattcgactgacaaagacgagccatttttccggggctgcactgatacaaagctgtacttgcaaaatcctgcttactccaaaatgaacgcatctttcgttatgctaacgagaaacgaagaaatagaagacgtactgaaaactatgagaagtatagagggccatttcaataagtggttcaaatatccgtacgttttcttgaatgatgacccctttacaaatcattttaaggaccaaattcaagctgcaactaatgccactgtagagtttggcactgttgatgaaattatgtgggagtttcctgctaaggttcgtaattcattgcagtttaaggcttcattggaagaccaaaacgatcgcggtataatgtatggtaatatggaatcatatcacaagatgtgtcgattttactccgggatcttttataaacatccactagtttccaagtatgaatggtattggagaatagaacctgatgtggactttttttgtgacatctcgtatgatccctttttcgagatggccaaacataacaagaaatatgggtttaccgtacttataactgaactgtactggactgtccccaacttgttcagaacaaccaaaagctttataaaaaaaacggcaggtttaaaggaaaatctcggcacgttgtggaaattatttacatttaattataatattctagatacagatgatgaagaaatttctaggtgggtcaattttccctgggatgcaaagccaaagttgacagaaaagttgatggtagactttttgctagagaatcatggtcaagtcaataatgaggaggatttggaaggtatacaatatctcgttgaaagggcccgctctaaggtgccaatgctagaggattcccttgaaggggaagattacaatttgtgtcatttttggagtaactttgaaattgcccgcgttgatttattcgacaatgagatctataacgcctattttaaatttttggaagagtctggaggtttctggactgaaaggtggggtgacgcgccaattcattcaattgggttgggaatgaccttggatctagaagacgttcattatttcagagatattggttatagacactcatcgctgcagcattgtccgaagaatgccttacaaagccaagaaaatctcaacactttcgatgaaggttataacttcggatgtggatgtcgatgcgtgtgccccaagaaaggtgaagacatcgaagaccactccaccccttgcatggatattttttttgaattgcttcatggcagggaatatgagaaggaattccctggttgttacaagccctccataaaggacaaagacgtgattgaagagatcagaagagaaaattttagagtaattgaatag

SEQ ID NO: 80233 - DNA, 891 bp, Saccharomyces pastorianus
atggattactttaatatcaagcagaattactacacggggaacttcgtgcaatgtttgcaggaaatagagaagtttagcaaggtcacagataacaccttattattctacaaggcgaaaacccttttagctctaggccaatatcaatcacaagatcctacctctaagcttggcaaggtactagacttgtacgtccagttcttagatacgaaaaacattgaagaattagaaaatttgttaaaggataaacagaattcaccatatgaattatatctgttagccacggctcaagctatcttgggtgacttagataaaagtttggagacatgtgtagaagggattgacaatgacgaagcagaagggactacagaattattgctgcttgccatcgaagtcgctttgttaaacaacaacgtttcgaccgcgtccaccatctttgataactacactaatgctattgaggatactgtttccggtgacaacgaaatgattttaaacctggctgaatcgtacattaaatttgccacaaacaaagaaacggcaacatccaacttttactactatgaagagctatctcaaacctttcctacttggaaaactcaattgggactgctcaatttgcatttacagcaaagaaacatagctgaagctcagggtattgtcgagctattactatctgattactatagcgtcgaacaaaaagaaaacgccgtattgtacaaacctactttcttggcaaaccaaattacgcttgctcttatgcaaggtcttgatactgaagatttaacaaatcaattggttaaactggatcacgaacatgcattcatcaagcatcaccaagaaattgacgcaaaattcgatgaattagtgaggaaatatgatacgtccaactga

SEQ ID NO: 80234 - DNA, 2658 bp, Saccharomyces pastorianus
atgacaagcaagaatagcagcagcaataaatcaaatactcccacacaaatgtacgttattaaaagagacggccgcaaagagcccgttcaattcgataaaattacctcccgtatcacccgtttgtcatacggtttagacccaaaccgtattgatgctgttaaggtaacccaacgtattatttctggtgtgtactccggtgttactaccgttgagctggacaatcttgcagctgaaacatgtgcatacatgaccactgtgcaccctgattatgccactctagccgctagaatcgccatctctaacttacataagcaaaccacaaagcaattctccaaagttattgaggatttacacgactggattaacccagctactggaaaacatgctcctatgatttcggacgaaatttacaacattgtcatggaaaacaaagatactttgaactcggccatcgtgtacgatagggatttccagtatacgtatttcggattcaagacactggagcgttcgtacttgctaagactgaacggtgaagtggcagaacgtcctcagcatttggtaatgcgtgtggcgctaggtatccatggtagcgatatcgaatctgtgctgaagacttataatttgatgtcgttaagatacttcactcacgcttccccaactttattcaacgctggtacgccacatcctcaaatgtcttcatgtttcttaattgccatgaaggatgactctatcgaaggtatttatgatactttgaaagaatgtgctatgatttccaaaactgcaggtggtgttggtcttcatatcaacaacatccgttccacaggttcttatatcgctggtaccaacggtacttcaaacgggttgattcctatgattcgtgttttcaataatactgcccgttatgtggaccagggtggtaacaagagacctggtgccttcgcccttttcttggagccatggcatgcagatatcttcgactttgtcgatatcagaaaaacacatggtaaggaagaaattcgtgcaagagatttgttccctgctctatggatccctgatcttttcatgaaacgtgttcaagaggatgggccttggactttattttcgcccagtgctgccccaggtttagatgatgtgtggggtgatgaatttgaagaactatatactcgttacgaaagagaaggtcgtggtaaaacaattaaagcccaaaagttgtggtatgccattttgcaagcacagacagaaacaggtacacctttcatggtttataaggacgcatgtaacaggaagacaaaccaacagaacttaggtactatcaaatcatctaacttatgttgtgaaatcgtcgaatattcctccccggatgaaactgcagtttgtaatttagcttctattgccctaccggcattcgttgaggtttcagaagatggtaaaactgcaagctataatttcgagagattacacgagattgctaaagtcattacccacaacttgaacagagttatcgaccgtaattactatccagttcccgaggctagaaattcaaatatgaagcatagacctattgctcttggtgtccagggtttggccgatacttatatgatgttgcgtctaccctttgaatcagaagaagctcaaactctaaacaaacaaatcttcgaaactatttaccatgctactcttgaagcctcctgtgaattggcccaaaaagaaggtaaatattctacttttgaaggttctccagcttccaagggtattttacaattcgatatgtggaacgctaaaccatttggcatgtgggactgggaaaccttaagaaaggacattgttaaacatgggttaagaaactctttgactatggcaccaatgccaaccgcctcaacttcccaaattcttggttataatgaatgtttcgaaccagtgacctcaaacatgtactctcgtcgtgtcctgtctggtgaattccaagttgttaatccatatttactacgtgatttagtcgacctgggtatttgggatgatagtatgaaacaatatctaattacacaaaatggttctattcaaggcttaccaaatgtgccacaagaattgaaggaattatacaaaaccgtctgggaaatctctcaaaagaccattatcaatatggctgctgatcgtgccatctacatcgatcagtctcattccttgaatcttttcttgcaagcaccatcaatgggtaagattactagtatgcatttctacggttggaagaagggtttaaaaactggtatgtactacttaagaacgcaagccgcctccgctgctattcaatttaccattgatcaagaggttgccgatcaagccgctacacatattgcttccgtctcagaattggatcgtccagtttatgttccaaagggtacaaaattctctgaacaaaaggcggcatctgcgcttaccgaaagctcagataatgagaaggatgcatctccagttccatccgaacaatcatcggtgtcgagtgccatgtcaaatgtgaaattggaagatagtgttgccccagcagttccaacggaaacaataaaagaagattccgacgagaagaaatgtgacatttacaatgaaaaggtgattgcttgtactgctcctactccagaagcttgtgagtcatgttccggttga

SEQ ID NO: 80235 - DNA, 180 bp, Saccharomyces pastorianus
atggaggtttctgtaccattaccaccacagccactatactcacgtagtgaagtccctagcgtggaattgtgtggtatcgttgctatctgtcgttcgccaccctcggtatatccaacgtgcaggccaatatcactctctaagaaaatcgtatcaggattgttacggacaaactcttcatag

SEQ ID NO: 80236 - DNA, 1920 bp, Saccharomyces pastorianus
atgcaattgaagaaaatacacttgggtactgtatcatacacgtcggaaacattagacattgtatccgactatgtacaatctctggtaagctctaaaaatgactctttgaacaattctaaagttgccttatcaacaacaagaaaggatatgtcttttcgtgtacgtgatatgattttaactctagcaatttgccataacgttactcccacttttgaagatgacgaacttacatatcaagcggcatcacctgatgaaattgctattgttaaatttaccgagtcggttggcttatctcttttcaaaagagatcgccattcaatttctttattacacgaacattctggtaagactttaaattacgaaattttacaagtattcccatttaattctgattctaagcgtatgggtatcattgttcgtgatgagcaattggatgaatattggtttatgcaaaaaggggccgatactgtcatgtcaaaaattgtggaaagcaatgattggctagaggaagaaacaggtaatatggctcgtgaaggtctacgtactttggttatcggtcgtaaaaaattaaacaagaaaatttacgagcaatttcaaaaagaatacaacgatgcctcattgtcaatgctaaatcgtgatcaacagatgagtcaagttatcaccaagtatttagagcatgatcttgaattattgggtctaactggtgtagaagataagttacagaaggatgtgaagtcctctatcgagttattaagaaacgcaggtatcaagatttggatgctgacaggtgataaagttgaaactgctcgttgtgtttccataagtgcaaaattaatatctcgtggccaatatgttcatacgataacaaaagtcacaagaccggaaggtgcattcaatcagctggagtatctaaaaatcaatagaaatgcttgtcttttgatagatggtgaatccctgggaatgtttttgaaacattacgaacaggaattttttgatgtcgtggttcatttacccactgttattgcttgccgttgtacacctcaacagaaggcagacgttgctttggtaattcgtaaaatgacgggcaaaagggtatgctgtattggtgatggaggtaacgatgttagtatgattcaatgtgcagatgttggcgtagggattgtgggtaaagaaggtaaacaagcttctttagcagctgatttttctataacgcaattttgtcacctcaccgaattactattatggcatggtaggaactcttacaaaagatctgctaaattggctcaatttgtcatgcatagaggtttaatcattgcaatttgccaagcggtatattccatctgttcgttgttcgaacctattgctctttatcaaggttggttaatggttggttatgctacctgctatacaatggctccagtcttttcattaactcttgatcacgatatcgaagagtcattgactaaaatatacccagaattgtacaaagaattgactgaaggtaagagcttatcatataagacgttctttgtttgggttctattatcgctattccaaggttctgtaattcaattattttctcaggcctttacgagtttattagatactgatttcacaaggatggttgctatcagcttcactgctttggttgtaaatgaattaataatggttgccttagaaatctacacatggaataaaacaatgctcgtcactgaaattgctactttactattttacattgtatcggttccatttcttggcgattattttgatttaggttatatgactaccgtaaattactatgctggacttttagttatattactcatctcgatctttcctgtctggacggcaaaggcaatttatagaaggctacatcctccaagttatgcaaaagtgcaagagtttgccactccataa

SEQ ID NO: 80237 - DNA, 132 bp, Saccharomyces pastorianus
atggattggcgcgtgtactatatatattcatatgtcgtgtgtttgtatatgtgtgggagtgattgtgcgtgtatatgtgtgttggcgtgtgtggtacaatgtgtgtgttttaatgtagaaatgatgttgtag

SEQ ID NO: 80238 - DNA, 1392 bp, Saccharomyces pastorianus
atgatcaagatcgacttcatcagcattctgccgcaggagctgtcgctgaagatcttgagttatctggattgccaatctctttgcaacgccacgagagtgtgccgcaagtggcagaagctcgcggatgacgacagggtatggtaccacatgtgcgagcagcacatagataggaaatgtcccaactgtggctgggggctgcctcttttgcacatgaaacgtgcgcggatacaacagaatagtacaggatctagcagcaacgcagatatccagacgcaaactacgcgaccttggaaagtcatctacagagaacggttcaaagtggagtcaaactggagaaagggtcactgcaggattcaggaattcaagggccacatggatggtgtgttaacgctccagttcaactacaggcttttgttcacaggctcgtacgactccaccataggtatatgggacttattcacggggaagctaatacgaaggctcagcggccattcggacggcgtcaagacattatattttgacgatagaaagctgattacgggctcgctcgacaagacgatccgtgtttggaactacataacgggtgaatgcatttccacgtatcgaggccattcggatagcgttctgagcgtagattcataccagaaggttattgtttccggcagtgctgacaagacggtcaaggtatggcacgtggagtccaggacatgctacaccttgagaggccacacggaatgggttaattgcgtcaaattgcatccgaaaagcttttcatgttttagttgcagtgacgacaccacaatccgaatgtgggatatcaggaccaattcatgcctaaaagtgttcaggggtcatgtagggcaggtgcaaaagatcataccgcttaccattaaggatgtagagaatctagccaccgacaacacttctgatggcagctctccgcaggatgacccaacaatgactgatggtgcagacgaatcagacacaccgtcgaacgagcaagaaactgtcttagatgaaaacataccttatccaacacatctactatcttgcggactggataacacaatcaaactatgggacgtcaaaaccggtaaatgcataagaacacagtttgggcacgtggaaggtgtttgggacatcgccgctgacaacttcagaattataagtggttctcacgacggaagcattaaggtctgggacttgcaaagcgggaagtgtatgcacacgttcaacggtcgaagactacaaagggaaactcaggacacacaaacacaatccttgggtgataaagtcgcccctatcgcttgtgtttgtattggagattcagaatgctttagtggtgatgaatttgggtgcgtaaaaatgtacaaattcgatctcaatgattag

SEQ ID NO: 80239 - DNA, 372 bp, Saccharomyces pastorianus
atgaggagagagaggcaaaggatgatgagtttcgaggacgaggacaaggacgaccttgacaatagtaatagtaataacagcagtgaaatgacagatacggcgatgatgccaccattaaagagattgcttattacgggcagtagcgatgatttggcacaaggatcatcgggtaagaagaagatgacgatggcgacgaggtcgccatcgtcatcacccgatttggcgacaaacgacagcggcactagggtacagccattgccagaatataacttcaccaagttctgctatcggcataacccggacattcagttctcaccaactcatacagcgtgctacaagcaggatttgaacgacgcagagattatgctatga

SEQ ID NO: 80240 - DNA, 405 bp, Saccharomyces pastorianus
atgattgctggcggtactggtattgcgcccatgtatcagattatgaaagctattgccatggaccctcacgacactaccaaggtctctctagtctttgggaacgtccatgaggaggatattctgttgaagaaggaactggaagcgttggtggccatgaagccttcccaatttaagatagtttactacttagactctcctgaccgtgaagactgggctggtggtgtaggatacattaccaaggatgtcatcaaggaacacttgcccgctgctacagtggacaacgttcaaattttgatctgtggtcctccagccatggttgcctcagttagaagaagtaccgtggacttggggttcagacgttccaaaccgctttccaagatggaagaccaggtgtttgtgttttaa

SEQ ID NO: 80241 - DNA, 696 bp, Saccharomyces pastorianus
atgttcaaagtttacttggctggggcacggacgtgtacatcaagctcaaaggcccttctaaggccgcactactctccaaaaggtaacagtgctaaatttcctcgtaaagcggtaccattaagggctctttctacttctttaaattatctacatatgtataaatattcttattatataaggcgaaaaaatgaacgagaaaaaaaagtgttgaaagtatgcatccaactggctcttcaacaagagactcaatcaattaagcaatcgaagatggctattgatgctcaaaagcttgtggtggtcatcgtgatcgtggtcgtgcctttgctcttcaagttcattatcggaccgaagaccaagcctgtgctggatcccaaaaggaatgacttccaatcatttccgctggttgaaaaaaccatcttaacgcataatacttcgatgtacaagttcgggctacctcatgctgacgacgtactcggtttaccaattggtcagcatatcgtaattaaggccaatatcaatggtaaggatattaccagatcgtatacgcccacatcgttggatggagatacaaagggaaactttgaattactagtgaagtcttaccccacaggtaacgtttctaagatgattggagagttgaagataggtgactcgatccagatcaagggccctcgtggaaactatcattatgagtga

SEQ ID NO: 80242 - DNA, 165 bp, Saccharomyces pastorianus
atgcaagatatttatttcggactactgatagcattagagtcatttacgttctttttccaagcaactgtgctgttcattcaatggttcaaaagtactgtacagaatgtaaaagacgaggtttacactaagggtagagctttagaaaatttaccagatgaaagttaa

SEQ ID NO: 80243 - DNA, 1227 bp, Saccharomyces pastorianus
atggttttccacaagataggtccaagattatctcacaaggacttgaaagcacgtctgaaggtaagattccccatgatggatgatagaatggttgaatatttagcgagggaaatgagagctcatgacgaaaatcgtcaagagcaaggtcatgatagactgaacatgccagccgcagcagcagataataataataatgttattaatcccagaaacgataacgttccacctcaggatcctaatgaccatcggaattttgaaaaccttcgccacgtagacgaattagatcatgatgaggctacggaagagcacgagaacaacgactctgacaatagtttaccatcaggtgatgattcgtcacgaattttaccggggtcttcaagtgacaacgaagaagatgaagaagcagaggggcaacagcaacagcagcaaccagaagaagaggcagattaccgtgatcatatagagcccaatccgattgacatgtgggcaaatcgtcgtgcgcaaaatgaatttgatgacctaatcgctgctcaacagaacgcaataaacaggcccaacgctccggttttcatcccaccacctgcccaaaacagagctggaaatgtcgatcaagacgaacaagactttggcgcagctgttggtgtgccaccagcacaggctaacccagacgatcaaggacaaggccctctagtgataaatctcaaattgaaattgttgaatgtcattgcttatttcataattgccgtagttttcaccgcaatatacctggcaatttcctatttgtttccaacttttattgggttcggtttgttgaaaatttattttggtatatttaaggttattttgcgtgggttgtgccatctttactacttgtctggcgctcatatagcttacaatgggctgacgaaactggtccctaaagtagatgtcgcgatgagttggatttcagaccacttaattcatgacatcatttatctttacaacggctacactgaaaacaccatgaagcactcaattttcatcagagctttacctgctttaacgacgtatctaacctcagtcagtatcgtttgtgcttcatccaatcttgtctcgaggggttatggccgtgagaacggaatgagcaaccctactagaaggctgattttccagattttatttgcactcaaatgcactttcaaggtgttcactttatttttcatcgaattggctggatccccattctag

SEQ ID NO: 80244 - DNA, 1818 bp, Saccharomyces pastorianus
atgcactttcaaggtgttcactttatttttcatcgaattggctggatccccattctagctggtgtaatgctagatttctcattattttgcccaatcctggcatccaatagtcggatgctttgggttccttcaatatgcgcaatatggcctccattttcccttttcgtatactggacgattggtactctctacatgtattggtttgccaaatatatcggaatgattaggaaaaatatcattagaccaggtgttctattctttatcagatctccagaagatcctaatattaagatcttgcatgatagtttaattcatccgatgagtattcaattatcaaggctttgcttatccatgtttatttatgcgatttttattgtcttaggttttggcttccatactagaatttttttcccattcatgctcaaatcgaacttattatccgttcctgaagcttataaaccaacatcaattatttcatggaagttcaatacaattttgctaactttatattttacgaagaggatcctggagtctagctcttacgttaaacccttattggaaaggtattggaaaacaatttttaagttatgttcaagaaaattacgtttatcatcctttatcttaggtaaagataccccaacagagagaggccatattgtttaccgcaatttgttttacaagtacattgctgccaagaatgcagaatggtcaaaccaagaacttttcactaaaccaaagactctagaacaagcagaagaattgtttgggcaagttcgtgacgttcatgcttattttgtccccgatggcgttttaatgcgtgttccttcttctgatatagtatccagaaattatgtacaaacaatgtttgtccccgttacaaaggatgataagctgttgaaaccattagatttggaaagaattaaagagagaaacaaacgtgctgctggtgaatttggttatttagacgaacaaaacacggaatatgatcaatattatatcgtttacgtccctccagatttccgtttacgctatatgacattgcttggcctggtttggttatttgcttccattttaatgcttggtgttacatttattagtcaagctttaataaactttgtttgtagtttcggctttcttccagtcgtaaagctattgttaggtgaaagaaataaggtctatgttgcatggaaggaactctctgacattagctactcctatttgaacatttattatgtctgtgtcggatctgtttgtttatccaagattgctaaggatattcttcattttacagaaggccaaaacactctcgatgaacatgccgttgacgaaaacgaagtagaggaagtggaacacgatataccagagagagatatcaacaatgcccctgttaataatatcaataatgtggaagagggtcaaggaattttcatggccatctttaacagtatatttgatagtatgttggtgaagtataacctgatggtgtttatagctatcatgattgcggttattagaactatggtttcgtgggtcgtcttaaccgatggtatactagcctgttacaattatctcaccatcagagtgtttggcaattcttcatacactattggtaattccaaatggtttaaatatgacgagagtttgttattcgtcgtttggatcatttcgtcaatggtcaatttcggaaccgggtttaagtcattgaaactatttttcagaaacagaaatactagtaaattgaacttcttgaaaacaatggctttggaactgtttaaacaaggtttcctgcacatggtaatttacgtcttgccgatataa

SEQ ID NO: 80245 - DNA, 99 bp, Saccharomyces pastorianus
atgactttcacacttctagtctctttgattcaattagtggtactcttggctaaaaaaacagtttttgaaatcagtaacaaagaactattcttaacgtaa

SEQ ID NO: 80246 - DNA, 132 bp, Saccharomyces pastorianus
atgtcacatttaacatccgcgcctggttttgaaatgtctatattttttgaagctacccattccaacagacaggattcatgcatgtatttaattgagcccctgcatttacaaggatggaaaagaggattgtct

SEQ ID NO: 80247 - DNA, 165 bp, Saccharomyces pastorianus
atggatcaagacaaagttaattttgcatcgggtgataacaacaccgcttcaaatatgccgggaagtaacgaagacgtaatgatgacgggcgctgagcaagatccttactccaatgcatctcaaatgggtaatactggatcaggagggtatgataatgcttggtag

SEQ ID NO: 80248 - DNA, 585 bp, Saccharomyces pastorianus
atgggccgtaatattgggcatcctattatacaagataaagaaggtaacggtgttcttatttgtaaattgagaaaaggtcaagaattgaaactgacatgcgttgcgaaaaagggtatagccaaagagcacgccaagtggggtccagcagcagccatagagttcgagtatgatccttggaataagctcaaacataccgattactggtatgaacaggattctgccaaagaatggcctcagtctaaaaattgtgaatacgaagatcctccaaacgaaggtgaccccttcgattataaggctcaggcagatacattttatatgaatgtagaatctgtggggtctattcccgttgatcaagttgtcgtcagaggtatcgatacattacagaaaaaggttgcctcaatattgttagctctgacacagatggatcaagacaaagttaattttgcatcgggtgataacaacaccgcttcaaatatgccgggaagtaacgaagacgtaatgatgacgggcgctgagcaagatccttactccaatgcatctcaaatgggtaatactggatcaggagggtatgataatgcttggtag

SEQ ID NO: 80249 - DNA, 99 bp, Saccharomyces pastorianus
atgcccaatattacggcccatgagattagacacaattaccaagtccttgctgtagacgtttgtagtactttcgctttcgccgaacgcttgcaatgttaa

SEQ ID NO: 80250 - DNA, 129 bp, Saccharomyces pastorianus
atgcctgcaggtctagacgaactaagtcacgggaaagtagatttgacattcggtagttccttagatatatttggtggtaacctagttaagtttgaagactgctgtagatggaatgaaaagcaaggttag

SEQ ID NO: 80251 - DNA, 156 bp, Saccharomyces pastorianus
atgaatccagttgatcaccctcacggtggtggtaaccatcaacatattggtaaggcttctactatctctagaggtgccgtttctggtcaaaaggctggtttgattgctgccagaagaaccggtttactacgtggttctcaaaagacccaagattaa

SEQ ID NO: 80252 - DNA, 366 bp, Saccharomyces pastorianus
atggcagcaagggaaaaaagcagtaaaaagagggcttctaaaaagaacaagaaaggtaagaatcagtttgaaaaagcgccggttcctctgactctagaagaacaaattgacaatgtgtcgttgagatacggcaacgagttggaaggtcgtagcaaggatctaataaacagatttgatgtggaagatgaaaaggacatctacgagcgtaactattgcaacgaaatgcttttgaagttgctgattgagttagacagtatcgatttgattaacgtggatgagtccttaagaaggccgttgaaggaaaaaaggaaaggcgtcataaaggaaattcaggctatgttaaaaagtttggactctcttaaataa

SEQ ID NO: 80253 - DNA, 141 bp, Saccharomyces pastorianus
atgtcgcacaacgcaatggaacattggaagagcaagctgagcaaaacaagtacctcgacgtacgtcctcttggccgtgattgctgttgtatttttggttacaatcagaagacccaatggcagcaagggaaaaaagcagtaa

SEQ ID NO: 80254 - DNA, 1638 bp, Saccharomyces pastorianus
atgtattacgcaacaaccttagatataggtacaccgtcccaaagtctgacagtgttgtttgataccggatctgccgatttttgggttatggattctagcaatcccttctgcttaccaaattcaaatacgtcatcctattcaaacgcaacttataatggcgaagaagttaagccttcaattgattgcaggtctatgagtacttataatgagcatagatcttccacctaccaatatctggaaaatggtaggttttacatcacatatgctgacggaacatttgctgacggtagttgggggacggaaactgtatcaattaatggaattgacatccccaatatccagttcggagttgccaagtatgctacgacacccgttagtggtgttcttggaattgggtttcctagaagagagtccgttaagggctatgaaggtgctcctaatgaatattatcctaattttcctcagattttaaaaagtgaaaaaataatcgatgtggtcgcgtattcgctgttcttaaactcacctgattcaggtactggttcgattgtttttggtgccattgatgaatcaaagttttctggtgatttgttcactttccctatggtaaatgaatatcccacaataatcgacgctcctgcaactttagcaatgactatacaaggattaggtgcccaaaacaaaagtagttgtgaacatgaaacgtttacgacgaccaagtatccagttttgttggactcaggaacctcgctattaaatgcgcccaaggtcatagcagataaaatggcttcttttgtaaatgcgtcctatagtgaagaggaaggtatatatatattagactgtccagtatctgtaggtgacgtggaatacaattttgatttcggcgatttgcaaataagtgttccactgtctagtttgattttaagtcccgagacagaaggcagctattgtgggtttgcggtccagccaacaaacgattcgatggttctgggtgatgtgttcctgtcctctgcatacgtcgtattcgatctcgataattataagatatctttagcacaggcaaattggaacgcaagcgaagtttcgaaaaagctagtaaatattcaaacagatgggtctatttcaggtgccaaaattgctacagctgaaccctggtccaccaatgaaccatttacagtcacctctgacatttattcatctacaggctgcaagagtaggccttttcttcaatcatcgacagcctcttcgcttattgcagaaacaaacgtacaaagtcgcaactgctctacgaagatgccaggcactagatcaactactgtcttaagtaagcctactcaaaatagtgctatgcatcaaagtacaggtgctgtcacacaaacctcaaatgaaactaaattagaattatcctcgactatggcaaactcgggcagtgtctcgcttcccacttcgaattcaatagacaaagagttcgaacattcgaaatctcaaactaccagcgatccaagtgtagcggagcattctacgtttaaccaaacgtttgtacatgaaactaaatatcggcctactcataagacagtcataacagaaactgtcacgaagtattctacagtcttaataaatgtatgtaaaccaacatattaa

SEQ ID NO: 80255 - DNA, 189 bp, Saccharomyces pastorianus
atgatcattggcgatgctgacttagtctacgtaacaagtcctcgagcaatgtctcacttcaaaatttgcctaagcaacatttcgtccaaagaaatagtgcccgttctcaatataaaccaggccacgatatttgatattgatcaagtcggatcgttaagtactttcccatttgtatataaatatttatga

SEQ ID NO: 80256 - DNA, 282 bp, Saccharomyces pastorianus
atgccgaaagtaattttggagtctcattcaaagccaacagactcagtttttctacagccatggataaaggcattaattgaagacaactcggagcatgatcaatatcatccctctggccatgtaattcctagcttgaccaagcaggacttagcgctaccgcatatgagcccgacaattttaaccaatccgtgccatttcgccaaaattacaaaattttataacgtttgcgactacaaggtatacgcatcgataagagattcctcacaccaaatacttagttga

SEQ ID NO: 80257 - DNA, 246 bp, Saccharomyces pastorianus
atgggagctatgggtcagagaataaaagcactcaagtcattatcgttgaagatgggtgatgagattagaggcagcaatcaaactattgaccagcttggtgatactttccataacacttctgtaaaactcaaaaggacttttggaaacatgatggagatggccagaagatctgggatcagtataaaaacatggttaataatattttttatggtaggcgtgctatttttttgggtatggattacataa

SEQ ID NO: 80258 - DNA, 840 bp, Saccharomyces pastorianus
atgcggctttcacgaaatgttacacaaacacagcaacaagatctgcataataatggtaattcttcagctactaccgcttcagcagatattgctaaaaaacacacagattcttctattactagcgataccacgaaggcagattttacgagcaaattgaatggactgtttgcgctacctggtatggtgaaccctggacagcttccaccttccttggagaagaagttgtcctccccggatactgaatctaagctaggaacccaggaccaatcacaggaaaaaacgggacctctgggcggcactagaagaggtagaggacctcgtgggcgtaaattaccttctaaagtagctagcgtagagaagattgaagaagatgacaacactaataaaatagaaatatttaacaattggaatgtttcctcttccttctctaaggaaaaaatcttaatggatactactcctggtgagcaagcagaaagggccttggatggaaagtcaaagagcattcccgaggaacaacgagaacaatctccaaataagatggaggctgctctttgtccttttgagctggacgaaaaggaaaagttacctgctaatgctgagtcggatcctctttctcagttgccacagacgaacgccgtaggtaatagaaaagccataagtgaggaatctctgtccccatcggaggccatcgccaacagagatcaaaacgatacgacagaaatacaggaacagcagatggaggaccaaatggaggttgatatggaaagagaactctcaggtggctacgaagacgttgattctgccttacattcagaagaagcgtcttttcactccctttag

SEQ ID NO: 80259 - DNA, 1776 bp, Saccharomyces pastorianus
atgccatcggaagttacgccaaaagtacctgagaggccctcaaggaggaagacatctgagctgtttccgttatctggctctgaatcaggagatattaaagctaatagcgagccaccaacaccagcaggaacgcccaatgtaccaacacgtagacccatacttaaagcaaagacgatgacttcgtttgagagtggtatggatcaagagagtttgcccaaggtaccattgcagaggccagttagacgctccactactgaagaactaaataatgtaatgaataacaccagtaaggagttagaggagattgaaagtttgatttcaaagcacaatatacacagtgtttccaggaaaaaaagtccaacttctgtgcaagagggaaaggcggccgccattcatcaaaacgggcaaagaagtgcatcagataacaaaacttctacaaatccctccccactcgaaaaaaatgagcacaagggtgatgagggcaatgagtctgctatttcaccttctaattcagttaacaagtctaataatgaagtgacagagcatagtgactccgaagaccttactgaaaagcaaaaggtacatgctgccctagataatgaggcaggggatagaagccattttgaagaaaagctcattcctggagatatgaaagtacaggtagatgttagtaaggacgtagaagaaggcagcctcaatgctctgcctccatctggaatcacagaatcagacgacaaagctgaaaagttcactaaacatcctgaatctagtttagaagagctacagaagcatcaagaacaacaggaagaaaaaattttccaaaatccaaccgatgaagaaagtactacctctttgaatgagaaacaagaaggcaaggacaacatggaagtgaattctcagccgcaaggaccttctgatactgaaacagttatagcagcaactagctcaaacgttccttcacaaattgcaagtgaagaggaaaatgacgttccagtgattccaaggagtaggcctaagaaggattttgaagcacacgtacaaaaagaggagttgcctaacacacaagagaagcgagtatcagaagagtgtgattcgaccctaattagtaccgaagaggaaagtaaaatcccaaaaattccctctgaaagaccaaagagacgtgccccacctccggttcccaaaaaaccttcttcaagaattgcggcctttcaagaaatgttacaaaaacaacagcaacaagatctgcataataatggtaattcttcagctactaccgcttcagcagatattgctaaaaaacacacagattcttctattactagcgataccacgaaggcagattttacgagcaaattgaatggactgtttgcactacctggtatggtgaaccctggacagcttccaccttccttggagaagaagttgtcctccccggatactgaatctaagctaggaccccaggaccaatcacaggcaaaaacgggacctctgggcggaactagaagaggtagaggacctcgtgggcgtaaattaccttctaaagtagctagcgtagagaagattgaagaagatgacaacactaataaaatagaaatatttaacaattggaatgtttcctcttccttctctaaggaaaaagtcttaatagatactactcctggtgagcaagcagaaagggccttggatgaaaagtcaaagagcattcccgaggaacaacgagaacaatctccaataagatggagctgctcttgtccttttgagctggacgaaaaggaa

SEQ ID NO: 80260 - DNA, 1365 bp, Saccharomyces pastorianus
atgaaggaaaaattagctaaatttgataagaataggcgaaatgttactcaaagttccagatcgattagcagtgaaaactctcgagaacagccacaacagattgctggttcttccaatttagttgaacctagagcaactccattccaagaagaaaaatatgtggaagtcgctcaaccaactcaacctgttcaatcaacacaacctgttcaaccaactcaacctgttcagccaactcaacctgttcagccaactcaacctgttcagccaactcaacctgttcaaccaactcaacctgttcagaatgtatataatgcaaagcaagaatccgatgatgaagatgaagatgatgaagaaaagcgtttacaagaggagctaaaacgattgaaacttaaaaaaaaggctgataaagaaaaaagacttgcagctttacgtaagcaaattgaggatgctcaaaatgaaagtgacgaagaggagacaaacggaaaagacaactttggcggccatgtgaacgttcctcaggccgctccagtggcaccatctgcagctttttcgcaaaattctactaatgctcctcgctcggtacacgctgctgttacccctgccgcaggtaagaacagtactggtctgccttccacgacaatgggccataatccatacttcaaggatgcatcagctagctctacatctactttcgatgctcgcgctgcagaaatgcaaagaagaatccaaagaggattggatgaggacgaggatgatggatggtctgatgaagacgagagtaataaccgcgtagctgtagataataaggttgaagaagcaaagattggtcatcctgatcatgcacgtgctccacctgttactgctgctcccttgccgtctgttacccctattccaccggctgtccctgtccctcaggcgaatacctctaatgaaaagagtagtcctattccaatagctccgataccaccttctgttactcaggagccacccgtcccgttggctccccctttgcctgctgttgatggctttcaagaacctccaattccctcagcacctgcaatagctactgccgtgcaaaaatcgggttcttccaccccagctttagttggaggcgttttgcctccacccccacctttaccaactcaacaagcttccacttcagaacctattatcgctcacgttgataactacaatggtgctgaaaaaggcacgggcgcatatggatccgattctgatgatgacgttttatcgattcctgaatcagttggtacagatgaagaggaagaaggggcacaaccagtttctactgcaggtatcccatcaattccacctgcaggtattcctccacccccaccccttccatga

SEQ ID NO: 80261 - DNA, 2025 bp, Saccharomyces pastorianus
atgtataacccgtaccagcaacagggcatgggttaccagcagcaacagcagcaacagcagcaacaaccaaatggattctacccgcagcagcagcaaggtcagtcttcaaaccagccccaaggccagcctcaaccacaacagcaaatggcgtttaaccagcctcaggctaccggaattggtgggatgcctcaaagttttggtaattctttctcaagtatgccacagcagccccaaacgggttacaataataatggaaataatggtagtgtatatggtaatggtaattttggccaacaaccccagcagcaacaacagcaggtgaaaccgcagcatacgggatacgtaccaaattccagtatgcctatgatgaatactactggcaccatgcctccacctaatccggctcaacagcctcagctacaatccatacaaccccaaggaacaggctattaccaatctgctaatactgcaaatgtacactcagtacaacctttgcaatctcaagggacaggatattatgtgtctacacccaatttgatctcttctaatcaaacccagcagccccttcaggcccagggcactggttattatcaatctcaacctcaacaggtgccacctcctcagcaagcacagtccttgcaacctttgaagccgcagcaaacaggattttaccttcaaccgcaaaaccaagctcccttagaaccattaaagcccaccgcaactggctttgtcaactcatttgccaacaacggtctaaacaatgatatcaaaatccctgccattagattgtcgtttattactgcccaagatcaggcaaaatttgagactctattcagatcaattgttaccaatggttcgaatactgtttccggtgctaattgtaggaaaattttgatgagatccggtttgccaccttctcaactcgcaagaatttggacgctttgtgatacatcaaaagcaggtgagttactgtttcctgaatttgcattagcaatgcatttgatcaatgatgtcttacaaggtgacactatcccttacgaattggattctaagacaaaaaacgaagtttcaagttttattgacgccattaatttaagcattgcaaaccaggattcttccgcaaatgatgccccaaaaactccctttgatgaattcattacagcgggcgtacaaaatttgcaacctcaaccaacaggatatatgcctcaaactagttttggtatcccattacagtctcaaattactggaggcggtgttgcctcggcgttgaatcctcaatccacaggatttatggcaccaaccactttcaacatgtcaatgaataccggaactcccggattgaacccccaaattactggaggagcacctgcctctatgcaacccaacattactggcaatgctttgcaacctcagacaactggtatgatgccacagacaactggtatgatgccacagacttcatttggcgttaatttaggacctcagttgaccggcggtgctttgcaatctcagtataccggaggatatggttccgttatgccccagcaaagcggtcctgcaagtatgcccaatttgtcctttaatcaacaaggattacaatctcagttaaccgggttgcaaccccaaccaacgggttttctaccaccatctaactttagtgctaccatgccgttgactgcccaaaagacaggatttggtaataacgaaatttataccaaatccaactttaataataacttaattgataactcaagtcaagacaaaatttccacggaggaaaaatctttgttttataaaatttttgaaacttttgatactcaaaacaaaggtttgttagattcccccactgctgtggagatttttagaaaatctggcttaaatcgtgcagatttggagcaaatttggaacctttgtgatataaacaacaccggccaattgaataaacaagaatttgcactaggtatgcacttggtttacggtaaattaacgggaagccaatccccaatgtcctaccttcaagtttaa

SEQ ID NO: 80262 - DNA, 963 bp, Saccharomyces pastorianus
atgtctgctctaacaggaaaatcaacggaatcggaggattcactttccatggaagatgaacagcaaagtgctgaaatcaagagaatccagcaggaaaacggtaagaaccaagaaatcattaaagacataaggtcatctatatcagatatttctgcatccttgaagtctactatgacaggatcgaatatgatatccaatcaagaatttgaaagatgggaatttggcatagggttagaagatggtgttcgtgaatttttggatgatctgaagtcaaattcaaataaatcagtgactgagtcatctccctttgtgccttcctcaacaccaacccctgtagatgaccgttcctcgtcgccttcttattctcagttcaaaactgctgaagaaagagcagcttatctgaaagaacaggcaaaaaagagaatgaaggaaaaattagctaaatttgataagaataggcgaaatgttactcaaagttccagatcgattagcagtgaaaactctcgagaacagccacaacagattgctggttcttccaatttagttgaacctagagcaactccattccaagaagaaaaatatgtggaagtcgctcaaccaactcaacctgttcaaccaactcaacctgttcaaccaactcaacctgttcagaatgtatataatgcaaagcaagaatccgatgatgaagatgaagatgatgaagaaaagcgtttacaagaggagctaaaacgattgaaacttaaaaaaaaggctgataaagaaaaaagacttgcagctttacgtaagcaaattgaggatgctcaaaatgaaagtgacgaagaggagacaaacggaaaagacaactttggcggccatgtgaacgttcctcaggccgctccagtggcaccatctgcagctttttcgcaaaattctactaatgctcctcgctcggtacacgctgctgttacaccctgccgcaggtaa

SEQ ID NO: 80263 - DNA, 501 bp, Saccharomyces pastorianus
atgaacgtgaacaatctttcggaacatctacagaacctgatatcaagcgattcagagctgggctcgcgcttgctatcattgctgctggttagcagtggcaacgcggaggagctcattagcatgataaataatggccaggatgtctcgcagtttaagaagctccgcgagccgagaaaggggaaggttgccgcaacaacagcagttgttgtaaaagaagaggaagctcccgtgagcacttctaacgaactggataagattaagcaagagcggagaagaaagaacacagaggcgtcgcagcggttccgcattcgcaagaaacaaaagaattttgagaacatgaataagctgcagaacttaaacacgcaaatcaacaaacttcgcgatcgtatagagcaattgaacaaggaaaatgagttttggaaagcaaagctcaatgacattaacgagattaagtctttgaaattgttgaatgacattaagagacggaacatgggcaggtag

SEQ ID NO: 80264 - DNA, 174 bp, Saccharomyces pastorianus
atggctcccgttgtcacatctccatctctaactggtccactacaatctgcttctggttctgcagtcgctacatactctgttccttctatctcgagtacttaccaaggtgctgctaatatcaaggttcttggaaactttatgtggttgctactcgctcttccagttgtattctaa

SEQ ID NO: 80265 - DNA, 1053 bp, Saccharomyces pastorianus
atgcaaagaccatttctactcgcttatttggtcctttcgcttctatttaactcagctttgggttttccaactgcactagttcctagaggatcctccgaaggaactagctgtaattctatcgttaatggctgtcccaacttagacttcaattggcacatgaaccaacaaaatatcatgcagtatactttggatgtgacttccgtttcttgggttcaagacaacacataccaaatcactattcatgtcaaaggtgaagaaaacattgacctaaaatatctatggtctttgaaaatcattggtgtcactggtccaaaaggtaccgtccaactatacggttacaacgaaaatacctatttgattgacaacccaactgatttcacagccacttttgaagtctatgccacacaagatgtcaacagctgtcaggtgtggatgcctgacttccaaattcaatttgagtatttgcaagatagtgccgctcaatatgcaagctcttggaaatggggaactacatcttttgctttgtctactggttgtaacaactatgacaatcaaggccactctcaaacagatttcccaggcttctattggaacatagatgacttcgtaccgccacaattgttgtcacaatctaccactacatcaactagtacttccgagtcatctaccactacatctagcacttccgagtcatctaccactacatcaactaccacttcagaatcatctacatcatcatcaaccaccgctcctgctacaccaaccactacctcatgcagtaaggaaaagcctacacctcctcatcacgacaccactccatgtacaaagaagaaaaccaccacatctaagacatgcactaagaagactactactccagtaccaaccccatcaagctctactactgaaagttcttctactccagtaaccagctccaccactgaaagctcttctgctccagtaccaactccatccagctctactaccgaaagctcttctactccagtaaccagctccaccactgaaagctcttctgctccagtaccaactccataa

SEQ ID NO: 80266 - DNA, 198 bp, Saccharomyces pastorianus
ttttttcctgccgcgaaagttaatttgcctgccggcgttcctattggagccaggaaaagatcacgaggaattacagctgtgagaacatactctggggctggcgtaggcacacaatccggtattcctaaagttttgtggtacaaaactccatacctaaaacatagaacaaatctcgcccgtggatccttttattcataa

SEQ ID NO: 80267 - DNA, 249 bp, Saccharomyces pastorianus
atgccacatcgagagaccaaaaagtttctcaatggcgtctttttagtgtcataccattcttttttactacctaggatcatcgacaatgattttagagttttaaaatttgctttgcggcaatacaaatctatagccgggatcaccgaccttgttatattcttcggagacatctttagagtaaccacagatattcaataccaacctatacttccattgctgcttgtctcacatctaaacttcgccgtttag

SEQ ID NO: 80268 - DNA, 405 bp, Saccharomyces pastorianus
atggaagggttttcctttaatgagactcttatgggagtcaattcgcaccagaaggtgtcaatgaattcaggattgcagacagctgcaagcaaacgagctttttcattggtagaagttacgtacactccttggcatttcgcgtatagtaggtgttctaggatgtttgattgcagtttacaattaaaatccaccagatctgatcgctctctttctatagaaacaagattcgtcatattaggagatacaccaagaatcgatatgatcttttcagttgcaaaaagtgtatcaacaggtagtaaactaatattctgtcttctttcagttgcaaatgtactgtcaaagggtattttttgccaatcgaccaagctagtgttaaacttatcatcaacggtcatcttgcaataa

SEQ ID NO: 80269 - DNA, 867 bp, Saccharomyces pastorianus
atgatgttcaacttcaaacacacctcagtaggcgaaagtcctgaatgtaagtatgagcttatcccctttactttgaaagattttaagctggctcttgctgagagttttttgtttattgaaaacactgactgctggtctaccatctatttggaaaatcatgatcaacctcgtagcgtttcgagatttggctcagattctcctaaatggcgtgcgatttcgtcgaaaatgttggccacccttatcatttcattgactggtacagtttttatctaccaaggacaagaattgggtatgtccaacttcaaaaacagaagaattgagcaaatcaaatgcgttgaaggtactggtacatatgccgccattaaacgtgattatggtgaagattctgaaaagatgaaaaagttttttgaagcattagctttaatctctagagatcatgggagaacaccattcccatggagtgctgatgagccttctgcaggtttctcgaaggatgccaaaccatggattgacatgaatgaatcatttagagacggaatcaacgcagaagctgagttaaaagataaaaattcagtcttcttcttctggaaaaaggccttacaagttagaaaggagcacaaagatatccttgtttatgggcataactttcagttcattgatcttgataatgacaagctattcatgtttacaaaggacacagataacaaaaaaatgtttgcagttttcaatttcagtagcgataatacagacttttcagttcctgataatgaggcctcctacaccatgttttttggcaactatgcaaactcaaatggtgattcccgcaccttgcaaccatgggaaggaagactttacttgttgaagtaa

SEQ ID NO: 80270 - DNA, 858 bp, Saccharomyces pastorianus
atgacgatcatccataatcctaaatggtggaaagaagccaccgtctaccaaatttatcctgctagtttcaaggactccaacaatgacggatggggtgatttagctgggattacctccaaacttgactatgtcaaagaattaggtgtcgatgcgatatgggtgtgcccattttatgactctcctcaagaagatatgggttacgatattgccaactatgagaaggtttggccacgttacggtaccaatgaggattgtttccaaatgatagaagaagctcataagagaggtatcaaggttattgttgacctggttatcaaccactgttctgaagagcatgaatggttcaaggagagtaaatcttccaagaccaatccaaagcgtgactggtttttctggagacctccaaagggtttcgatgagaaaggtaatccaattcctcccaacaattggagatctttctttggtggatctgcttggagatatgacgaaaaaactggtgagttctttctgcatgtgtttgctcctggccaacctgatttcaattgggaaaatgaaaagtgccgtaaagccatttatgactcctcagtgggctattggctacgtcacaacgttgatggctttcgtattgacgtaggcagcatgtattctaaggttgagggcctacccgatgctcctatcactgatcctacagttccttaccaaaaaggaactgaatttttcataaatggaccacgaattcacgagtaccataaagaaatgcgtaaatatatgctttctcaaatcccagaaggtaaagaaatcatgactgttggagaagttggtgttgggacctgcaggcatgcagctgcatgccgtcgt

SEQ ID NO: 80271 - DNA, 282 bp, Saccharomyces pastorianus
atgggggttcctaatcggttttttactccttttattacttcggcaattaatttctactacggttatgttttcatgggttgcttagcattttcatatttttacgtcttcttctttgttccagaaacaaaaggtctaactttagaagaagttgatgagatgtggatggacggtgtattaccttggaaatctgaatcctgggtaccagcttctagaagggatggtgattatgataacgaaaaattacagcatgacgagaaacccttctacaaaagaatgttttag

SEQ ID NO: 80272 - DNA, 279 bp, Saccharomyces pastorianus
atgactgatcgtaaaaccaacttaccagaagaaccgattttcgaagaggcagaagatgacggctgcccttcaatagaaaattcttcacatctgtcagtacccacagtggaggaaaacaaggacttttccgagtataatggggaagaggcagaggaagttgttgttccagaaaagcctgcttcagcctatgctactgtttctatcatgtgtttatgtatggctttcggtggatttatgtccggttgggacacaggtacgatttctggtttcgtcaattag

SEQ ID NO: 80273 - DNA, 1002 bp, Saccharomyces pastorianus
atgggtttaactatagtcattgtcgtttatatggttggtattgtcattcaaattgcctctatagataagtggtatcagtattttattggaagaattatcgctggtataggtgctggttccattagtgttcttgccccgatgcttatttcggaaactgcgccaaagcatatcagaggtacgttgctagcctgttggcaattgatggtgactttcgcaattttcttgggttattgtaccaattatggtaccaagacttactcgaattctgtccagtggcgtgttccgcttggtctatgttttgcatgggctattattatgattggtggtatgacgtttgttccggaatctcctcggtttttggtgcaagtcggtaagattgagcaagctaaagcttcttttgccaagtcgaacaagcttagtgttgacgatcctgctgtggttgcagagattgatcttctcgttgctggtgtggaggcagaagaagcaatgggaactgcttcatggaaggaattattttcgagaaagactaaagtttttcaacgtttaacgatgacagtcatgattaactctctgcagcaactaaccggtgacaactatttcttctactacggtactactattttcaaatctgtcggtatgaatgactcttttgagacttcaattgtcttgggtattgtgaattttgcttcctgcttcttttcactttattctgttgataagttgggccgtcgtagatgtcttttacttggagcagccaccatgacggcgtgcatggttatttacgcctccgttggcgtcacaagactatatccgaacggtaaaggtcaaccatcatctaaaggtgctggtaattgtatgattgttttcacgtgtttttacattttctgcttttcctgcacctggggacctgtatgttatgtgattatttctgaaacatttccattaagggtgagatccaagtgtatgtccgttgcaacagcggcttattatgggggttcctaa

SEQ ID NO: 80274 - DNA, 306 bp, Saccharomyces pastorianus
atgaaaattgcccagaaaaaaaaagttaaaatttgttttggttcagatttattgggtcctctatatggttatcaaacgcaagagtttcgtattagagggaaagttcaatcggcacaagaggttttgctctcagcaactgttactcctgccgaaatgaacggattaggcgataaattgggacagattaagccagggttcattgctgacctactgatgatgaaatcaaatccgttggacgatataacgattttggatgaacccgagagcaacatactatttgtcatgaaagagggaaggatatattga

SEQ ID NO: 80275 - DNA, 1113 bp, Saccharomyces pastorianus
atgagcgaatataaaagcatcatatttgctggtatgtggcgtagcttttctttccaattgaagggacatcgaaacagtatattaaccaagataaaaatgacaacttatcaaatcgatgtcaatgaaggaatgaacaagtccctggccgacttggtggcaccatggcgcccagagccactcaaaaattactgtataagtaacactaatttgatagatgtggtaagcggcgtcagtctccccggagcttacatcttcatagaacagggtatcatttccaaggtcgaatttggttctgaaaagccggtaaccgttgacgaagttgcctttgaaattattgacggcaccggtaagtatgtcactccaggtctgatcgacagtcatgtccacattgcgtcggttgcaggagaggctgatctgaccaagttaatgctgatgccaaagtcagttgcattactcagaataagatacactttggaagccgctctggcaagaggtttcacaacagtgagagactgtgggggtgcagaaggctttctgaaagcagagattcgtcagggatccttgaatggtcccagattaattacgtgtggacatgccatttcccaaactggtggtcatggcgatctgagatctggtgccctacctgctagtgcctttgacagctgttcatgccactttggtcaagttggtgttgtagcagatggtgttcccgaatgctacaaagcggccagagaagagtttagaagaggtgcagactttattaagattatgggtggtggaggtgtggcctctccaactgacaaaatatcaaacaaacaattttgcgacgacgaaataaaagcacttgtagatgtcgcaaatagttacctcacatacgtaacagcacacgcctacactgcggaagcgatacaaaattgtatcaagttaggtgttaagggtatcgaacacggaaacttattagatgaacgtaccgcagaacttatggcagaattgggttgctacttgactccaacactagttacctacaaagtgatgggttctgatcaatttagtgcattcttgggacctgaaaatagtagaaaaaatacagaggtgctttacaaaggaatttga

SEQ ID NO: 80276 - DNA, 2034 bp, Saccharomyces pastorianus
atgttgtgcttagaatccgaaaaatatgaaaatctgctccttgccctcagcaacaaaattgcagatctcattaaaatatcatttcgtggatctacagtgaggaatgaaggcatgaagttaacgggactacacattttgaattttgttctcaagaactactcgaccatgagagatcctcaggttcctggatcgtcgattttagaacagcaagaggcccaaataactagcgcattgatgcctgcttttagtaaaggaagctcacctactgtaatgtcctttgctattactgttgctgctgaagtgttggcatcgaatataatgccaccagataaattgggaagaatttcacaattactaattgaccttcttggtaactttaaagatcctaattccggtatacggataggggaagctataatcgttacacccaaagcgaaaagaaaaattgaacttgccgttttggacgcgtgggctgaggtagtgcaaagatccatcacatcgtcaaatgatgcgcttttctcttttaccaggaaatattggagcattttagtcccattatggatcatttctttacgtgaatacatgatgataaagtataacgataatgattctactgtgcaagtaaagaatgactcgaaagaaaatagtctcattgaaccaagaagtacgaaaattgagttatatgagccggtctggttaaattttgtagaggcccttgggtgcactctggattcagacgttcaagtcattttggcatctcttaacgacgaggaattagagtattttctttttattttatttagccaatgtttggaggctatcgtcaaaaatattgatgatcattcagtcaagatgcaagttttaccggctttacacaatgttttgaagagcaatctgtgcataaaaagtatatttgaggatgatattattactgaagttgttgagattatggacagactgatttctacaggtgacagtaaagaagaatttttgcttgttgatatcatcagtgacttgatcattgggtattcgaagtgtaatgctactcctgaaacatttctacaagatattgacaaactatatgagctactgcgactactgatgacaattatttctgagaggttgccatttattaagtataacgtgcttaccagcgaagaagatgataatgaaataaaaatctctcccacagatattagtctgttgaaaaaaacatttattgcgttcgaatcaaatatcagtaacttcgacaatatgttcaaagtagatctttattcatgtcttttattcatcatagggaaaatttatgaatgtagtcatcgtgaagtaataattccaatcatactcccacttttcaaggcactagtaaaagcgcttacggaatctgaggacgaaaaaaatattgtgttactagaaatattctacgggtcaataaaagatgttatttatcataagctggattcaaagaataaagttgcaaccattttgatcttgctgtctaatggatactctaagctaagttttcaggaactgaatcagtgcgcaaatattctctcggaggcattgaataatcctgctacgcagccaattgctctacaaggcttcaagagaataatatccaatatttttaaatacccgttgttgcagtattttatgaagttggttataaaaagattctttcaagatattcaaacaaacgattccttatcgcaggcaagcattaaaactaagttgataattcagttttccgaggaagtaatcaaacaagatcaccaaaaggcatcattgtcaattgctttatgtctttctttctttgccgcatatcatagcgcatatacagagaaagtagacaacgaagtagcaagtggcatagttgctttggctaaattggacaaaaattcatttaaagaagccatttctagcactataagtcctcaacaaaaagcaattataggttccgtgatggaggcatacgttaaatcgcagtctttgggctctgtcgaagaggcctttcaactgaaatctttcgactaa

SEQ ID NO: 80277 - DNA, 3396 bp, Saccharomyces pastorianus
atggagaaaagtaaatattatcatgctaccttcatgacaacccttcttcagctttttaatgcgattctaagaaattccaataatgatgataaaatccttgatccagccacatatgcgaaattttcgaaactatccaaaaccgtttttgacagtatttccactgatgagaaggacttttcagttacttttgtgtctgtcctaattgaatgctggacagctcatttcaaacaaactaattttatcagagagcactcccatgatattatagagaccatatattctagatttaccgaaggtgaaataggtgtttatggttttgcaaacgacgaaactcgtatctttaccgcaaaatctttagcggagatattatttgattattacttttctaaaaatattttaactctacaagaagtatggtccatctacgttaagatattcttaaactgtgatacacgagacgtggaaagtggttgcttcgaatctattattcatttgataaacttgaatttattagctgacaacacttttttgagtaactcaaaatatttggatatagttctctctttaagcggcgtcttcagcagttacgaagtgaataataggagcatgaatacattatcaaggtatttgagatactttcaacatatgcatgaagtaatattgccacatttgaatgattctgcaaagactcaaatgttgtactacatcctaggttgttctgatacttaccagagctcctctaaaagtgattcagcttcaaatttcaaatatagtattgatgcgaagcctgaaacacagtggcttacattactgcagcttgacttcacgtatgtgttaatcagcgacttaggttctactttcaccactgaggaaaataccgttaaagagattagagataaactggttgatttagctacatgtgaaatctttacgatacgagttcacactgtggaaattttgaaggtttttttgaacaactgtccagaatatctttcggagaccattgaaaactccttacgtgcactatccactgattttaaatctacaggaaaatttatttttcataaaaatcatggccatgcttttataatagcaaatctaatcaaaggtgccgagagcgattatatttcctatgagttgatcatgagaattacagtgttttctacatcattcattaagaataatactacatctacctcttctaatttgtacttcaagggtcttttatgctggatattattgataggattgatgaattataaagatgaacagtatttgaagctgcagataccccaactatttcttttctggaaagttttattaacacatacctacacataccacgacgaggatgaattatacaagaacctagaaatccgaaatcatgcattgacttgtttattgacgtatttaagcaatacgacaattgataaagaaatggctaaacaagtatcatatttgctaactaagtgctccaattttaatcattccattgacctgaaatcgaaaaacattgacaatgctttactgcataatgaaaacagaattttacaggtataccttaagctggagaaatacataaatagcgattttaatagttctttactaatattaatcgtgaagaatttttcagaccccaatctttacaccgagtcaagtagttccgttttgggaagcttaaaagatattggtaacaggaaagtgagtaacaaggacgacatggaaagtaatatagtattagaatcttcaattaatactctacttcgtcaaaacaacggctttgcattcggcctatccagcaaaataactggggaccgtatcgtgaatttatcgatgtccagtgcttacaagtatgatgaatcaataagtggaagttggccatccaaggattacaattggtacaatattttcgaagtggaagtatcaaaaccaatttcacccattttatctttagattcactgattctactatatggatctgggtcttattcccaaattgaccgctacgcacctcaggtcactacatctttaattgactcttctatggaacttttttcatctgtattcccttttttgaatagcaaaatacagtattccattatggaaactttaaatttgtccatgttctccaaaatgactacaccattgagaagcgtggctgtggctgctaatgtttgtagtgctctgcataatgctttacgcatcatgcaagaaaacaatctagagttggactattcagtggggcagctaattatcgaatcaataaagaagattcagttttttaatgacatttttctcacaaaaatcaaggcagattgtgtaggattgctgacagcggctatcgcaagaacacttggcgatgaagaaagacaaaaattccttacagagcaatcaaggatattcattaaaaacgtcgcagatatggacgaaccatacttaaggatgtttcatgtcttatcattggctacaatttttaaatataactcacaatatgctaattttgaagaatactttgatgtaatttttgcattaatgagggatccacaccctgttgttcattcatggtcattgaaagcaatgcatattcttcttgagaaacatttagtgattgatttaaagacggcagctctgttgctaagttctatggaagagcttttggtccaggataagtatggtatttacgggcgctctactcttcgctgtaactataatagggactttaattctcacgtagcaatcggtgaaatttcaaggacattgactgaaactgtggggccaaattttctagaacttaacaccaaggttcttgattcgttcagaaacattacactctccatgttaatttcaaataatattctcaacagcataaccagcattaaaatgtttgaaaacatagctacttttaaaatgaaaaacattctaaactatgaaatctttattcttgcttctaagagcataattaaaagttcaatagtgactggaataggctcatcatattttgacactacattcatgggctcaaatgaactcatttctcgaacttcaagtctaaaaggcgcctttgaaaactttgatttattgacgttgttgtacaaattacagatggaggaatttttcatgaaagaaatggaaaatttgagctggagatatctcgcactttttccaaattccggtcctgtcaagaattattttaccgaatggatattacatacttttaaaagagataatcattggttcgataaattatactcaatatttaatatgagtttaggaagactcttccaaagctataacagagacgtgtcagccctactagaggtaaatggcctaaaaaaatcttcagaaaaggaaattaaaggcgaagaagaagaatcaatagcgaatgttaccaactga

SEQ ID NO: 80278 - DNA, 339 bp, Saccharomyces pastorianus
atggcaaaccgatccctcaagaaagtgatagaaacatcatcaaacaatggtcacgatttattaacttggataaccaccaatttggaaaagcttatatgtttgaaagaagttaatgataatgaaatacaggaggttaaggaaatacacactcaactggatgagtttgtgaggtatatctccgtactagaaaatacggatgatttagaactgcattcagtgtttatcagtttgtctcagctctatacgatttccatatggcgtttgaaggacgaatatcctggtgtagtttttgattccgcagcattcttaacaaacgtattgtgtgaagggatcctctag

SEQ ID NO: 80279 - DNA, 105 bp, Saccharomyces pastorianus
atggtaggctgtctcagctactatgtgtacgaaaggaaaatggggcgtccacaaggtcatcatttacacgagctcataaagaagcgatgggacgatcgcaaataa

SEQ ID NO: 80280 - DNA, 1545 bp, Saccharomyces pastorianus
atgtttgcaaagttacccaaagagaccaagttctatttacaaaagatttttattgttcatgagtcattcttcgttaggtcggtctatcaagtaatttcaaacgctatgaactttaacttcttggactcaaaagatagtcagcatgattttccaagtttagttcatgtcttggacctgacttctttatccgaactaatagatattacgcgacttagaatatcgttgaacgtgtacttatatgattaccagatacgcgaacatataaatgtcccggaggaatattataacagattgacccctctggcaataagacagtataggcagttagtattcgataaaattttcaagaaattacagaatgacgctctgttgtgtgaattgatattccagaagccgggaaactataaaaaggtaaacatttttttggatattatcaaaagaaacaactacattgatttatctcaatgggatatttattctttggcatccgtgtggttgaattacttcattaagaataaagccaaacctctaatcccaattgaattaattccgttaccaattgttgatgatctaaagttcacaagtgaaacattccgcaaaattattaaattcaaccaataccaggacctctttatggtcataattcctttttttaataggatcatagcgcatggtgaatcgactaaacatgattcaaggaccctaagtaaagctttaactccggcgttatgtaaggaaaaactttccatgatgactaatgatcgtttagctattgggtcgagatatattaaaaatttactggactttttccccgaaatcgcgaaggaaatatcatcacctccttcatccgtatcatcgtcttctactatccctgttttgcctaagccaaggaagtcgtcgccaaccagatacagtgaactaggctgcttaacccttcctagaagtcgaagccctagtccacaaagatctgttacgtctccaacgtacacacctgtcgcattacaaaatacaccagtcttgaaacctaagtcttcaagcagaaatgtttcatccccatcattcaatgccaaacctccacttcctattaaggcagttacacgaccacaactgtctctaacttccaattctaatacagatttggcattagcttcttcttctacagatacattatcctcaccgacgaagactccatcagcagactcgcttccattgagtaacagcagcaccgatttaacgatatcagataatatcaaagaaatggttaaggacgagccagcaaaggataaaaattctgtggaaacagatatattcgtacaacagtttgaaagtttaaccctcgtccaaaacgcgaagattaagaagttcgacaaagaactacaagaaaagaagaagaaaaatgaaactacttcaaagacagcagataaattctctcaaaagggatattcagatattaaagcaagcaacaaggttagcaggctagctgcattgtacgaagaacgtttacaaggtttacaagtaatgaatgaaatgaaacaaaggtggtaa

SEQ ID NO: 80281 - DNA, 234 bp, Saccharomyces pastorianus
atgatagatatcaacgttaataacatattttttagatcttactcagttgatcctaactctggtcacgcaatttatgtctttgattcgacttatttgccagcatctgatgaaattggcgataagcaagtttatgacttgcttattaatgccctcatggatcgattggtaatgaaattgccacaggcaccatattcactggtgattttttatctgggttttcccagagaaaaataa

SEQ ID NO: 80282 - DNA, 279 bp, Saccharomyces pastorianus
atgaaagtcaaggccgacagagacgaatcctctccatacgctgctatgttggctgcccaagatgttgccgctaagtgtaaggaagtcggtatcactgccgttcacgttaagatcagagctactggtggtaccagaaccaagaccccaggaccaggtggtcaagccgctttgagagctttggccagatctggtttgagaattggccgtatcgaagacgttactccagtcccatcagactccaccagaaagaagggtggtagaagaggtagaagattatga

SEQ ID NO: 80283 - DNA, 120 bp, Saccharomyces pastorianus
atggctaaggctaagaagcaaaacagaccattgccacaatggatcagattgagaaccaacaacactatccgttacaacgctaagagaagaaactggagaagaactaagatgaacatctaa

SEQ ID NO: 80284 - DNA, 105 bp, Saccharomyces pastorianus
atgaaaaaaaaagccaagaaaaacttgaaactgacgcgcgaaaacgcgtcactaagaataaggaaaatgcatcaatacagtgccattattccaagtgggacctga

SEQ ID NO: 80285 - DNA, 147 bp, Saccharomyces pastorianus
atgacggggtacagggtcatacacctcacaggcatatattataccttctatcaccgaaaaagcttcttcttcttcttccttgaatatctccataatagtttgcgcgtactgtcctggaagggtataataaccgaaatggcagcttga

SEQ ID NO: 80286 - DNA, 816 bp, Saccharomyces pastorianus
atggtatcgaagacttggatatgtggcttcatcagtataattacagtggtacaggccttgtcgtgcgagaagcatgatgtattgaaaaagtatcaggtgggaaaatttagctcactaacttctacggaaagggatactccgccaagcacaactattgaaaagtggtggataaacgtttgcgaagagcataccgtagaacctcctgaagattgtaaaaaaaatgacatgctatgtggtttaacagatgtcatcttgcctggtaaggatgctatcaccactcaaattatagattttgacaaaaacattggcttcaatgtcgaggaaactgagagtgcgcttacattgacactaaaaggcgctacgtggggcgccaattcttttgacgcaaaactagaatttcagtgtaatgacaatatgaaacaagacgagctgactagtcacacatgggccgacaaaagtatccaattgaccctaaaaggaccatctggctgtttgaagagcaaagatgatgacaaaaaaaatggcgacggcgataatggtaaggatggtgacaacgaggggaaaaagccagctaagaaggcaggcgggacttcgtggttcacttggttattcctatacgctctactgtttacattgatatacctgatggttgtatcatttttgaataccagaggaggctcttttcaagatttccgtgctgagttcattcaacgttctactcaatttctcacttccttacctgaattctgcagggaagtggtttcgagaatcttaggcagaagtactgcccaaagaggcggttatagcgccgtttaa

SEQ ID NO: 80287 - DNA, 2025 bp, Saccharomyces pastorianus
atgcctgcaggtcgtgacgttaaaaacatggaggacgtcaaaatacaaaaagaggaagaaccagagaataacactgttattgaaggtgtcaaagaagaaagtcagccagatgagaacacaaaggaaatggatgaagtggaagaagatgatgaggatgacgatcaaccgatgattagtcctgataattccatttttggagacacaaagagtgagtctaaacaactaggcaacacttcgtcggttgctaatactccatctgaaattccagatgcgcataaagctgaacaggaggatatcatagaaaagacggaaagtgtagataagaaggtagatagtggcgaagagagaaacgaacaggaacgtgaaatcatgaacgatcactccaaaagtgccaatccaaagaaaaccactatcaccagagtagaacccgaaacttttgagataccgcaagcacatgaaattgttattccaagttattctaaatggttcaatctagaaaaaattcattccattgaagttcaatcgttacctgaatttttcaccaataggattccatcaaagacacctgaagtttacatgagatacagaaacttcatggtaaattcttacaggctgaaccccaacgaatatttcagtgtcactacggcgaggagaaacgtctctggtgatgctgctgcattattcagattgcataaattcttaacaaaatgggggctaataaactatcaggttgactccaaactattacctaagaacatcgaacccccactaacgtctcaatattccacaaggcatgatgcccccagaggactattcccattcgaaagttacaaaccatctgtacaactgccggatatggcaaagcttaaaaaaatgatgaacactagtgattcggagagtactttatataaatatttgaaagaaagcaaaagaaaatatgatgaaataactcacccccccagtaccactgatgatgaaaatggtgacaaaaatgataatggtggtaaaatgaacaatgaagtaagtacgtcaacaagcatgactggtgatgccaatctattggaagaaggcgaaacttcacgtcctctgaaaaaagtcaaaattctagaacaaattgatgaaaattggtcaaaagaagatttgcaaaagctattaaagggaatacaagaattcggcgctgactggtacaaagtggccaaaaacgttggcaataagtcgcctgaacagtgtatcttacgtttccttcaattgcccattgaagataaatttttatacggtgacggcaatggcaagggtgataatgacaacgggttaggacctttgaaatatgctcctcacttgccattttcgaagagcgaaaaccccgttttatcaacaatagcattcttggtgggtttggtcaatccgaagactgtacagtcgatgacccagagagccattcagtccgcagaatcaataaaatcacaaaaagaggaaatctctgaccaaaagccaattgaacatattaaagaaggttcagaaattgccatatcatcattgggttataggagtcatattttcgctactaacgaggaaaggcaaatgaattttttgactaacgagctaataagacttcaaatggaaaaattggacgctaaattaaatcatttaaagaaactagaaaaatttatggagctagaaaggaaaaccctagaaagacaacaggaaaacttactaattcagagattgaacttcaaccaaaactccagcaagattgtaaacgttttaagcaaatgcttgaatttaatatccgacagcaatatcaataatagttcagtggcggagaaggaggaaatcaggtcgcagatagaccatttcaaaagtatgctatcgaaacctgaaactttaagtattggaaagaatccatttaacaaacctaatattgaaacaggtgaaaaccataatggccaaagtatatctaacgagaatgatgtcaaacccatttctattgaagcacctcaattttacaggtattggtcggcataa

SEQ ID NO: 80288 - DNA, 672 bp, Saccharomyces pastorianus
atgtctcatgtccaaaatcaggttatgataagggttgtggggtttaccgtagtggcattccagcttactatgggtacggaggtacaatcaaaaatgtttctgtttgaattcgaaatgcctactgaaactgagaacaatagcagctctattgggtactatgacttgcctgctatttggttgctaaacgatcacattgcaaggacttctcaatatccaaccaatgccaactgttcatgttgggctagtggatgtggggaatacgatatttttgaagctatgaatggtacggagaaaaaccatctctattctactttccacactttccaaggtatcgaggatttgggtactggtatccaatcttacggatacataacaagaaatactactggaacgatgaaaggtggtgttgtttttgattctagtggaaatgtcgtctctttcatatccgatgccactccattcaatggaacagtttctgctgatactgttaacgatttattggctgcaattccagaaaacgaaacatattcttctcaattgatgagcatttctgctactgcgccttcgaccacctcgaagtcgaatggtgttgctttaacgaagatgcaaaacggtgtatggtattatattttggccatattcactgccttcacgcaagtggttttgatttga

SEQ ID NO: 80289 - DNA, 627 bp, Saccharomyces pastorianus
atgttacagagtatagtcctttccgtgtgcatgtttatgttgcacacagtcgctgccagtggacctcagtcgtaccaaaagttggatttcactaatgttggttttacaggctcctacgtagatgtgaataagtttaaagatatcaccaacaatgaatcgtgtacttgcgaagtgggtgacagagtatggtttagtggtaagaacgctccactagcagactatttatccgttcatttccgtggaccattgaagttgaaacaatttgctttttacacatcccctggatttaccgtcaacaacagcagaagttcttctgattggaaccgtcttgcctactatgagtccagttccaaaaccgctgataacgttacctttctaaatcatggaggtgaagcttccccttgtttaggaaatgctttgtcctacgctagttctaacggtactggcagcgccagtgaagctaccgttttggcagatggcactttgatttcttcagatcaagaatacataatctattcgaatgtctcatgtccaaaatcaggttatgataagggttgtggggtttaccgtagtggcattccagcttactatgggtacggaggtacaatcaaaaatgtttctgtttga

SEQ ID NO: 80290 - DNA, 630 bp, Saccharomyces pastorianus
atgactactttagcatcaagtattgagcataaaacaaaacatctagccgcgcccttcgagaacgatgagaacccttggatgaaaaaatactgttgccaatgcaaatcatgtaaaatgagtgtgcctgtccaaccttggctgccaaggttttttgtttttggaatcttgtgccccgttttctggttggtgaatcttttagcctggtggttcttacagtattggcaaccacatgaattggaattccacgacttgcaagaagacgaatacccaggattttatgaatatgaagccataactaaaagaacggtgatacccataaaggaagaagtcctccaagagattcgcgtcatgcagaatttcagtgatagcaacagcgaagaatattacgagagcaaagacggtatgccgtcgtctatcctaaacgtgaacacggaacaagtcgaggacgagaatgacaccttgaaaaaatatcgttacgcgtttttgaagaaggtagcccacgatgtgctggagtcgcacgatttattacgtaagaccttccgcgactggaatttacggtctttgcttggcctcctcatcgattctatactcataatatttgtagttctcctatgtaagaaaagccgttag

SEQ ID NO: 80291 - DNA, 102 bp, Saccharomyces pastorianus
atgatgtcttctaccaatgtttgtccggtactttctacaacttgtacgacgaacacattggtagtcaatgtactccagtccacttggaagctatcgatttga

SEQ ID NO: 80292 - DNA, 273 bp, Saccharomyces pastorianus
atgaacttaaagggcggtatcttaactgacggtaagggtagaattggttctattgttgctaacagacaattccaatttgacggtccaccaccacaagctggtgccatctacgctgctggttggtctataactccagacggtaacttggctattggtgacaatgatgtcttctaccaatgtttgtccggtactttctacaacttgtacgacgaacacattggtagtcaatgtactccagtccacttggaagctatcgatttgatagactgttaa

SEQ ID NO: 80293 - DNA, 114 bp, Saccharomyces pastorianus
atgaaagtaaacagatatttccttacttggaaaaataaagcgacaatgaaggtgagttttatagtcgctcctacagtgatgcaagtgcaatgtcttttttttttcatcctgtaa

SEQ ID NO: 80294 - DNA, 144 bp, Saccharomyces pastorianus
atgttgaaaattgcatcgctgaaaaaaaaagatatgcaaacaaaagaaagttgcattctgaaacgaccgagtctctcttgcccgcctaacaaaaccaaagaggtaaatgaaagtaaacagatatttccttacttggaaaaataa

SEQ ID NO: 80295 - DNA, 1728 bp, Saccharomyces pastorianus
atgtcaccttacagaaggcttagcgcatatcctcctagtacaagtcccccactacaaccccctttcaagcagttacgaagagatgaagtacaaggtcagaaattgtccattcctcagatgcaaccttgcaactctaaaaacgatcttcaacctgtcttaaatgctactccaaagtttagacgtgcgtcgctcaattccaagacgatatctcccctagtcagtgtcacgaaaagcctgattaccacatattctttatgttctccagaatttacctaccaaacgtccaaaaaccctaagagagtacttacgaagcccagtgaagggaaatgtaacaacggattcgacaacataaacagtgactatattctttatgtgaatgacgttttgggtgtagagcagaacagaaagtaccttgtgctagacattttgggtcaaggtacatttggtcaagtggtcaaatgtcaaaatttgctgacgaaagaaatattggctgtaaaagtggttaaatcgaggacagaatatttgactcaaagtataacggaagctaaaattttagagctactgaatcaaaagatagaccctactaataaacaccattttttaaggatgcatgactcctttgtccacaagaaccacttatgtttagtgtttgaattactaagcaataatttgtacgaattattgaaacaaaacaaatttcatgggctctctatacaacttatcagaacattcaccactcaaatactggattcgttatgcgttttgaaggaaagcaaactgattcattgcgatctgaagccagagaatatcttgctctgcgcacctgatatgccggaattgaaaattattgattttggctcatcttgcgaagaggcaagaaccgtttatacatacatccagtccaggttttatcgtgctcctgaaattatactgggtataccgtattcaaccagtattgacatgtggtcgttaggttgtattgttgctgaattatttttgggtataccgatcttcccaggcgcttctgaatataaccaattaacaagaataatagacacgcttggatatcctccatcgtggatgatagatatgggtaaaaactctggaaaatttatgaagaaattggcaccagaagaaagttcttcctctacacaaaagcatcgtatgaaaactattgaagagttttgcagagaatacaatataatggaaaagcccagtaaacaatattttaagtggagaaagttaccagatattattagaaactacaggtatcctaaaagcatacagaactcccaagaacttatcgaccaagaaatgcagaatagggagtgtttgatccactttttaggcggtgtgctaaatttgaacccgttagaaagatggacaccacaacaagctatgctacaccccttcataacaaagcaggagtttacaggtgagtggtttcctccaggatcgtctttaccgggtccttcagaaaaacatgacgatgcaaaaggccagcaaagtgaatatggaagtgcgaaggactctagtaacaatacaggccacaactatgtctataatcctagctctgccactggtggtgctgatagcgtcgacattggtgctatcagtaaaaggaaggagaatatatctggcgacatctccaataattttgctgttactcattctgttcaagaagggccaacaagcgcgttcaataaacttcacattgtcgaagaataa

SEQ ID NO: 80296 - DNA, 786 bp, Saccharomyces pastorianus
atggtttacgtcacttttggagaagattcgatcatgagaagaggttgtttaatatggggatccaagtcatatagaaatatgtgtcgctttaattctggtttttttttccggcagtcaatactggacaactatgattactactttagggtggaacccaatgtcaagtattattgcgatttcccatatgacccgttcagagttatgagattgaagggcaaaaaatacggatttgtcatatcattatatgaatatgaggaaaccataccaaccttatgggacgcggtagaggagtatttagtggccagcgaagagaccattttacgtaaagaggacagtgcctatgcatttttgaccgattcaggactagttggtaagcattatcccgttgttgaagcaaactctgactacaatttgtgccatttttggtcgaattttgagattggcgacttgaatttcttcagaagtgacgaatataagcatttttttgaaactttagatgccaagggcggattttactacgaaaggtggggtgacgcacctgtacattcaattggtgtctccctactgctgagacctgacgaaatcattcattttgacgaacttggctattttcactcaccgtttggcacctgtccagcatcttacgctgttagactcgatcagaggtgtagatgcaaaagcgatgatgaaagtgtcatagatataaccccacatagttgtttgatgagatggtggaaaaacggtagcggcaaatatttcttaaaagaagagcaagacgagatttaa

SEQ ID NO: 80297 - DNA, 669 bp, Saccharomyces pastorianus
atggcaaaaggaggctcgctatacatcgttggcatattcttaccaatatggacctttatgatctatatttttggcaaagagttattcctcatacgaaaataccaaaagattgacagtacgtatactgctctttcccaaagagtaaaagaacaatatgatacaagtcgaagaagaaactattttcctaaagtaaaactttcccgcaatagctacgacgactacactttaaattataccagacagaatgattctgattcttttcacctacgagaaaatgcaacaattttaatgctggtgagaaattcagaattagaaggggcattggattcaatgagatcattagaggacagatttaacaacaagtatcattatgattggacttttctaaatgacgttcctttcgatcaagacttcattgaagctacaacatcaatggcgagtgggaagacccaatatgctttaataccaccagaagattggaatcggccgcaatggattaacgatacactttttgaagaaagactccgagtcatggaggatgagggtgttttatatgggggatccaagtcatatagaaatatgtgtcgctttaattctggtttttttttccggcagtcaatactggacaactatgattactactttagggtgaacccaatgacctgcagc

SEQ ID NO: 80298 - DNA, 495 bp, Saccharomyces pastorianus
atgttcggtgcagccatatattcttggaattttgaaggtatgagttttgtagccgtatctcaaccaatgtttgacactgtgtttatatatattgagaagtctgggcaaatagagtttttcttaaaactggttctaaaggttaaggcaaaatcagattccatcccggatgagtttggttcatctttgctgtttaatgacgaagaaaagaaattgtacgtttcctccccaggcagtttcgatgcaagaggaagtatatggaaaattagtatggatgagctattaaaggtgggaaacgatccgaagcgcaaaacccttttgattaataatttaaggcatctcatgctcataaatcctgacaaaagtagcaagggtgtgtcaaattttggtaatagcatgattttgggtccccaaaatcaccttatagtaggcattccccaatatgggtatggaaattttgatcacatgcagctaaccggtagaatcttggtactttaa

SEQ ID NO: 80299 - DNA, 5049 bp, Saccharomyces pastorianus
atgaaagatgaatttgaggcgttaggagttaaagtattgggtactccaatcgatactattattaccacggaagaccgtgaactcttcagtaatgccattgacgaaattaatgaaaaatgtgctaaatctcaagctgctaattcagtggacgaggcattggccgctgtcaaggagatcggtttcccagttattgtacgtgctgcatatgcattgggtggtttaggttccggtttcgctaataatgaaaaagaattggttgatctatgtaatgttgcattttcatcctcacctcaagttttagtcgagaaatctatgaaaggttggaaagaagtcgaatatgaagttgttcgtgatgcttttgacaactgtattactgtttgtaatatggaaaattttgatccactaggtattcacaccggtgattccatcgttgtagccccatctcaaactttatctgatgaagattacaatatgttaagaactactgctgttaatgttattagacacttaggtgttgttggtgaatgtaatatccaatatgctttaaatcccgtttctaaggattattgcatcattgaagttaatgcgcgtttgtcacgttcctctgctttagcttctaaggctactggttacccattggcctacactgcggctaagttaggtttgaatatcccattaaatgaagttaagaactccgtcacaaaatccacatgtgcttgttttgaaccttctctagactactgtgttgtcaaaatgccaagatgggatttgaagaagttcaccagagtttctaccgaattatcttcatcaatgaaatctgttggtgaagttatgagcatcggtagaaccttcgaagaagctattcaaaaagctatcagatccacagaatatgctaacctcggattcaatgagacagatctagatatcgacattgattacgagttgaacaaccctacggatatgcgtgtcttcgccattgcaaatgcttttgctaagaagggatattctgttgataaagtctgggaaatgactagaattgataagtggtttttaaacaaactgcacgatctggtccaatttgctgagaaaattagttcatttggtactaaagaggaattaccttccttagttttaagacaggctaagcagttaggttttgatgacagacagattgcaagatttttggattccaacgaagttgccatccgtagattaagaaaagaatatggaattacaccatttgtcaaacaaattgatacagttgccgctgaattccccgcttacacgaactatttatacatgacatacaatgctgactcacacgatttatcctttgatgaccacggtgttatggtcttgggttctggtgtttaccgtatcggttcttctgtcgaatttgattggtgtgctgttactgcagttagaacattacgtgccaacaatatcaaaactatcatggtcaactataatccagaaactgtttccacagattatgatgaggctgatagactatactttgaaaccatcaaccttgaaagagttttggatatttacgagattgaaaactcaagcggtgttgtcgtatcaatgggtggtcaaacttccaacaacatcgccatgactttacatcgtgaaaatgtaaagattcttggtacatcccctgacatgattgattctgctgaaaaccgttacaagttctctcgtatgttggatcaaattggtgttgaccaaccagcttggaaagaattgacatccatggacgaagctgaatcttttgccgaaaaggtgggttatccagttttggtacgtccatcttatgtgttatccggtgccgccatgaatactgtttattctaaaaacgatttggaatcctacttaaaccaagccgtcgaagtttcacgtgattatcctgttgttatcactaaatatattgaaaacgcaaaggagattgaaatggatgcagttgcaagaaatggtgaattggttatgcatgttgtctctgagcatgttgaaaatgcaggtgtccactcgggtgatgcaacattaatcgttccacctcaagatttggctcctgaaactgtggatagaattgttgtcgccactgctaaaattggtaaggctttgaaaattacaggtccatacaacatccaattcattgcaaaggacaatgaaatcaaggtcatagaatgtaatgttcgtgcttcgagatctttcccattcatttcaaaggttgttggcgtcaatctgattgaattggcaacaaaggccataatgggtttgcctttgacgccttatcctgttgaaaaattaccagatgattatgtcgccgttaaagtaccacaattctctttcccacgtttagcaggagctgatccagtcttaggtgttgaaatggcctctactggtgaagtcgctacttttggccactcgaagtatgaagcatacttaaagtctttgttggcaaccggcttcaaacttccaaagaagaatattttattgtctattggttcttacaaggaaaaacaagaattgctttcttccgtacaaaaactatacaacatgggatataaattatttgcaacatcaggtactgctgactttttatctgaacatggtattgccgtccaatatctggaggttttaaacaaggatgatgatgatcaaaaatcagaatactcacttactcaacatttggctaataatgaaattgacctttacatcaacttgccttctgccaacaggttccgtcgtcctgcatcctatgtttcaaaggggtataaaacacgtcgtttggctgtcgattattcggttccgttggttactaacgttaaatgtgcaaaattgttgattgaagccatttcaagaaatatcactttagatgtttctgaacgtgatgcacaaacttcccacagaactattaccttacctggtttaatcaatatcgcaacttatgttccaaatgcatcccatgttatcaaaggcccagctgaactgaaggagaccacacgtctatttttggaatccggttttacatactgtcaattgatgcccagatccatcagcggacctgttattactgacgttgcatccttgaaggccgcaaactctgtttcccaagattcatcttacactgacttttctttcactattgctggtacagcacacaatgctcatagtgttacgcaatctgctagcaaagtgacagcattgtttttgcccctacgtgaattaaagaacaagatcacagcagtagctgaacttctgaatcagtggccaactgaaaagcaagtgattgcagaagctaaaactgcagatttggcatcggttttattgttaacctcccttcaaaacagatctattcacattactggtgtttcgaataaggaagatttagctttgattatgacggtcaaggcaaaagaccctagagtgacttgtgatgtcaatatttattctttgtttattgcccaagatgactatccagaggcagttttcttgcctactaaggaagatcaagagtttttctggaacaaccttgatagtatcgatgctttctctgtcggtgctcttcctgttgccttggcaaatgtcacaggtaacaaggttgatgttggtatgggtatcaaagattcattaccactattgttggctgctgttgaagaaggtaaattaaccattgatgatatcgtcctccgtctgcatgacaatcccgctaaaattttcaacatccctactcaggactcagttgtcgaaattgatttggattattctttcagacgtaataagagatggtcaccattcaacaaagatatgaacggtggtattgagcgtgttgtctataatggcgaaacattagttttgagcggtgaattaatttcaccaggcgccaaaggaaaatgcattgttaatccaagtccagcttccataactgcttccgcagagctccaatctactagtactaaaagaaggttctcgatcacggaagaagcaatcgctgataatttagatgccgcggaggatgcaattccagaacagcctttggaacaaaaattgatgtcttcaaggccaccaagagaacttgttgctccaggcgccatccagaatttgatccgtagtaacaatccattccgcggaagacatatattgtctatcaaacaattcaaacgttctgatttccatgtgttgtttgctgttgcgcaagaactaagggcagctgtcgcaagagaaggtgtcttagatttaatgaaaggccacgttattactacaattttctttgaaccatctactcgtacttgttcttcattcattgctgctatggaacgtttgggtggtagaattgtaaatgttaatccattggtgtcttctgtcaagaaaggtgaaacccttcaagatactatcagaactttggcttgttacagtgatgccattgtcatgcgtcattcagaagaaatgtctgttcatatcgccgctaaatattctcctgttccaattattaatggtggtaatggttctcgcgagcatcctacgcaggccttcttggatttgtttacgattcgtgaagaaatcggtactgttaatggtattactgttactttcatgggtgatctcaaacatggtagaaccgtacattcattgtgtcgtttgttaatgcactatcaagtcagaattaatcttgtttctcctccggaattgaggttaccagaaggattaatagaagagctaagaaaagctggcttacttggtgttgagagcattgaattaacccctcatatcatctcaaagaccgatgttctgtattgtacaagggtccaagaagaaagattcaatagccctgaagaatatgcacgtctgaaggatacttatatcgtggacaacaagatcttggcacacgccaaagaaaatatggctatcatgcatccattgcctcgtgtaaatgaaatcaaagaggaagtggactacgatcatcgtgctgcttacttcagacaaatgaagtatggtttgttcgtcagaatggctttgttggccatggtcatgggtgttgatatgtga

SEQ ID NO: 80300 - DNA, 426 bp, Saccharomyces pastorianus
atggccactattgctcccactgctccaatcacccctccaatggaatctacgggtgaccgtctggttacgttggaacttaaggacggcacggtcttacaaggttattcatttggtgctgagaaatccaccgctggtgaattagttttccaaactggtatggttggttatcctgaatctgtgaccgatccatcttatgaaggccagatcttagtcatcacttacccattggtaggcaattatggtgtcccagatatgcacttgagagatgaattggtcgaagaattgccaagatattttgaaagtaatagaatccatattgccggtttagttatttctcactataccgacgagtactctcattatcttgctaaatcttccttaggtaaatggttacaaatgaagggatcccagctgtttatggtgtga

SEQ ID NO: 80301 - DNA, 1089 bp, Saccharomyces pastorianus
atgtttaaaatttctcctgatttatcacagatgagagaaagtttaggttttctcttagaccatccacgtcgttgtttcaccttgctatttcctaaggcagctacatggtggctacttttaacgcttgcaggattgaatataactgattggattttatttattattctagattttggctcaacagttgtgaaatcattatcgaaaggctatagagtccttgtcggcctgtttcaatctgttagcacaagaactgctggattcagcgttgtcgatttaagtcaactgcatccttctatccaagtctcctatatgctaatgatgtatgtctccgtattaccattggccatctctattcgacggacaaatgtttacgaggagcaatctttaggactatatggagatatggggggagaaccagaagatacggatactgaagacgatggtaacgatgaagatgacgacgaggaaaacgagagtcacgaaggtcaaagtagtcaaagaagtagttcaaacaacaacaacaataacaacaggaaaaagaaaaagaaaaagaaaactgaaaatccaaatgaaatatctacaaaatcctttatcggtgcccatttaaggaaacagctttcatttgacttgtggtttctatttttagggttatttatcatttgcatttgtgaaggggacaagataaaggacgtacaagaaccaaactttaatatatttgcaattctttttgaaattgttagcgcttacggtacagttgggctatcgctaggttatccggacaccaaccaatcgttttcaagacagtttactacattatctaagttggtgatcatagctatgctgatcagaggcaagaatagaggtctaccatactcactggatcgtgcaattatcttgcctagtgatagacttgaacatattgaccaccttgagggcatgaaattgaagagacaggctagaaccaatacagaagacccaatgacggaacatttcaagagaagtttcactgatgtgaaacatcgttggggagctcttaagcgtaagaccacacattcccgaaatcctaaaaggagcagcacaacgctctaa

SEQ ID NO: 80302 - DNA, 2385 bp, Saccharomyces pastorianus
  modified_base (2336)..(2336): a, c, g, t, unknown, or other
atgcattttagaagaacgatgagtagagtgcccacattggcatctcttgaaatacgatataaaaaatctttcggccataaatttcgtgattttattgctctatgtggtcactattttgctccagttaaaaaatatatcttccccagttttatcgcggttcactacttctacacgatatccctgacattaataacttcaatcctgctatatcccattaagaataccagatacattgatacattgtttttagcagcgggcgcagttacacaaggtggcttaaatactgtggatatcaacaatctaagcttataccaacaaattgttctgtatatcgtatgctgcatatcaacaccaattgcagttcatagttgcttggcatttgtacggctttactggtttgagcgctacttcgatggtattagagactcttctagacgaaattttaagatgagaagaacgaaaacaatcttagaaagggaactaacagcaagaaccatgaccaagaatagaacaggtacccaaagaacgtcttatcctaggaaacaagctaaaacagatgatttccaagaaaaattgttcagcggagaaatggttaatagagatgagcaggactcagttcacagcgaccagaattctcatgacgttagtagggacagcagcaataataatacgaatcacaatggtagcagtggcagtttagatgatttcgttaaggaagacgaaacggatgacaatggagaatatcaggagaacaactcctactcgagggtaggtagttcgtctaacacagttgcagacgaaagtttaaatcagaagccgaagccaagcagtcttcggtttggtgagccacacagcaaacaaagacccgcaagagttccctcagagaaatttgcaaaaagaaggggttcaagagatattagcccagccgatatgtatcgatccattatgatgctacaaggtaagcatgaagcaactgctgaagatgaaggtccccctttagtcatcgggtcccctgcggatggcacaagatataaaagtaatgtcaataagctaaagaaggccaccggcataaatggtagcaaaatcaagattcgagataagggaaatgaaagtaacactgatcaaaattccgtgtcaagtgaagcaaacagtacggcgagcgtttcggacgaaagctcgttacacacaaattttggtaacaaagtaccttcattaagaacaaatactcatagatcaaattcgggcccgatagccattactgataacgcagaaacagacaaaaagcatgggccatcaattcaattcgatataactaaacctcctagaaaaatttcaaaaagagtttcaaccttcgatgatttgaacccaaaatcttccgttctttatcgaaaaaaagcatcgaagaagtacctcatgaaacattttcctaaagcgcggcgaatacggcaacaaattaagagaaggctttctactggttcaattgagaaaaacagcagtaacaatgtttcagatagaaaacctattactgatatggatgatgatgatgatgacgatgacaacgacggcgataacaacgaagaatactttgctgacaacgaaagcggcgatgaagatgaacgagtacagcagtctgaaccacattctgattcagaactcaaatcgcaccaacaacagcaagaaaaacaccaactgcagcagaacctgcaccgcatgtataaaaccaaatcatttgatgataatcgttcaagagctgttcctatggaacgttccaggaccatcgatatggcagaggctaaggatctaaatgagctcgcaaggacgcctgattttcaaaaaatggtctatcaaaattggaaagcccatcatagaaaaaaaccgaactttaggaagaggggatggaataacaagatatttgaacatggtccctatgcatctgacagcgatcgcaattatcctgataatagtaatactggaaacagtattcttcattacgcagagtctattttacatcatgatggctctcataaaaatggaagcgaagaagcctcttccgactctaatgagaatatctattccacgaatggaggaagcgaccacaatggtcttaacaactatcctacttacaacgacgatgaagaaggctattatggtttacatttcgataccgattatgacctagatcctcgtcatgatttatctaaaggcagtggtaaaacgtatctatcatggcaaccaactattggacgtaactcaaacttccttggattaacaagagctcagaaagatgaattaggtggtgtcgagtacagagcaatcaacttttatgcacatattgngttgtctactacgttggatggcatgggatcctctagagtcacctgcagc

SEQ ID NO: 80303 - DNA, 165 bp, Saccharomyces pastorianus
atgtacccaataatggaaatccagatggtggctgttccacttgctcttcccagtccaactgcactggtgcattatcagcagcagcaacagcagctcccgcaacatcatccctggtacgacctctcgctttctgaagaagccctctcgacctgctgttgtagttga

SEQ ID NO: 80304 - DNA, 2313 bp, Saccharomyces pastorianus
atggacggtagaaatgaaaaaccaaccactcctgtgtcagattttcgggtgggaagctccgagcaaagtcaagcgggagtgaatcttgaagatagtagtgaccatcgcacttccaattcagccgagagcaaaaaaggcaatttaagtggtaaaagcatcagtgatctaggtatttctaataatgataacaaaaatgtaagattcactgctgatacggatgctctagaaaatgatttgtcttcaagatctacagaaaccagcgataattctaagggcacagatggacaagatgaacaagataggcctgctcgccacaagaggaagcctaaagtttctttcacacatttaaggaacaatggtaaggatggagacgatgagacgttcatcaagaagataataaataacctgactggaaatcaagggggtttggtccctggcttggcaccaataccttcagaaaatgaaaatgggaagaatgatatagaaaaaaataaccgtaatgaagaaattcccttatccgatctagctgatgcgtctaaaatcgtagacgttcatgagggcgacgataaagaaaaactggaggctctcaaattagaaggtgacgtaaattgtacgtcggatggcgaaacgttaggctcaagttcaaaaaattcatttctggcgcctgcagtggatcattttgatgattatgcggaaaacaattcatccgacgataacgaagggtttattgaaacctccacatatgtaccccctccatctcaagtgaaaagtggagtactagggtcattattgaaactttaccaaaatgaagatcaaaattcaagctcaatcttttcagattcacaagctgtaacaacagatgatgaaggtatttcttctactgctggaaacaaagacgtaccagttgccaagcgtagcagattacaaaatttaaaaggcaaggctaaaaaaggcagaatgcctagactgaagaaaagactaaaaactgaagcgaaaattacggttcacattgcagacattttacaaagacaccggttcatcctacgcatgtgtagagctcttatgatgtatggtgctccgacgcataggcttgaagaatatatggttatgacttctagagtccttgaaatagatggtcagtttttgtatcttccaggttgtatgattgtttcatttggtgatgcaacaacaagaacttccgaagttcaattggttaggtgtactcaaggtctaaacctttggaagctgcatcaagttcatgccgtttacaaaagagttgtccatgataccttaggtgccgatgaaggtaatgctttactcgatcaaattttggctgacacgaatctatatccaccttggatgtgtgttcttttatatgcattttgttccgctatggtcactccgtatgcctttggtggcgattgggtaaacctggcaatctcattttttatggggctttgtgtggggtcattacaatttattctttcacaaaagtcatacatgtattcaaacgtcttcgaaatttctgcatctattgtcgttagcttctgcggtagagcttttggctctatccctcgttctcacatctgctttggtgcagttacacaaggctcattggcattaatcctgccaggttatattattctgtgtggtgcactagaactgcaaagtcgaagcctagttgctggcgcggtccgtatgttctacgccattatttattctttgtttttgggttttggcataacattgggctcagctttgtttggatggatgtatcacaatgccactaacgaaatttcatgtcctcaattaatttctccgtggttcaggttcctcttcgttccagcgtttaccattagtatctcgttattaaatcaagcacacatctcacaactgccagttatggtcttcatttcttgcaccggttatgtcgtaacatattgggccggtaagcattttgcgaattcgacagagtttactgccgccttagctgcatttgtcataggtgttttaggtaatctatattccagaatttggaaaggtttagcggtatcagctatgcttcccgcaatcttcgttcaagtgccatctcgtattgcttcacaaaattcgttgttgtctgggttgcaaagtgcaaatacaattgttaatgctaatgaaaccattacgacaagcacctccgatccatcgtcctcaatgtcatttagtatgacaatgattcaagtttgtgtcggtatttctgtgggactatttgcttcttcactctttgtctatccctttggtaaaaagaaaactggtcttttcagtttataa

SEQ ID NO: 80305 - DNA, 114 bp, Saccharomyces pastorianus
atgccagattttactccaagaaatttcttgatacctacattaaaaaaatcacgggaaaagttcgagcctcatctatccaattcaaaccaacattttggaaatgtaaccttctaa

SEQ ID NO: 80306 - DNA, 1821 bp, Saccharomyces pastorianus
atggttgaaaaacgtagtagacagagttccagtagtggctcagagttcagtgttccacctgatgtcgataacccgccactttctatccctttgaagactttatcagacagatatcagctgatcgaaaaactaggtgcaggatcatttggttgtgtaactttagccaaagcgcaatttcctttatcgaacatattgggtaaacaacatgatataaggggtactttaatggatcagcctaaaaatggtcaccaaaactatataacaaagacacaaggtgtagtggctataaagacaatgatgacaaaactgcatacactccaggattatacgagggtcagagaaattaagttcatactggcaatcccagcgaatgaccatctgatacaaatttttgaggtctttattgactctgaaaattaccaattacatatcgtgatggaatgtatggagcaaaacctatatcaaatgatgaaacatagaaggcgccgagttttttcgattccttctttgaaatctattctatcgcagatactggctgggttaaaacacatccacgaacataatttcttccacagagatttaaaacctgaaaatattcttatcacaccaagtacccagtattttgaaaaggagtacatgaaccagattggatatcaagataactatgtcattaaacttgcagattttggtttggcacgccatgttgaaaataaaaacccgtatacggcctacgtttccacaagatggtatagatcgcctgaaatattattaagaagtggttactattccaaacctttggatatttgggcattcgggtgcgtggcggtggaagttactgtattcagagctctcttccccggtgctaacgaaatcgatcagatatggaaaattttagaagttcttggtacacctatcaaacgttctgattttgttaatacaaaccacatcacagctccaccacctggtggattttgggatgatgccagtaatttggtccataaattaaacttgaaattgccttatgtagaaggttcatcgttggatcatctactttctagctcccaactatccgatttatctgaggttgtcaaaaagtgtttaagatgggatcctaatgaaagggcaacagcccaagagctttgtaaaatgccattttttgaaaacaccgtggcagcccaagtagacgcaagaggcaatgtgactaatacagaacaagcattgatttttgcaggtataaatccagtagcgaccaacacaaagcccatatattttaactcttcaacaaaattgcccgcagaaacagagtctaatgatattgatatcagcaacaacgatcacgattctcatgctatgtgctcaccaacattaaatcaagaaaaactaactttggtagaatttttaaacgaattcgttgaagaagataatgatgatcactcaatacctgatgttggaacagattctaccatttcagattctattgatgagactgaattatcaaaagaaattcgtaataatttggccctttgtcaactaccagatgaagaagtcttagatcattcattatcgaatattaggcagttgacaaatgatattgaaattataaataaagatgaagcagacaacatggaacagctattttttgacctggaaattcctgaaaaggatgagtttcagagaaaacaaccatttaatgaacatgcagatattgatgaagacatcgttctaccatatgtgaacaactcaaattacacacatacagataggtcacatcatagaggtgataatgttttgggtgatgcctctttaggcgaattcgtttaa

SEQ ID NO: 80307 - DNA, 1230 bp, Saccharomyces pastorianus
atgagagcagaaggtaacaaacctaaaaatggttgcatctgcggttcaagtgactccaaggatgagttgtttatacagtgtaacaaatgtaaaacgtggcagcacaagttatgttatgctttcaaaaaatcagatccaataaaaagagattttgtttgcaaaagatgtgacagtgatacgaaagtgcaggttaatcaagtaaaaccaatgatattccctagaaaaatgggagatgagcgattatttcaattttcatccatagtgacaacttcagcatcgaacacaaatcagcatcaacagtctgtgaataacatagaggaacagcccaagaaacgtcaacttcattataccgccccaacaactgaaaatagcaatagtatacggaaaaaattgaggcaagaaaaaccggtagtatcaagccactttctgaagccactactgaatgaggtaagttcttccaatgacacggaattcaaagcaataacaatatcagagtataaggacaaatatgttaagatgtttattgataaccattatgatgacgattgggttgtttgttctaactgggaaagctcaaggtcagctgacatcgaggtaagaaaatcatcaaatgaaagagattttggagtcttcgctgcagattcttgtgttaaaggtgagctaattcaagaatatttgggcaaaattgattttcaaaaaaattatcagacagatccaaataatgactatcgtttgatgggaacgacaaaacctaaagtactttttcatccacattggcctttatatatagactctcgagaaacaggcggattaacaagatacataagacggagttgtgagcccaatgtggaactagtaacggtaagaccgcttgacgaaaaaccaagaggagataatgattgtagagttaaatttgttttaagggctataagagatattcgtaagggagaagagataagcgtagaatggcaatgggatttgagaaatcctatttgggagataataaatgcatctaaagatttggattccctaccggatcccgacaagttctggttgatggggtcaataaagactattttaacaaattgtgattgtgcatgtgggtacttgggccataattgtccaataactaaaatcaaaaacttttctgaagaatttatgaggaatacgaaggaatccctatctaataaatcttactttaacacaataatgcacaactgtaagccataa

SEQ ID NO: 80308 - DNA, 411 bp, Saccharomyces pastorianus
atgacttcaccggaatcactatcttctcgtcatatcaggcaaggaaggacatacacaaccacagacaaggtcatatcgcggtcgtcgtcgtactcatctaatagttcaatgtctaaagattacggcgatcacacacccttgtccgtcagcagtgcagcttcagagacattaccctcacctcagtatatgccgataaggacattcaatacaatgcctacagctggcccaacgcctttacatttatttcaaaatgacaggggcattttcaaccatcattcttcatcaggctcatcaaaaacggcatcaacaaataaaagaggaatagcagcagcagtagcattggcaactgctgccaccataccatttccactgaaaaaacagaatcagatgataattccaaggtctcggtaa

SEQ ID NO: 80309 - DNA, 405 bp, Saccharomyces pastorianus
  modified_base (60)..(60): a, c, g, t, unknown, or other
tcgactctagaggatccccgagattttccatacatccagaagcaatggttatttcctcanatttgtacgccaatcctatgccaaaaagggtttgtaaccaaagattggaaagaattaaagcattcttccaaacacgagagactatactattatttaaagctaatttctgatagagcaagcggtgaattgccaacaacagcaaaattctttagaaattttgtactacaacatccagattacaaacatgattcaaaaatttcaaagtcgatcgattatgatttgctttctacgtgtgatagacttacccatttagacgattcaaaaggtgaattgacatcctttttaggagctgaaattgcagaatatgtaaaaaaaaataagccttcaatagaaagcaaatgttaa

SEQ ID NO: 80310 - DNA, 1731 bp, Saccharomyces pastorianus
atgggactcttagctttgggcacgcctttgcagtggtttgagtctaggacgtacaatgaacacataagggatgaaggtatcgagcagttgttgtatattttccaagctgctggtaaaagagacaatgaccctcttttttggggagacgagcttgagtacatggttgtagattttgatgataaggagagaaattctatgctcgacgtttgccatgacaagatactcactgagcttaatatggaggattcgtccctttgtgaggctaacgatgtgagttttcaccctgagtatggccggtatatgttagaggcaacaccagcttctccatatttgaattacgtgggtagttacgttgaggttaacatgcaaaaaagacgtgccattgcagaatataagctatctgaatatgcgagacaagatagtaaaaataacttgcatgtgggctccaggtctgtccctttgacgctgactgtcttcccgaggatgggatgccccgactttattaacattaaggatccgtggaatcataaaaatgccgcttccaggtctctgtttttacccgatgaagtcattaacagacatgtcaggtttcctaacttgacagcatccatcaggaccaggcgtggtgaaaaagtttgcatgaatgttcccatgtataaagatatagctactccagaaacggatgactccatctacgatcgagattggtttttaccagaagacaaagaggcgaaactggcttccaaaccgggtttcatttatatggattccatgggttttggcatgggctgttcgtgcttacaagtgacctttcaggcacccaatatcaacaaggcacgttacctgtacgatgcattagtgaattttgcacctataatgctagccttctctgccgctgcgcctgcttttaaaggttggctagccgaccaagatgttcgttggaatgtgatatctggtgcggtggacgaccgtactccgaaggaaagaggtgttgcgccactactacccaaatacaacaagaacggatttggaggcattgccaaagacgtacaagataaagtccttgaaataccaaagtcaagatatagttcggttgatcttttcttgggtgggtcgaaattcttcaataggacttataacgacacaaatgtacctattaatgaaaaagtattaggacgactactagagaatgataaggcgccactggactatgatcttgctaaacattttgcgcatctctacataagagatccagtatctacattcgaagaactgttgaatcaggacaacaaaacgtcttcaaatcactttgaaaacatccaaagtacaaattggcagacattacgttttaaaccccccacacaacaagcaaccccggacaaaaaggattctcctggttggagagtggaattcagaccatttgaagtgcaactattagattttgagaacgctgcgtattccgtgctcatatacttgattgtcgatagcattttgaccttttccgataatattaacgcatatattcatatgtccaaagtatgggaaaatatgaagatagcccatcacagagatgctatcctatttgaaaaatttcattggaaaaaatcatttcgcaacgacaccgatgtggaaactgaagattattctataagcgagattttccataatccagagaatggtatatttcctcaattagttacgcaaatcctactgccaacaaagggtttgtaa

SEQ ID NO: 80311 - DNA, 480 bp, Saccharomyces pastorianus
atgagatctcatttcctaccgatattgacaagcactaattggtgggaagagtcgtacccagaattcttggccctatttagcagggaccaagattttaacgtccgaatgtggaagaagcaatgggcagtattaaaaggacaggcgttcaacgttgtcgaaacattgaaagacccacgacaaggccccttggaattggttagaaggacaaggtgccaggtaatagatgagaagatgcaagttccctgttgcccacctccagtttctattttcaaaaacgccatagacgaacctattggatcatattccacttcaccaatggtactccctagcaccccaagcacaattccatttcatgcacataaccaaagcaatagtaatcctgtatactatgattccactctgcacccatttgctaataaaacagtgatagcagagcggctacaaatagtcaattccacccccgtattcacctggtgttga

SEQ ID NO: 80312 - DNA, 1065 bp, Saccharomyces pastorianus
atgagtaacgaagcttaccagcatgatcataccgtaaatcctcaccagaagatagttgtgaacagctacgattggttacagttccgtgatgagcaagatcactgtaaaagtaagaacccgataacgcacgcttctccaggggtcggttcgaatgcacagaattcagacatagcggaggcccctcaggtattccacccttcctatcaatctctggtcaacgtaccgtccgagagcccgcgacctgatcagacttcagggtccaatcctgccgttggactgcttcataatgcagaggacaaagcgtcagggcaagaagaagaaggaagtcaatatgagattcaatattcggtatttcgtccgctgcatgcatatccaaccaagggcctagcatatgagcagctccgaagaaaagaagaacaagaacagagggaaaacttcaaccatttggtttctgactgtattgaggctgtagagacatttggacgcgaactcgagagaatccaaactggctcaagtgggtcatactttgtgtatggaacacgggccgacgaaagcgttccggtgggggtcttcaagcccaaggatgaggaaccatatggcccattttctcccaaatggaccaaatgggcacaccgcacgtttttcccatgtctgtttggcagaagttgtctgattccaaacctcgggtacatctgtgaaagtgcggctagtttgttggataggcgactggaaacgcatctagtaccctatacagatactgcatctatagagtcttttaatttttatgataatagaaaaaaatgggtattgggatacaaccttcagaagaagaaacaaaaaaagctgggttctttccaactttttttgaaggagtacatcaacgccgatgagttctttcataaatacccattacctgggatgtattcagatgttaaacattcatttcatcgtaagtcatccggcgaagatatcaatcataaaccagagacaaccaggaacctaacagatgagacagaaccgtccaagcaactaaacttcctctccaatttcgacggaactctgaag

SEQ ID NO: 80313 - DNA, 486 bp, Saccharomyces pastorianus
atgctacaactgaaattcatatggccagtggccagaatcacacctatttataggccatttaccagtcatccattcagaaatttagctacttcctcaagcatcagtagtacaaaagctaagactactaagacagatacaactccactaaaattatcaaatgaactatatgcaatattcaagattcataatcgtccatatttggtgaccgagggcgacagagttattcttccattcaaattgaagcaagcggaggtgggtgacattttaaacatgaccgatgtaacaactttaggatctagaaactacaagctagttggtcatccaatcaatacttctctgtatactttaaaagcaaccgttgttgggaaaactaaaagggctttccaaactagggaggtaacgaagagaagaaatagacgggtccgtcatgcaaagagtaaaggtgatttgacaatcttaagaatatcagaactgagtatgaactga

SEQ ID NO: 80314 - DNA, 2634 bp, Saccharomyces pastorianus
atgacagactttgattgcaatattggtgctgcaattccagatgatactttggaatttttgaaaaaaagcttgtttttgaacacttctggaaaaatttatatcaaagaccaaatgaagcttcaacaaaaaccgaaacctgctcctctcacctcagaaaacaatgttcctttaaaatcggtgaaaagtaagagttcaatgaggtccggaacaagcagtctgatagcatcgacagatgatgtttccattgtcacttcgtcttctgacataacatcatttgatgaacatacatcaggaagtgggcgcaggtacccccaaaccccgagttattactatgacagagtttccaatactaatccaactgaagaattgaattattggaatattaaagaagttctttctcatgaggaaaatgcaccaaaaatggtttttaaaacaagtccaaaattagaactcaacctaccagataaaggaagtaaattaaatattcctacccccataacagaaaatgaaagcaagagtagttttcaagtgctaagaaaagatgaggggactgaaattgatttcaatcatcgtagggaatcgccttatacaaaaccagaactggcaccaaaaagagaagctcccaagcctcccgcaaatacttctcctcagaggaccttatcaacttctaaacagaataaaccgatccgcctagtgagggcaagtacaaaaatttcgagaagcaaaagatcgaaaccattgccgccacaattattatcatctcctatagaagctagcagctcgtctcctgattcgcttacttcctcatatactcctgcttcgactcatgttttgataccgcaaccttataagggtgcaaacgatgctatgcgtaggttgaaaacagaccaggactcgacgagtacttccccatctttgaaaatgaaacagaaagtgaatcgctcaaattcaactgtatcgacttcaaattcaattttctattctccttcaccattgttaaaaagaggtaactcaaaaagagttgtttcgtcgacatctgcggccgatatatttgaagagaatgacataacattcgcggatgctccgccgatgtctgacagcgatgatagtgatgacaattctagttcatccgatgacattatctggtccaagaaaaaaacagctcctgagactaataatgaaagcaaaaaggatgagaaaagcgataacagttctacgcattctgacgaaatattctatgattctcaaacgcaggacaaaatggagagaaagatgacctttagaccatctccggaggtcgtttatcaaaatttagagaaattcttcccaagggctaacttagataagccaatcactgaaggaatagcttcaccaacatctccgaaatccttagacagcctactttcaccaaagaatgtggcttcatcgagaactgagccaagcactccttcccgtcccgtccctcctgatagctcatacgagttcatacaggatggacttaacggtaaaaataaaccattgaatcaagctaagacacctaaaagaacaaaaaccataagaaccattgcacatgaagctagtttagcaagaaaaaactctgtaaaactaaaaagacagaacaccaaaatgtggggtacaagaatggtcgaagtgaccgaaaaccatatggtgtcaattaataaagccaaaaattcgaaaggtgagtataaggaattcgcctggatgaagggtgaaatgatagggaagggatctttcggtgctgtttatttatgtttaaacgttactacaggtgagatgatggccgttaagcaggttgaggtccccaagtatagctcacaaaatgaagccattctaagtaccgtggaagcattaagatctgaagtgtccacgttaaaagatttagatcatcttaatattgttcaatacttaggttttgagaataaaaacaatatttacagtttgtttttagaatatgttgctggtggctccgtgggatccttgattagaatgtatggaagattcgatgaaccgttgatcaaacatttaacaacacaagtattaaaaggattggcatacctacactcgaaaggtattctccacagggatatgaaggcagacaacttacttttggatgaagatggtatctgcaaaatcagtgacttcggaatttcaagaaaatcaaaggacatatactctaattcggatatgaccatgcgaggaacagtcttctggatggctcctgaaatggttgatacaaagcaaggctacagtgcaaaagttgatatatggtctctgggatgcatcgttctggaaatgtttgctggtaagcgcccgtggtccaacttagaagtcgtcgcagccatgttcaaaattggaaagtcaaaatcggcaccaccaattcctgaggacactttaccattgatatcgcaaatcggacgaaattttctggacgcatgcttcgagataaatccagagaaaaggccaaccgctaacgagcttctttctcatccttttagtgaagtaaatgaaacattcaatttcaaatctaccagactcgcgaagtttataaagtcaaatgataagttaaactcttcaaaattaaggataacctctcaggagaataaaactgaatag

SEQ ID NO: 80315 - DNA, 1806 bp, Saccharomyces pastorianus
atgccctttttgaggaaaatagtggggacagcacatacacattctaggtctgattcgaactcatctgtgaaattcggccatcagccgactagttcggtagcatcaaccaaaagttcaagcaaaagccctcgtgcaacatctcgcaaaagcatttatgatgatattagaagccaatttcccaacctaacccccaactctacctcttctcagttttacgaaagcacgccagttatcgaacaatcctttaattggacgacagatgaccacatctcagctggaacgcttgaaaacccaacgagctttacaaacagttcttataaaaatgacaatggacctagtagcctctctgattcgaggaaatcctccggtggcaatagcgtaaatagtttgtcctttgacaagctaattctatcgtgggatcctacagaccctgatgaatggacaatgcatcgcgtcacctcatggtttaaatttcatgattttccagaatccaggatattgtttttcaaaaagcatcaattgtttggtcacagatttataaagttgcttgcatatgataatttcgctgtttatgaaaagtatttgccgcagactaaaactgcttcatataccaggtttcagcagttattgaaaaaaacaatgaccaagaacgtaacaaatagccatattcgtcagaagagcgctagcaaacttaaaagttccaggtcttccagcgaatcgatcaaatcaaaattaaaaaatagtaaatcgcaagaggatatttcaaattctagatcaacgtcagaatctgcattgagcccaacaaaatcgggcccttccaagaccgatgaaaagaattttttacattctacttcaacacaccaaaaaaccaaaagcgcaagttcactatacagaagaagttttatatccctaagaggctcatcatcgagcaatgcttcctcagcaaaatcaccttcaaacatcaagttaagtataccggctcggccgcactcaattattgaatctaacagtacacttaccaaatcggcgagcccacctgcatctccttcgtatcctagcatatttagaagacatcacaaaagtagttcatctgagtcgtcattattaaattccctttttggtagcggaataggcgaggaagctccaacaaagcctaatccacaaggtcatagtctgtctagtgaaaatttagctaaaggaaaatctaaacactatgaaactaatgtgtcttcacctttaaaacaatcttcactacccacttcggatgataaaggtaatttatggaataaattcaaaagaaagagccaaataggggttcctagcccaaatacggtagcttatgtaacgtctcaagaaactccatccttaaaatcgaattcgagtactgctaccttaaccgtacaaacggcagatgtaaatataccatctccatcttcatcaccaccgccaatacccaaaactgcaaacagaagtttggaggtcatcagcacagaagatacacctaaaatttcttcaaccacggcgtcttttaaagaaacgtatcctgattgtattaatccagacaagacagttccagtgccggtaaataatcaaaagtatagtgtaaagaactttttactggaccaaaaattttatcctctgaagaaaacagggttaaatgatagtgagaataaatatattctggttaccaaagataatgttaattttgttccgctaaacttaaaaagtgtagcaaattatccagtttcaaagaatctgctctcacaaaattgggaatcaatcacaaaaatgtcactttccatatga

SEQ ID NO: 80316 - DNA, 696 bp, Saccharomyces pastorianus
atggattccacagatctgatcttattgccattcaaaggggcctcgtatgagtatagagggagcccagtcttcattgatgaaaaatacgcaaactttgatcacatttattctcatctcctaggtctgaatgaactatcatctactttcttcaagtctattttccagtcactcaaggcaaattttgccgttcaaatttcaaatacctatggcagattaaatgctgatcgctttaagaggaaacggttcaatttattacttccaaaaccatacctgacacaatccgattatcttggactatatcttctcttattgatatgctatagagatggctataataatgataatgcatcctgtagtatatttattaacagcaagaatattgatttcgcaaaagatttgtcaactacatttgctgagcatgactggctaaacgaatctaccattaaaattgtggatatcccctttgaaacgaaagttccagaagaagcaattgaaaagccgtcctttatagagactgtgcttgatgttggtttatcagatactgctttagctgatatagaggagactacctttattattggagaggaccttcctgatgaaagtgagcccttcagcgaagaggtgaggactgtaatatttgaagggtcgaatcgtcgttttgacacccttattgtgcaccatttttcgtctgaataa

SEQ ID NO: 80317 - DNA, 1746 bp, Saccharomyces pastorianus
atggcaaacactgtaggaggaattctgtcgggtgtaaatccgttccactacaactccagttcgccgcttacattatttctctttcaagcatgtctcatactactggtatgcaatttaattcacattcccttttcaatgatgaggcagcctaaagtcatttcagaagttatatctggtgttattttggggcctactgtatttggtcaaattccaaactatacaaacacaattttccctacatcatcgatcccggggctaaatttagtggcgaatttgggaataatactgtttatgttttttttaggtttagaagtggatattgctttcatcaagaaacacctaaagaaagcactcgtgataggtatagccactttagcagtgccattcggttttggttgtctgctggcgattcctttatttcacacttatgcaaacaaaacagaaggcgaaaggcatattaaattctctgtcttcatggtatttatagctgtttccatctccgttacggcttttccagttttatgtcgtattttaaatgaattgcgcttgatcaaggatagagcaggtatcgttgtccttgcggcgggtatcattaacgatataatgggatggattttgttagcattaagtattattctttctagtgcagaagggagccctgtcaataccgtttatattctgcttatcacgtttgcatggtttttgatttatttctttcccttaaaatacctattaagatgggtgctcataaggacccatgaattggacagaagcaagccttcaccgttggcaacgatgtgcattctattcatcatgttcatttctgcttattttacggatattattggagttcatcctatttttggcgccttcattgctggcttagtagttcctagagatgatcactacgttgttaaattaacagaaaggatggaagatattcctaacattgttttcattccaatctactttgctgttgcaggattaaatgtcgatttgactctattaaatgagggaagagattggggctatgttttcgccacaatcggcatcgccattttcaccaaaattatttcaggtactcttacagctaaacttactggcttattttggagagaagccactgcagccggtgttttgatgtcatgcaaaggtatcgttgaaatcgttgtcttaactgttggtttgaatgcgggcattatcagtagaaaaatatttggtatgtttgtgttgatggcattagtttctacttttgtcactactcctctgactcagcttgtttacccagattcataccgggatggtgttcgcaaatccttatctacacctgcagaagatgatggtgcagcagatggtctcgattctgagggtgtggacaagactgaaattaacactcaacttaattcattggcagatgttagcaaatatagaattggtgaactgaccacggtgataaacactacagaagcgatctctccatctctaaagctgctaaattacctgtctttaggggtatctcccaagcctaagaataataaacataagaacgaaacctccttgagcagaatgacaacagctactgattccacattgaaatctaacacattcaaaataaaaaagatggttcatatctggtctaaaagcgttgacgatgtggataccaatttaagtgttatagatgaaaaattgaccccgtttgagggagtcggtgcattgagggccattcaatttacaattgctcactga

SEQ ID NO: 80318 - DNA, 135 bp, Saccharomyces pastorianus
atgaaaaagacacagaaattttccaaaaaggtgaagaatgaacctgcatcaagtcaaatggatatattttctcagctgtcacgtgcgaaaaaaaagtcaaaattaaacaacggtgaaatcatagtcatcgattag

SEQ ID NO: 80319 - DNA, 2976 bp, Saccharomyces pastorianus
atgtcgtcgaacaatgatctttggttgcatttagtatcccagttaaatactcaacagagagcagcggccctctttgattacactagagggctgcaggtcattgccggtcccggcacagggaagactaaggttttaacttcaagagtagcgtatcttattctgcaccaccatattcatccccgcgatattatagtgactactttcactaacaaagctgctaacgaaatgaaagagcgtttgcaagaaatgttacgcggggcaggcgtgaatatttcggagctcttaattggtacttttcatagtatttgcctgaaaatactttatagatttggccacctggtggatctacagaaagactggagaattattgatgagaaggaaatagatgtcattttagatgatatgatcgaaaaagttcccgaccaaataagggattatgcttcctcaaccacaaggaaagtaaatctttgtatgccgagtaaaaatggagatgaatggactattcatccgaagctgatcaagaaacagatatcaaagctaaaatcaaacgcaatattacctgaggaatacatcttagattcgaatcatgacgccgcgcttggctacttttaccaaatataccaatcagagctaagcaagaaaaatacgttagattttgatgacttattaatgtacacctttcgtttgctgactagagtgcgtgttttatccaacataaaacatgttttagttgacgaatttcaagatactaacggcattcaattggacttgatgtttctttttgctaagggaaatcatcatctttcgagggggatgaccatcgtaggtgatcctgatcaaagcatatatgctttcagaaacgccttagcgcacaactttctagaaatgggcagaaaatgccccatcgagtactcaactatcatacttgttgaaaattatcgttcatcacaaaaaattctaaatacaagcgaaattttaataacgcaacaaaacaaaggtcggcagaatagggctccactccgtgcccaatttgacctggattttccaccagtttacatgaatttccccgcttactttttggaagcaccttctttagttcgggaactactatatttgaaggcattgccaaacctattcacatttaatgactttgctatcctagtaagacaacgaagacaaattaaaaggatcgaaagtgcattaatagaacatcggataccctataaaattattaggggccacagtttctgggattccaaggaaacaagagcgatgttaaatttattaaaattgatattttctccgaatgacaaacatgcaattcttgcttcacttttatatccagcaaggggccttggtcctgctaccggtgagaagattaagaacgcattggacacgttagctaccgatgtgtcatgtttccaaatattgaaagacataagtagtaaaaaaataatgctagacataccgacgaaaggccgttctgtgattgctgacttcatttcaatgatagaaaattgtcaattgttgctccagagcactttactagggggtctttcagatttatttgataagctatatgaattatcaggtctgaaatacgaatacttgtacaaggatggtaagaaaaaaaatgatcagcttgaaaaatccgaacctaatttattaaacgcaagacataagaatattgaacttttgaaaaactatttcctggctcttctttccaagtcagaatcttcagataaagaaaaaaatgaagccattaaagcagcaacagatgaagccgaaccaatagagaacaaggtcatcactccaaaagaatacctccgtaatttcttcaattcactttcccttcattctgatgcagctgaggaggaagagtcggaatccaataaagatgcaaaaataaaacgtgagaagaatgggtttgtcacaatatctacaattcacggtgccaaaggtcttgagtggccggtagtttttattcctggatgcgaagaaggtataattccttgtgtgttcaacgatgataagaaagacgaatcagaggaggacgaagaagaagatcaagaaaatagtaagaaagatgcaagcccaaaaaagactagagttttatccgtggaagattctatagatgaggaaagaagaatgttttttgttgcacagactcgtgcaaaatacctgttgtacctatcaaatactgtaactgtggaagatgtcgatagaccaagaattgcaagccgatttttgactactgacttgataaaagccatgtccgatagccaaaaattatttgaaagtacgaatagtatcaaaaaactataccgaattttgaacaaaaagccgccggctgaagatgataaactattctcccttgaccaattgcgcaaagactataaccaattcattgaaaataggagagaaaggatgatttggcaagggatacaaatgaatgatgtctatggaatacagttgtctagaaataaattattgggttctgttagtgatttcacgtcagctgcggaccagttacgactcgaaacgcaaaactctatattcccacagaagaaacttattgaaaaatcacgcccatccaaaatcaatggcaattacgctcctaaaagtagagttaaaagtccagaaaaaaggtacgctccagaaactacatcattccattctcctacaaagaaaaaggtgtatgcacctcaatacgtttcaacaactaatgtacctagtaggcaggagtttcattcttctactgggaaaaatattccttttctgagaagagaagataggtccatcacagacatatcaccacgatcatcaacgaggtcgttaaaaggagcatctccaaataagacgagccacatgccagatgatttaatgagaccatcacccacgaggaaggacaaagttactcgtaatattcatttcccactgcaggactttcagaatagaaacccaggcaaatggtga

SEQ ID NO: 80320 - DNA, 1137 bp, Saccharomyces pastorianus
atgattacacagcggttccaactagaaaaaaagccgtatattactgcgtatcgtggtgggatgcttattctgactgctattgccatcttggctgtagattttccaattttcccaaggaggtttgccaaggtggaaacttgggggacatccctgatggatcttggtgtaggatcattcgttttcagtaacggtattgtttcttctagggcactgttgaaaaacctaagcttgaagagtaaacccagcttcttaaaaaatgcatttaatgccttaaaatcaggaggaactctattgttcctaggattgctgaggttgttttttgtaaaaaatttggaatatcaagaacatgtcacagaatatggggttcattggaatttttttatcaccctatcattgttgccacttgtattgacctttattgatcccgtcacaagaatggttccacgctgctcaattgcaatattcatttcatgcatttatgaatggctacttttaaaggacgatcgcactttaaactttttaattttggctgatagaaattgtttcttcagtgctaatagagaaggcatcttctcatttctaggttattgctcgatttttctttggggccaaaacacgggattttacttgttgggaaataaaccaactttaaacaatctttataagccttctacgcaagacgtagttgcagcatcaaagaagtcttcgacttgggactattggacttcagtaaccccattaactggcctctgtatatggagtacaatttttcttgttatcagccagttggtttttcaataccatccttatagtgtttcaagaaggtttgctaacttaccatatactttgtgggtcattacttataatttactatttttgactgggtactgcttgactgacaaaattttcggtaattcttctgaatattataaagttgccgaatgcttggaatcaatcaactccaatgggttgtttttatttttgttggcaaatgtctctactggtttagtcaatatgtctatggtcacgatagattcttcacccttaaaatcattcctggttttgttggcatactgctcattcatagctgtcatatcggttttcttgtatagaaaaagaatattcattaagctataa

SEQ ID NO: 80321 - DNA, 363 bp, Saccharomyces pastorianus
atggcaacagtacatcagaagaatatgtcgactttaaaacagagaaaagaggactttgtgacagggctcaatggcggttctatgacagaaattaacgcagtgacatcaattgctttggtaacttacatatcatggaacttattgaaaaattccaaccttatgcctcctggcatatccagcgtgcaatacataattgattttgcattgaactgggttgctttgcttctatctattactatttatgctagtgaaccataccttctaaacacgctaatactgttaccttgtttgctcgcattcatatatggaaaattactagctcgagtaaaccttctaatcccatataccattaaaaaaaaatga

SEQ ID NO: 80322 - DNA, 762 bp, Saccharomyces pastorianus
atgtttttaggtaaagaggatattcagcttggtgtcaatgaatcattttacgataccaccaaggttgtatcatctatggtttcatgtatttttgcccgtgtgaacaaacatgaagacatacttgctttttgcaaggattcctcggtaccgatcatcaactctctatgtgacaaattccaccctttgcaagcaatttgtgatcttttaacaataatcgaaaacttcaatatatctctagatgaagtaaataagggaatcaattcaaaattgaagatggcatggattggtgatgccaataatgtcataaatgatatgtgcatcgcatgtctgaaattcggtataagtgtcagtatttccactccccccggtattgaaatggattccgatattgtcgatgaagcaaagaaagttgctgagagaaacggtgcgacatttgaattaacacacgactctttaaaggcctccaccaatgccaatatattagtaaccgatactttcgtttccatgggtgaagaatttgcgaaacaggccaagctgaaacaattcaaaggttttcaaatcaatcaagaacttgtctctgtggctgatccaaactacaaatttatgcattgtctgccaagacatcaagaagaagttagtgatgatgtcttttatggagagcattccatagtctttgaagaagcagaaaacagattatatgcagctatgtctgccattgatatctttgttaataataaaggtaatttcaaggacttgaaataa

SEQ ID NO: 80323 - DNA, 117 bp, Saccharomyces pastorianus
atgcccatgtatgaaagattctacagtagatataaagactctttcaagaatcctagaaagcatatcaaatatacccctgacgaactaactactgttcttaaccaattagtgagatag

SEQ ID NO: 80324 - DNA, 1512 bp, Saccharomyces pastorianus
atgcccgctgaaattgacattgatgaagctgacgtattagttttatcacaggagttacaaaagacaagtaaactcactttcgaaatcaataaatctttgaaaaaaattgcagctacatccaatcaatccagtcaactcttcactcctattcttgctagaaataatgttttaaccacattacaaagaaatattgaaagtacattgaattccgttgcctcagttaaggatctagcaaacgaagcttccaagtatgagatcattttacaaaagggtattaatcaagtcggtttaaagcaatacacccaagtagtacataagctagatgatatgttggaagacattcagtctggacaagccaatcgagaagaaaactcagaattccatgggattttaactcacttggaacaattgatcaaacgtagcgaggctcaactaagagtatattttatttcaattttgaacagtattaaaccgtctgatccacaaatcaatatcaccaaaaagatgccatttccatactacgaggaccagcagttaggcgctttatcgtggattttagattattttcatggaaattcagaaggttctattatacaggacatactcgtcggtgaaaggagtaaattaatcctcaagtgcatggcattccttgaaccttttgccaaagaaatcagcactgcaaaaaacgccccgtatgagaagggcagtagcgggatgaacagctacacggaggccttattaggcttcatcgccaatgaaaaatcactagtagacgacctctactctcaatatacagaaagtaaaccccacgtcttgtcacagatcttgtcgcctttaattagcgcatatgctaagcttttcggtgcaaatttgaaaattgtacgaagcaacctcgagaactttggattctttagttttgagctagtggaaagcataaatgatgtgaaaaaatctcttcgaggcaaggaactacaaaactataatttattgcaagattgtacgcaagaagtacgtcaagtaacacagtcattattcagagatgccattgataggattatcaaaaaggcaaattctatttctactattccttccaataatggtgtcactgaagcaactgtagataccatgtcaagactaagaaagttcagtgagtacaaaaacggatgtttaggcgccatggacaatatcacacgtgaaaattggttaccatccaattataaggagaaagaatacactttgcaaaacgaggctttaaattgggaagatcataatgtattactatcatgttttataagtgattgcatagacactttggcagttaatcttgagagaaaggcacaaatagcactgatgcctaaccaagagccagatgtggctaatcctaatagctctaaaaataagcacaagcaacgtattggattcttcattttaatgaacctgacgcttgttgagcagatcgtggaaaagtcagaattaaacttaatgttagctggagaaggtcactccagatag

SEQ ID NO: 80325 - DNA, 546 bp, Saccharomyces pastorianus
atgcttagaaaagttcaacaatttaataatatgcagaagaaattaaacctacaagaaccactagactcaatagcaacatcacctgtccttgaactggcttatttctacaacggttacaacaggatgactgaaaacgatttaattttgaccaaaaagatgttgacagagtatcacaaccctgccattgattcggaagacccagatcaagagctgatcagaaacttactactatccttgaccttaagaagattggggaatgctgaaagaagtttagccttgttagatgacattgttctgccaaaaatattctacattcaaaatggcaaagtcaaatatttcaaaaaaaccgaagacccatgggcatatccagccgctctttatgagagagctttattctgttggaaactgggtggcatggaaagtttgaatgaatgtagggaatggctgctaagagcccaaaattatgccgccgattacgaattgagtacgcgtatcggtatgaagatcaaagccgcccttgatagagttgaaaacgcgcttgcttaa

SEQ ID NO: 80326 - DNA, 1605 bp, Saccharomyces pastorianus
atgtttagagtatttggttcatttggatcaaagggtaatcaatcttctggtgaagagcaatcaacaaagacaaaacaggttctgaagcaggctaatgactttgagatcgccttaaaggcaatggattttgtccttgatgatagaacggatgaagggttgaatttgctgaaaaaagctgaaatggaaactggttcagatcaaactatcttgactttggcaagaggtgttattgaatttcttcaagccactttgagttttgaaactgaagaaatgaaaagagctgcaattactttaggcaaagctgagcaaatgtcctggaaaagtaagcaaaatgctgaaaagaccaattttaggagcagttcaatatatcctcccggtactgtctatgctgtaacatatactgagtcatgtctgttgcatgccttgttgatgttatttagtgaaagcatgatggaagcagccaaggctttgctaaagttaaggagggcttatacaatgttacaagatatcatggttactgtcaaaaaagctgaacgatcgaaaaattcgagctctccctctccaagcgaaaagagccaagagtcatgcggaagttttgtttctgcagagacaactttcatatcggttgatataccatacaaattgtcttccgaggacaagtccaatccactcctattggaatttgctgaaaaaatctacacgatgagaatgggaaggttatcaggtgcccatattggcaatactccatcttttcataggttaagggatgatttgggtttacagacgactccgcctcaagcttccgaccgccattctgtttcagatgatttcgatttagaacaggctaccatcgacgaattcatccattcaggtgctaatttatgctatggtatcttgcaagtcgtcttatccttacttccacctgcaatcggtgctgtgctatctattgttggattcaagggatcccgtgaagaaggtttgaggctagtttggaaggctacaaaggagagaaatgttcacgggtgtataggtttgttaggtctgatgttttattacgacggtcctttccaatttacagatgctgactttgatataccaccaaacgataatggatcgagggctttaaacaaaagcagaacaaacgatagtagccttttaccaggttatatggacagtgcaaccttattgcatcctggaaaaattctggaggacgcattactaaaagcaagagcactttttcctaatagtgccctgtggctgctaaatgaggccaaaatgcttgctggaaagggcaggcttcgtgattctctggccctaatggactctattgatgtcaatagtatccgtatgagacaagtgaaatcgttgatggtgtttgaacgtgcgatccttttagtcaacttacacgaatacaacagagctgccgatgatttaataagtttgcttgatattagtgattggtctcacgcattgtacacttattttgcgggttgctgttacttggaaaattggaggatgacacaattaggcttattaaatgacggtaaagaacagttctataagagcgggctcgagaactcatatttgacgctccatctttgttag

SEQ ID NO: 80327 - DNA, 171 bp, Saccharomyces pastorianus
atgattgttggcccaggtggttctaacatcaaaaagattagagaagcggccgacgttatcatcaacgtcccaaggaagtctgacaaagtcaatgatgttgtgtacattagaggtaccaaagctggtgtcgaaaaggccggtgaaatggttttgaaatccttaagaagatag

SEQ ID NO: 80328 - DNA, 3501 bp, Saccharomyces pastorianus
atgtctgaagaacaaaccgctattgactctcccccttccactgtcgaaggatctgttgaaaccgtaactaccattgattcgccaagtactactgcctccactattgctgctaccgctgaagaacatcctcagttggagaaaaagccaactccattgccatctttgaaggatcttccttctttgggttcaaatgctgccttcgcgaacgttaaggttagctggggcccaaacatgaaacctgctgtctctaactcgccatcaccttccccttctgctccttcattgactactggccttggggccaagaggatgcgttcaaagaacatccaagaggctttcactttggacctgcaatctcagttgtcaatcaccaaacctgaattatctcgtattgtccaatctgttaagaaaaatcatgatgtttctgttgaatcaactctttctaagaatgctcgtacttttttggtttctggtgtagctgctaacgttcatgaagcaaagagagagttagtgaagaaattaacaaaaccaatcaatgctgtcatcgaggtcccatccaaatgtaaagccagtattatcggttcaggtggtagaactattcgtgaaattagtgatgcttacgaagttaaaatcaatgtctcaaaggaagtcaatgaaaactcatatgatgaagacatggatgatactacaagtaacgtttctttatttggtgattttgaatcggtcaacttggctaaggctaaaatcttggccattgttaaggaagaaaccaagaatgccacaatcaaattagtcgttgaagatgaaaaatacctaccatacattgatgtttccgagtttgcctccgatgagggtgatgaagaggtcaaagtccaattctataaaaaatcgggtgatattgtcatatcgggtcctcgtgaaaaagcaaaagccacgaagacatctattcaagattatttgaaaaaattagcttctaatttggacgaagaaaaggtcaagattccatccaagttccagtttttgattgatgcagaagaactaaaagaaaaatacaatgtcattgtcactttcccatcaactcctggtgatgagcttgtgtcatttgtcggtttgcgcgataaggttggtgaagctatcacctatgccagatcgtcttcaaagagctatgtggttgaatctttagatatttccaaggctcatagtaagaatctgacccatgccaaaaatctaatcatgtatttcaccaagtactccgttttaaagggtcttgaagaatctcatcctaatgttaaaatatctttaccatccatacagtcattgccaacagctgaaactgttaccatccacatcagcgcaaaatctgatgaggcaaacgatatcaaggccgttcgtaaagaattgatttcttttgtgaacaatattccaccttccgaaaccctggttatcacagatttggattacgagttgttcggcgggtctattaaacattgtttattagcttccgaaagcagcgttgcctttgttcaattcggtgattattatccaaatgataacagtattttacttgttgctttaactgaagatgaagatttcaagccatctattgaagagattcaagcatctttgaacaaggccaatgagtcattaaactctctacgtactaaacaaaacaacatggagactaaaacttacgaattttccgaggaggttcaagactcattgtttaaaccatcttccgctacatggaaattgattatggaggacatttctgaacaagaaggccaccttcaaattaaactacatacccctgaagaaaatcagttaactgttagaggtgatgaaaaagctgccaaagctgctaacaaaatttttgaatctattttgaattctccatcgagcaaaagcaaaatgactgttaatattccagccaactcagttgccagattaattggtaacaagggctccaacctacaacaaattcgtgagaagtttgcctgccaaattgatattccaaacgaagagaacaataatgcttcgaaagataagactgtcgaagttactttgactggtttagaatacaacttgactcatgccaagaaatatttggctgccgaagccaaaaaatgggctgatatcatcacaaaggaactaattgttccagttaagtttcatggtagtctgattggtccacacggtacttatcgtaaccgtttgcaggaaaaatacaatgtcttcattaacttcccaagagacaatgaaattgtcaccattagaggcccttctcgtggtgtcaataaagctcatgaagaattgaaagctctgttagattttgaaatggagaacggacataagatggttattaatgttccagctgagcacgtcccaagaattatcggtaagaatggtgacaatatcaacgacatcagagctgaatacggtgttgagatggatttcttacaaaagagcaccgatccaaaggctcaggaaactggtgaggttgaactggagatcactggttctagacaaaacataaaagatgccgccgaacgtgtggaatccattgttgccgaagcctccgattttgtcactgaagtcttgaaaattgatcacaaataccataagtcaattgttggtagcggtggtcatattttaagagaaattatctccaaggctggtggtgaagaaattagaaataagtctgttgatattcctaacgcagactccgaaaataaagacattaccgtacaaggtcctcaaatgtttgtcaaaaaggttgtcgaggaaattaacaagattgtcaaggatgctgaaaatagcgttactaagaccattgatattccagcagaaagaaagggtgctttgattggccctggtgggattgttcgtcgtcaactagaatccgaatttaacattaacttattcgttcctaataaggatgaccctagcggcaaaataactattaccggtgcaccagaaaatgtcaagaaagctgagaagaaaatcttgaatgaaataatcagggaaaattttgaccgagaagtcgatgttcctgcctccatttatgaatatgtttcagaacgtggtgctttcatacaaaagttgagaatggatttatccgtcaatgtaagatttggtaacacctcaaagaaggctaacaaattagctcgtgctccaatcgaaattcctctagagaaagtccgtggatctaccgaaggcgaaaatgcagaaaagactaaatttaccatcgaagaagtcggtgcaccaacttcttccgaggaaggtgatattaccatgaggttgacatatgaaccaattgatttgagtagcattctctctgacggtgaagaaaaggaagtcataaaggacacttcaaacgattccgctaagaaggaagaagctctcgatactgctgttaagttgattaaagaaagaattgccaggcaccatctgctacatatgccggttacgtctggggtgctgataccagaagattcaatatga

SEQ ID NO: 80329 - DNA, 417 bp, Saccharomyces pastorianus
atggacatgtcgtctcctccgtcagttaaatccaagaccacctcaaatccgtctagtatacttcatgaccttccaagaaaagttcgtccttctttgagttcattatctgatcttgtttcaagaggcatcccagatgtaaaggaaaaaacttctaaatcgaatgagaagtcacaaacaaaagccccttcaagcagtgatgatgaatctagctctgattctgactctaactccagttcggactccgtatcggattccagttcagattctaaatctgagtcagattcggatgactcaggggattcatctgatgatggaaaaagttttattagtgcgaaatccgctagtgctgctttaggtaagaagaagaagccaagtggtggatttgcatcattaataaaagatttcaagaaaaaatga

SEQ ID NO: 80330 - DNA, 186 bp, Saccharomyces pastorianus
atgtcacaaatcaatgaagcgtacgaaacattaagtgatgacgataaaaggaaggaatacgatctttccaggtcaaacccccgccgcaacacttttcctcaggggcctaggcaaaataacatgttcaaaaatccaggaagtggcttcccattcggaaatggctttaaaatgaattttgggctttga

SEQ ID NO: 80331 - DNA, 1404 bp, Saccharomyces pastorianus
atggcaggcaaaaatagagccaaaactgcttgtaagttattccaagtgaaaggagttggttgcgagaagggcccagaaggtttcattcattgttggtttagtgtattactaaggccgatcttaacgtctacgaaacgaagtatgatactgatctcgggatactgtcttttagtgtatagcgttattttgccagtactgatatcggcttctaagttatgtgatttggctgggttacaacgattgaacaagaatttaaaagtagacactgaatccttgacaaaataccaatggatcgctgggcagttggaacaaaactgcatgactgcggatccagcaagtgaaaatatgtcagacgtaattcaactagccaatcaaatatactacaaaattgggctgatccaattatccaacgatcaacatctaagagctattaacacatttgaaaaaatcgttttcaatgaaacttacaaaggttcttttgggaagctggcggaaaagaggctacaagagctgtatatcgattttgggatgtgggacaaggtgcatcagaaggatgatcagtatgcaaaatatctgtccttgaatgaaaccatcagaaacaaaatatcatccaaagacgtttctgtggaggaagatatttctgagctgctacgcataacgccgtacgatgttaacgtcctctccacgcacatcgatgttctttttcacaaactagctgaagaaattgacgtttcgttagcagctgctatcattttggattacgaaacaatcctcgacaagcatttggctagcttaagcatagatacaagactttcgattcattatgtcatatctgttttacagacctttgtacttaactcagatgcgtcgttcaatataagaaaatgcctttccattgatatggactatgataaatgtaaaaaactaagcctgactatttccaaattgaacaaggtgaatccatcaaaaagacagatcctggatccagcaacatatgcatttgagaacaaaaagtttagaagttgggatagaattattgaattttatttgaaggataagaagccatttattacaccaatgaaaattcttaacaaagatacaaactttaaaaacaactacttctttttagaggaaattatcaaacaattgatagaagacgttcaactgtcgagacctttggcaaaaaatttatttgaagatcccccaataaccgatggttttgacaaaccaaaatcatactatcataccgattatctagtatacattgattccattctttgtcaggcttctagcatgagtccggacgtcaagagagctaaactggctgcgccgttctgtaaaaagagtttgaggcattcactaacactagaaacatggaaacactatcagactctagagatcccc

SEQ ID NO: 80332 - DNA, 609 bp, Saccharomyces pastorianus
atgattcaatatttattttatctctttcaaatacccattttagctgcgccattatcatctgtttcattactgaattcgcaaaaatcgacctttttgaagaataaaaacgtgcttctagaacatgattatttgaaagaccaggaaacagccaaaatcaatccttctagagatatcactgtgggcgaacaaagatcatatgagacaaatcctttcatgaaaatgtttaagatgggactaaaaatttctttatcatcaaaatcgattctttacaatagttcatacacgctagaacctctcattgaagaatacagtgtagcagcaagtatttacttgctgaacccaacagatttgtgcgagttgtcgcgaacaagtgtgctatctagtggctatgaaggttggtacaaggctcattggattggcgttggagttaaaaaggcgccttactttgaggagaacgtgggtgggatagataattggtacgatacagcgaaagatacctcgataaagcacaacgttccgatgattagaagaagatatagaaaggagacattggatcaagagtggaacttcgttcgggatcactttggagtaattaactccatttggtag

SEQ ID NO: 80333 - DNA, 1872 bp, Saccharomyces pastorianus
atgcaggcggtagagagaaggccctcgttactctttgacgaatatcaaaattctgttactaagcctaatgagacgaagaataaagaagccagggtcttgtcagagaatgacggtgatgtctccccatctgttttgaaacagaaggaaatatcagtcgatgatatggatatgatttctttgcccacggaatttgacaggcaaatggttttaggttcacctatgtttttcgatcttgaagacgaagaaaacaaaattgatccacttccttcagtttcccatcattatggaaatggagaaagtgacagctttgtctcatcgtacacgccctcaaatctgaaaacgggtgaagaaactaaagatcttttcattaatccgtttgaattggtttctcaaatgagaaaaagatacattgctgcttccaaacaagatggcatttcaaacataaaaaatgacactgaaaagtggtttttatacccaaaaccactgccaaagttttggagatttgaagacgataaacgattccaagatccctctgactctgacttaaatgacgatggagacagtactgggaccggagccgctacaccgcaccgccatggctactattacccaagttactttaccgatcactactactactacacaaaatctggtttgaaaggaaaaggaaatataaaagtaccatacaccggtgaatatttcgatttagaggattacaaaaaacaatacatttaccatttaagtaatcaggaaaatacgcaaaacccactttcaccttattctagtaaggaggagtcactagaggaagaatttttaacagatgtgcctacgtttcaagaatttagggatgattttgcatacataatagagttaatccaatctcataaattcaacgaggtttcacgaaagcgattatcttatttattagataaatttgaattgtttcagtacctaaactctaagaaagaaattttagctaataaaaatgttccctacagagatttttataattctcgtaaggtagatcgagacttgtctttaagtggttgtatttctcaacgtcaattgagtgaatatatatgggagaaaataaatttagaacctgaaaggatagtttatcaagacccggaaacgtcaaggaaactcagtttgagagacatttttcagtttggttgttcttctaatgaccaacccattgcgattgggttgaaattgattgatgatgaattcttggattggtatagaaatatttacctaatagattaccatctaactcctaacaaagtagcaaagttggtcggcaaagaaatgaggttttacctattagccaaagtgtttctggagtttgataatttcattgaaggtgagtacctagcagaaattttcataaaatacgttattcatatcctcgaaaaatcaaagtaccaattggcccaagtatcagttaattttcaattctattccagtggtgaagactggtacaagaaattttctcaatggttgctacgatggaagctagtatcgtataatatccgctggaatatacaaattgccaggatttttcccaaactattcaaggaaaatgtcgtgtcaaatttccaggagtttttggatcttatcttcaatcctttattcactctggaaaaggagcagttaccaatagattcatctgtaaatactgatatcattggtttgcagttttttttatcaaatgtgtgttctatggatctggtcattaaagagtcggatgaaaattactggaaagaatttactgatatgaattgtaagccaaaattttggacagcacagggtgacaatccaactgttgcgcattacatgtattatatttactacaagtctagcgaaagttaa

SEQ ID NO: 80334 - DNA, 300 bp, Saccharomyces pastorianus
atgtccgttgccaatttcgcgccggcaatatactggtccatgctaccgtggtcaataaactacgcctctattccagcacaagttaagttgcaaacgttcatcagaagtaagttacctgccttcacctatcattgtatatttggaacttgtttgatgacggcatgcgtcgttttgagatttcatctctttatttggtccgttttcagtccaaaattatgttattttcttgggtggaattttgtgatgggattgctgaatggctggttacctgaattggccctcctttgcgctcttgattaa

SEQ ID NO: 80335 - DNA, 2280 bp, Saccharomyces pastorianus
atgaacttgaagcagttcacgtgcctatcatgcgctcaattactcgctattctgctctttatctttgcttttttccctagaaaaatcgtgctgacaggtatatcaaagcaagatccggatcaagaccgtgatctccagcgcgataggcccttccagaaattggtgtttgtgatcattgatgctctcagatcagactttctttttgattcgcagatttcccacttcaacaacgtgcaccaatggctcaatacgggcgaagcatggggttacacgtcatttgctaatccgcctaccgtgacgctgcctagactcaaaagtattactacgggatctacacctagcttcattgacttgctgctgaatgtagcccaggacatagattccaacgatctttcggagcacgattcctggctgcagcagttcatccaacataagaacacgattcgtttcatgggcgatgacacctggctgaaactgttcccacagcaatggtttgacttcgctgacccgacacactcgttctttgtcagtgatttcactcaagtcgataataatgtgacgaggaacttgcccgggaaattatttcaggaatgggcccagtgggacgtggctatcctgcattacttgggtcttgaccatatcgggcataaagatggcccgcattcaaagtttatggctgctaaacatcaagaaatggacagcattctgaagtcaatatatgatgaagtgttggaacatgaagatgacgatgatacactgatttgtgttcttggcgaccatggaatgaacgaactgggcaaccatggtggctcttcagccggcgaaacatcagcaggattgttgtttttgtcacctaagctggcgcaatttgctaggccagaatcgcaagtaaactacacattgcccatcaacgctagtccggactggaatttccagtatttagagactgttcaacaaattgatatcgtccccaccatagcagcactgtttggtatgccaatccccatgaacagtgttgggataataatacctgactttttacaactgttgcccaataagttggcaagtatgaaagaaaattttatgcatttgtggaaattatcagaccatcacggcgaggttgctcttgacgatttcactgccgaagatatttatacaaagatgtacactattcaagaaacgttaaccaagtctgcaacaaattataattatcctcttttgacactggcttttgttggtttcctcataataacaatcatcgccatttatgtattattacgttattctgggcctgatttttggcagttgcgcgtttcttccctgtctgttctgttagtttccattatactaggcgtttccacatttgcaagtagtttcattgaagaggagcaccaactgtggtggtggatagtaactgcattctcggcggtccctctgttcgtataccgattgaatgtgctcataatcgtgcgctggtttataatgatggcatgcgtacgctcaatcaagttttggaataacagtggccagaaattcatttattctaacgttatgtccaatctacttaatcagaatccttcctggaagtggtgcttaaatatgttgacatttctagtgctgataatggcatctgctggttttcaagtactacattttattgtcactactattttggtggggttgtgtttcacgtacaaaatctcgtgggaaatcgtcaatggtaaccaggcagaaataccgctctttatgcatgatttactggctaagatagactttgcaccaactgaaagtaacttgattgtacttgcgcgcgttttcttccaagcttgggctattgttgtcatttcaaggttggtcctgacgaaattgaaagtacttaacaagaactacctcattaaagatatgaaagtttatataacaattcttttgatgttccaaacttcttctcagaacataggtcaatttctcgttttccaaatattagagtctcaaattttttactttttccaaaatattccaaccgcctcattaacatcaacaagtaagatttatttttcgaatttggtgtccttaattttacaaaattttacatttttccaattcggtggcacaaattccatttctactatagaccttggaaacgcataccactggtgtttcctcagactgcaacatctacgtagtggggatattaatgtccgttgccaatttcgcgccggcaatatactggtccatgctaccgtggtcaataaactacgcctctattccagcacaagttaa

SEQ ID NO: 80336 - DNA, 783 bp, Saccharomyces pastorianus
atgaaaccgcaaagcaccgcagctgaaacaagtatcagtacagaaaaaagtgacacggtaggagatggttttaaaatgagtttcacacagcccataaatgagattcttattttgaacgataattttcagaaagcctgtattagtccatgtgaacgaattatcccatcagcagaccgccagatacctttaaaaaacgaagctagtgaaaatcagttggaaattttcacggatatttccaaagaatttttgcaaagaattgttaaagctcaaactttgggtgtttctatccacaatagaattcatgagcaacagttcgaattgacgcgccaactacaatcgacatgcaaaataatttcaaaggatgatgatttaaggagaaaattcgaagcacaaaataagaaatgggatgcacaactaagcagacagtcagaattaatggagagatttagtaaattgagcaagaagctatctcaaatcgccgaatccaataaatttaaagaaaagaaaataagccatggtgagatgaaatggttcaaagagatacgaaaccaaatattgcaattcaacagctttgttcactctcaaaaatcccttcaacaagatttatcgtacttgaagagtgaactaactcgtatcgaggcagaaactatcaaagtcgataaaaagagccaaaacgaatgggatgagctacgcaaaatgcttgaaatagattcaaagataattaaagaatgcaatgaagaattgttacaagtttctcaggaatttactactaaaactcaatga

SEQ ID NO: 80337 - DNA, 1143 bp, Saccharomyces pastorianus
atgtcccaatctagtaggttaagtgcacttcctattttccaagcatcgctttcggcaagccaatctccacgttacatttttagttctcagaatggcacaaggattgttttcattcaagataacataataaggtggtacaatgtactcactgattcactttaccacagtttgaactttagtcgtcatctcgtcttggatgataccttccatgtaatatctagtacgtctggtgacctactctgttttttcaatgacaacgagatttttgtaatggaagttccttggggctattccaacgttgaagacgtttccattcaagatgcattccaaattttccactattcaattgatgaagaagaagttggtccgaaatcgtccattaagaaagttttgtttcatccaaagagttatcgtgattcttgtatagtggttttgaaagaggatgacactatcacgatgtttgacatccttaattcgcaagaaaagcctatcgttttgaacaaaccgaacaactcctttggtttagatgcacgtgttaacgacatcacagatttagaattcagtaaggacggattgacgttatattgtctaaacaccacagaaggcggtgatatctttgcattttatccatttttaccgtcagtattactgttaaatgagaaagatctcaacttgatcctaaacaaatctttagtaatgtacgagtccctggattctacaacagatgttatagttaaaaggaatgttattaagcagttacagtttgtgtcaaaactgcatgaaaattggaattcaagatttggcaaagtcgacatacaaaaggaatatcgtttagccaaggttcaaggaccattcacgataaacccctttcccggcgagctgtatgactatactgctacaaatattgcaaccatactaattgataatgggcaaaatgaaattgtttgtgtcagttttgatgatgggtctttaatcttactcttcaaagatttggaaatgtcaatgtcgtgggatgttgacaattacgtgtataataattctttggttctaattgaacgagtcaaactacaaagagaaattaagtctctaataacgttacctgaacagttgggaaactttatgtcatttccgataatattatga

SEQ ID NO: 80338 - DNA, 552 bp, Saccharomyces pastorianus
atgattgaaaagcatcaagcgatgaaattgaaaccaatagaccgtagaatatttcacctaatggacgctcttttacaaccaaataatgatgctagacccacagcgaagacagtggaggagacgttagatgaaatgctaataaattccaaacccggcaaaaaattctggaaagaaaatgtggatagcactttgaacttcagtacaatctcggaagtgaacgagaataccaacagttttactgatgattgtattgacggagacaacgttactttatcattaccagcaccagaggaaaatttgagcaccgtatcaacccaaaacctccaaaagtattctgctttaaatagaacaatccaggtttgttacaaactagtttctatgatattaacgataatcatatttaagtgtaccaaaacggggtcgtggctctcttatatgtcactgatattgttgggaatggtttttaaatcaccagctgatgaaagaggtaagcatgcaagagcgttgattttactggccttcatcgccgcatgcaaaaaatacatatactaa

SEQ ID NO: 80339 - DNA, 1356 bp, Saccharomyces pastorianus
atgagtttagtaccatatgaagaaggttcgctgattttagatgatcctaattctaaatcagtggtggttgtcaatccaacctcaggaactttatcatttttccaacaggacaacagtaatgatgactctgaactaaatgaagaccagactgcatctttatcagcactggactttccttcagggattcatcaatacaaaagccctattgcttcctatgtgtgcccgcaatgtggtacggaaattaaccctgatattataaacagaagacaacttcatcgtcgagcctctgctggagtagaatcagaaagcagtaggctcagtattccagagaacactgtgccacttggatttgaatttgccaattcaagcttttcaagaagatattttcagttattggaaagaaatcatcggcactacgccctacaaaacgatagtaacaataagcagggacagttcagcaaaaacaaatactttattccagatgatttgtttatccccggatactttcgtaaatttttcaaaatattgtctttgctgggaaatggtgcaagaggttctgtttacaaagttgtacacacaattggtaatactgaattaggtgtttttgcactaaaaaaaatacctattggaaatgatatggaatggtttaataagtgcatacgggaagtgaaagcgttgagttcgctaactcacaaaagtgccaatttgattacgtataatcatgtgtggctcgaaatggattcttcggttggatttgtcagatccattgatgggagccaatcggattcacaagaaattccttgtattttcattttacaacagtattgcagtggcggcaatttagaagactgtattctaagaaaagtgttcaataggttctcagataccgaatcacctgaagagaggaaaaaaaaatttagaactcgtaagaaaaatcacggtaaatcaggagaagttggcctatctacggaacagctcgtatccattataagggatattgcaagaggtttacacgaactgcacagtatcggcctaatacatagggacttgaaaccatccaactgtttattattgactccatttaaaagtgacaatgagaatgacaacgtatacgacagggaacacaattcagatgagtttttcccatcaattgttattggcgatttgggggaaagtcagttggaaggagagtccagattgggtactggttgcacaggaacattagagtttacagcaccagaacttattatccaggggagaccagtttcttcttctacgttaccttcaagatcgagtcgcacatacaatgaatacacctttgcttccgatatgtattctctaggaatgatttgctat

SEQ ID NO: 80340 - DNA, 567 bp, Saccharomyces pastorianus
atgctaatattgcgtcaatcaaggcagccggaacaggtgatttgccaatgggatggttgcaataagtcattttccagtgctcaggaattaaacgaccatttagaagcagtacatttaacccggggtaagtctgaataccaatgcttgtggcatgactgccatcgtacgttcccccaaagacaaaaattaatccgtcatttaaaagtgcattcgaaatacaaaccttataaatgcaagacatgtaaaaggtgtttttcaagcgaagaaactttagttcagcataccaggacacactctggcgaaaaaccttacaaatgtcacatttgtaataaaaaattcgcgatttcaagttctttgaagattcatataagaacccatactggtgaaaaacctttacaatgcaagatttgtggtaagagattcaacgaatcgtcaaatttaagcaaacatattaagacccatcagaaaaaatacaagtgctctgactgttccaaaagctttgacgatttgggaaaattgaactcacacaaagtgaaatgcgcattggaaagaaaaccatatttataa

SEQ ID NO: 80341 - DNA, 1455 bp, Saccharomyces pastorianus
atggatgcgttgactccagggactccccccaagcgcgatgactcgatggccacgagtgcggccactgctgcttctgccaagcctgatgctctgacgataggtaaagaaggcattgtccacgggcacatctataactacaacaacctgacctatatccatggtcaccttcaccacagcgcgcctgtgaacgacagtagtgcttcggcaacacctgcagccgcagctgttgctgatgccgctacttccgcatttgcatctggagctagccatgatatgggtggtgattgccacgtcaatgagaaatgcaaggagtacaccgactgccaacatttcgagttcttgaattatcacaataatcattcttttgcaaacaatttccattcggtagcttctgatccgacaagtccccaacagaattctaaaagcgacctaccacgtagaaaagattcttggtttaacgacgatctgatactgctgccctcttccaagaaaaataaaccgaacccaccacctggatccgatgattgttattgtacgcccaagattttggaaatatgttgtgacgaaactcatcccaaaagtgaggctaatgtaaaacaaggagaatctgatcaaccgacaaagaaagacatatctgagaacggcaatgatgttgcaatattcacagatgtaaagaacgatcacttgatgccaaattttaaccttcatgatcagtactgtaatagtaccaatcacgactctcacaatcacaataatactgtaccagatagcttttctcagctgatgtctcacttatcggagattgattgcgatttgacctgtgacaccccatgcacggctagcacgagcgcgactagtggtcacaagtttgttcaagatcatcaatcatcaaataatgatgacgttttccataaatactgcaaattttgtgaggagagcactgataatcaaccttgttctaagcatatgcatttagagtcaaagccacctcaactaccacccaaatgttcatctttacgaaaacctacaaacactttgcaaggtacaaatcatgcttatcacgaacatatcttaaataccgatatggatttgaagattttggaagatttatgcaatatttcttctttgtatgaagtaccgtttggaaaacacattaaccaccacgaccacaataatgccggtaacggctgcgatggttcgagcacagaaaatcatgaaaacggtaaccaaacaatgaatcttctattatcaagcattaatagatgcaaccctaaaaataatcttaatggaagcaataacaatacggctggagcaactttaactgatcatcaacaccatcaccatagaatacagtttcattctcacaaaccaaatagaaacaatattgtgaacaattcagggattagcgcggcgaacacaaccgccgatctaactaactacgacttaaatgagtaa

SEQ ID NO: 80342 - DNA, 828 bp, Saccharomyces pastorianus
atggatgcgttgactcccagggactcccccaagcgcgatgactcgatggccacgagtgcggccactgctgcttctgccaagcctgatgctctgacgataggtaaagaaggcattgtccacgggcacatccataactacaacaacctgacctatatccatggtcaccttcaccacagcgcgcctgtgaacgacagtagtgcttcggcaacacctgcagccgcagctgttgctgatgccgctacttccgcatttgcatctggagctagccatgatatgggtggtgattgccacgtcaatgagaaatgcaaggagtacaccgactgccaacatttcgagttcttgaattatcacaataatccgtcattaacaaaatataatgatactgcaacgtataattctaataatcattcttttgcaaacaatttccattcggtagcttctgatccgacaagtccccaacagaattctaaaagcgacctaccacgtagaaaagattcttggtttaacgacgatctgatactgctgccctcttccaagaaaaataaaccgaacccaccacctggatccgatgattgttattgtacgcccaagattttggaaatatgttgtgacgaaactcatcccaaaagtgaggctaatataaaacaaggtgaatctgatcaaccgacaaagaaagacatatctgagaacggcaatgatgttgcaatattcacagatgtaaagaacgatcacttgatgccaaattttaaccttcatgatcagtactgtaatagtaccaatcacgactctcacagacctgcaggcatgcaagctggcactgccgtcgtt

SEQ ID NO: 80343 - DNA, 297 bp, Saccharomyces pastorianus
atgcctgacatacaacaggtgttgtatgagtgtgacaaggacactttatatatctttttcaatctctctatccggccttcttggcaggatagcttttcgtttcaatttgttaatgatgataaccaaagatgcatagttcaactgattgaacatactatcgaaatgaagataaaaatttccatcgaaattagtctttcgctcctatctgaacattacaaaagaaacgaaaactgtattagtaatatgcttgtaattggagaagggccgaggggcgagaccattgtggagcgattttaa

SEQ ID NO: 80344 - DNA, 321 bp, Saccharomyces pastorianus
atgaaaaaagtgaaaaatgggaaactacgtgtggttctaccgagaaccgcgtccctccaaagtagcaacacaggcggtgaaagaaccagttctgcacaccacgaaggaagtaattcccaatggacccaagaattactaaaggcatgcataactagatccgttaagagcgagaggaatgggctagactacgaccatttatttgaaacggtaaagcagcagataaaaggctttagtgttggtgagttcaaagacgccttggccaagttgttacgagacaaattcataactagggacgaatcaacagcaacttacaagtactaa

SEQ ID NO: 80345 - DNA, 81 bp, Saccharomyces pastorianus
atgatttatgattgtgatagaaatgatttaatcggcttggaattcaaaggatttttggagaatattgacagttacacataa

SEQ ID NO: 80346 - DNA, 1233 bp, Saccharomyces pastorianus
atgcgttccgcttcgtcatacttaatcaggaatattgaacatccaaaaatctccgagctcacatatgtagaatttttgatgaatacaaaagaagaaaacactagacttttctttgatgtttacattatgtctatgatgctaagtaattgggcactctcccctcgatatgtgggacagcgaaacctcatacattgcaccactttatttcacacacttacacgatgggcaaaagacgcagacgataaatatcatgatataaactcaatgtatgaaaacatgtttacaccttcaaatgataacgtttcaattttgcaggatgaaggtaaatctgattatgatacgacgaaggccagctctatggaagaagatatcagtgcttttaataaagacttgtacaatttctataatattggatatgccaaacagatcatgtctgcttcacaattggaaaatatagtaaaggcaaagggcagatttgttatacaaagtttatccaccagtccttattataatttggcccttgaaaactatgttttcaagaatacaccaagagccaaaagaggtcccgataattgcagactgttattttacatcaatgataggtgcgccgttataggcaaaaaccaaaatctgtggcaggaagtagatcttgctaagctgaagagtaagaatttcgaactacttagaagattttctggaggtggcactgtactgcatgatttgggcaatgttaattattcatatttaacatcaagggagaaattcgaaacaaagtttttcaacaaaatgataattaagtggttaaattcattgaatcccgaactaagactagatttgaatgagagaggagatattattcaggacgggtttaaaattagtggcagtgcttataaaattgccggtggtaaagcataccatcatgcaacgatgttgcttaatgcggatttaggacagtttagcggcttattagaaccctcactaccgaacaatatggaatgggagtcaagtggagttcatagtgtaaaatcaaaaatcaaaaatgttggtataattactcctaatcagttcattgcagtagtatccgagcgttttcagaaaacattcaaagttgacggcgaaatacctatatattactgtgacgagtttaaatctataaacgatgagattaaagatgctatgaacaccttacagagcgaacaatggaaatatttttcggggcctaaatttcagtga

SEQ ID NO: 80347 - DNA, 1116 bp, Saccharomyces pastorianus
atggtttctcgcgctggatttccactagaggatttagaatttgttcaatttcatccgtcaggaatttatgggtctggctgcctaatcactgaaggtgcccgtggtgagggtggatttttattgaattctgaaggagaaaggtttatggaacgctatgctcctactgccaaggacttggcaagcagggatgttgtttccagagcaatcaccatggaaatcagggctggcagaggtgtcgggaaaaacaaggatcatattcttttacaattaagccatctaccaccggaggtactaaaggaaaggctaccgggaatatctgaaacagctgctgtctttgcgggtgtggatgtcacccaggagccaattcctgtcttgccgactgtccattataatatgggaggcattcccacaaaatggactggtgaagcattgaccattgacgaggaaactggagaggataaggtcatcccaggattgatggcgtgtggtgaagctgcttgcgtatcggttcatggagcgaacagattaggcgctaactcgctactggatttagtcgttttcggtcgcgccgttgcaaataccattgctgacacattacagcctggcttgcctcataagccattggcttcaaacatcgggcacgagtcaattgctaatttggataaagtaagaaatgctcgcggctcactgaaaacctctcaaatcaggttgaacatgcaaaggacaatgcaaaaagatgtttctgttttcaggacgcaagacactctagatgaaggtgttagaaatattactgaagtggacaagacatttgaggatgtgcacgtttctgataagtcaatgatctggaattctgatctcgtagaaactctggaattgcaaaatttacttacttgtgccacacaaacggctgtttctgcttccaaaagaaaggagtctcgtggtgctcatgcgagagaggactatgcaaaaagagatgatgtgaattggagaaagcacacattatcatggcaaaaggggacatcgacgcctgtaaaaatcaagtacaggaatgtaatcgcacatactttagatgagaatgaatgcgccccagtccctccagctgtcagatcctattaa

SEQ ID NO: 80348 - DNA, 420 bp, Saccharomyces pastorianus
atggcggaacatagtcaaaacaaaatagatcaatctctacaatatatcgagaggcaacaggatgaattagaaaacttcttagacaattttgaaaccaagacagaggcacttctgtccgatgttgtgtctacaagttcaggtgctgcggccaacaataatgaccaaaaaagacaacaggcctataagacagcccagactttggacgaaaatttaaactcgttgtcatccaatctttcttctctaatactagaaatcaacaatgttagtaatacattcaacaaaaccactaacatcgatataaacaatgaagacgaaaatattcaactaatcaaaatcttgaattcacatttcgacgctttaaggtcactagacgataactccacctctctggaaaaacaaatcaactcgataaagaaatga

SEQ ID NO: 80349 - DNA, 735 bp, Saccharomyces pastorianus
atggcagccttcgtcccatcgccttcctcctttcctgtaggcttagaaccaaatgaaaaggctgattttgattcatcactttctttcttttcgttagcctttgctccgaatgagaaggcaggcttggaggcttcatcattcttcttttcatcgggtttagcaccaaatgagaaggcaggcttcgaagaatcactgtccttattttcatccgatttagcaccaaatgagaaggcaggtttagaggcatcaccatcctttttctcatcggactttgctccaaaagagaatgccggcttggaggtttcattgttattcttctccgcgggcttggcaccaaaggaaaatgctggcttagccgttccatcttgcttgtcttcatttgatttggcaccaaatgagaaagctggttttgaggaattatcatccttcttttcttctggcttagcaccgaatgagaaggcaggcttagaagtagcaccagctttattttcatccgatttagcaccaaacgaaaaacttggggttgtgttagttgtcttattgtcggatgttgcagtaccaaaagagagggctggttttgctggttcattagttgtaggttcgggttgcgaagctccagctgggttagcaccagctgatcctgaaccaaatgaaagggaaggctttgcagcctcgttaaccgttttgtttccacctagttgtgaaccaaaggaaaatcctgtagtgggagcttga

SEQ ID NO: 80350 - DNA, 363 bp, Saccharomyces pastorianus
atgtttgacgaagtctacgttcagaattccaaattcttaaaggttaacgtcaccttggataatccgctactagttgacaaagatgctaatggtgtttccttgtttgagttaatcgttcctatattccaattgatatcagctgttttagtgagcatggggagctcaaacaaagctgttgttcaaacggtaaagggtttactgaatacgtataagaggctagtgatcggaatattcaaaagagatcttttgagggaaaaagaagataagaaaaattcgtcggatcctaataaccaaagtttaaacgaaatggtgaagctaattgtgatgttatgcacattaacaggatatcaaaataacgattaa

SEQ ID NO: 80351 - DNA, 4524 bp, Saccharomyces pastorianus
atgaaatggtctgcaattcctttcgaaacattgtatcgctctattgagagtagtgagttcgattttgatctgttcaaagaggtacttcctgacttacaaaatttgaacttaaacacagacaaactaaaaaacaatgctagccgatcacaattagaaaaaggtgaaattgaactatccgatggctctacttttaaggtcaatcaggagtttattttcgaagctatttctttgtccgatgaattaaacttggatgaaattgttgcatgtgaacttatactttctggtgataccaccgctaataatggcaaagtacaatactttttgagaaggcaatatatcctgcaaattgtttcttttatagtcaactgtttccacgaagatactgagttataccaagagcttataaagaatggagctttagtttctaatatcctctcagcctttaagttcattcatactcaattatctgagattaaacaacaaatcaataaggctcagatactagaaaactataatgctttattccaacaaaatatcaagtttaggagagacttcttactgagagaatatgatattctgagtcaaattttatatggtttagtggataaaggagccatcatgaaaaataaggattttatactgtccttacttcatcatgtgtcagaattggattccaatgatttttttataatatattatactcctgcatttttccaccttttcgcatctttaagagttttgcccgatgcagatgtcaaattattacattctcagtttatgaaagacttaaaggacgactccatatataccaaaccggtcaaagtagctcttattttcattttttttgcttacttcattgggtggtgtaaagaagaccctaaaagaagggctgacacgatggatttcaaaactgatgttgatgagccaatgacttctgccgtcgaactaggcgctattgaacaaattttaatatttgccgcagatacatctatcgtggaacaagacaagagtatggaacttttctacgatataaggtccctgttagaaaggcatattccaaggttaattcctaaacagttacttgatgatgaaaaaattttcagtcaaacgacgaattctacctacaacccagcatccgcaactgataatatgagcggacgcggcttatggaatccgtcttatcctgggatgatgtcaaccacgggtaccgctcgactaaatagtatgcccaataacgtcaacgaatattcttacactactatagttttatccgatcagacccaagaatttttcctctcatcctttgatgatgtgcttcaaactattattacagattgtgcctttttgcttacaaagattaaggatgctgaggaagactctttgttgtccggtgaagacttaactttggatgacatctcactaaaggctgacttagaaagattttttctgtcaatatattttttctatgcatcaaggcccgaatattcatgtactttctggtctgataaggaatcaaacgcttatggttttattgagtggtgttcgagatgcaacgacaacttgatgaggtcttgtttctatttgatggtttctagcttgtcctttggtcctgaaaatgccctgaatgtctatcactattttggcgaaaacagctcgatttcatggaaaaacattgcacagtgtctcagtgactacactaagaaaataagcaattttaactcgagcctccataagaggcagcagtttagtgagtcaactcataacgatatcgattcgactgcggtagccttagaagaaggcttaaatgaagaagctgtaatatttctgtcttctttattaactttagttggatcagttacataccaggttgacgaggatgtaaaaagctcgctatcgaaagttttctcagatgtcctattcgaattcaccaagataaatacacctctcgtaggcgctgctttcaaggttataagtaacttggttccaaaacttgaatcttctagaacaaaattttggtcttttctagactctctaattttcaaggattcatcgctgaattattcatccgaatcttatagaaatgcttttacaaacgtgttaacaaaatactctgacgttttggggtttttacaactcttccataatctgatttctattcattctcgtgaaaataatagtgaatacatggtttttggcaaattggcatttccaacaagattaggtcagggatataggaaggtaggtatatggccatattttgactacattttcaacgacattttagcgcacgtggatcaaattgttgatatcagaaataaaagagccgtccagcttcctattttgaaaattatctatacgggcttatgctcttttgattacagtgtaattttaaattctattcctgcagctgcgaatttggatgctttggtggattgcgaaaatttcttcaattacgttaaacaaggcccagctatccccatattcaactatattttcacggaaaagatttacaaaagtatatttaatgtagttgatgttggtgttgatcaattgtccatagagttagaaggtggcaaaaatcaggctgaattgttgcagttagctgtgaaaattatcaataaagtattggattatcaggagacatacgtggaagaattatttccaattgttaagaagcatggcaagacggattatttcttgccaaagaattattctcttcacggattacgttcattttacgatgcaatttttttcaatattccacttgttgcacacttgggtttatacgtcggggtcgatgatcaaattttagccacaaattcactgcgtattttggcgaaactttcagaacgctctaatggctccgttgcgtctttgtctaagagaaataagttgttaacaatattcgattccgtagatgaatcagccagaataaaggatgcatttattacacaattggaaagctcaataaccgacgctggtgtccttgctttgaagttagaactattagatttcttaacatcaaatctttctaattatagtcgaacgatgactatttctcatctgttattaggtttccaggtctcaaacgttatatccctgggacctaacctagcaacatttatatcttccggaacctcattacttgattccctcataagcgtgttggaagcttcattgaacagcattactaaggacaatatcgattatgcacctatgagattggctacagcagcactggaaattattctcaaactatgtcgtaatccgttaacatctggtctactatattcatacctaatcaaagaaaacttttttgagagaataatgatcctcgatccacaagtgacaaggttcacgacatggaacggctctccttttgacaattctacagaggaaaaatgtaagaacttcatcgagagcgaatccgttggtgcatttctgtcattcttagcctacaggaattattggacacaatatttgggtctgttcattcataaaatttcattttcgggcacgaaatcagaggttttaacatatgtgaattacttgatatcaaatacaatgtattcggtaaggttgttttctttcttggatccattaaactatggcaatatctgcgaaccaaaagagacgttatcaattttcaccaatgttcctttaaatttggaacaagtcactcttaacaagtattgctccggcaatatctatgactttcacaaaatggaaaaccttatgcgcctgattaaaagagtccgtgctgaaagcttacattctaattccttcagtctcactgtgtcaaaagaacaatttttgaaggatgcagatgtcgagtgtataaaagcaaaaagccatttcacgaatattatatcaagaaacaaagcattggagttgaacctatctgtgctgcactcttgggtacagttggtgcaaatcattgttactgatggaaaattggaaccatcaacaagatcaaactttattctggaggtttttggtacaattattccgaagattagtgattatattgagtttaatataactttttcagaagaattggtttctctcgccgttttcctatttgatatatataaccgcgattgtaagttgattaccgacaaaggcacggtagacggcaggctatatcagttgttcaagacatgtattcagggtataaactccccactctcctctgtggcattaaggtccgatttctatatattagcaaaccattatttgagtagagttctaagcgaccaagtagggtccgaaaaggttctgcaggatttgagactaggaagtaaaaaattggtagagatcatatggaacgatgttgtttatggcgagggaactagtagggttacaggtatattactattggattcacttattcaactggctaatagaagtaaagagaattttatattggattcactgatgaaaactacaagactgctcttaataatacgttcgctgaaaaatacagatgctttgttaatctactacagagcacataaacattga

SEQ ID NO: 80352 - DNA, 465 bp, Saccharomyces pastorianus
atgtatggtaaccactcttttattctaaagggtttaaatggtatattgaataacaaggtgaatatgctaacaagggaaatccaaatggaaactgttggcaataacacatttgaaacagaaacagggaagctaactaagggcctaaaccgagcagtaaatatatctccgttcaagtacataaaaaaattcaagaccgtttcaacaaagaaatttgaaagcctcttgaataagtatgatctggttgccaagaagggcggggaattgacagaggaacaaaagaaaaagaaggaggtgctctcacggatcagtagagtagtcgctgcaacaacgatagaggctggtctggcacaaggtgtggttgatttatgtataacagtgacaactagtctatgcttagtctcggccagcattggaggcgtcggatttcttatttggctcaccattatataccaagctctgacttag

SEQ ID NO: 80353 - DNA, 237 bp, Saccharomyces pastorianus
atgaaagtacaaatgatagaaaggatttttctgatccagttgtgtttgcttaccgttgtattagcaagtagtagagcagtggttgaattcgaaagtaccggaaccaaactggtcaactcattaagggtcttggctgcttactcgcagagttctgtctgtgttgatgaaaaaatatctggaatcgagagacaaatagaggaagttaagatatgtatggtaaccactcttttattctaa

SEQ ID NO: 80354 - DNA, 144 bp, Saccharomyces pastorianus
caggaatgcttgaaggaaatagaccatttcgaaagtgtaaaaacggctgaaatcaagaaatctctgggctcactagcggaccatcatatcgaattctacgaaaggatacttgaagcatgggaaaaagtagacgatagtctatag

SEQ ID NO: 80355 - DNA, 933 bp, Saccharomyces pastorianus
atgacagacaaaggcaagaacgatttaacaagcaaagctaaggataaaaccagaggcaaccccgagaagccaccatattggtttgaaatcattgtttctgatccacaaaaaagaactggtgacccaggctcttcatctggctacgtgagttatcagatatcaacaaagactaacaacacgtcattttatgataatcgtggcgatccagaatctattatagttgtacatagaagatacagtgacctattgctcctgcatgatattttactcaacaggttccccacctgcatcatcccgccattacctgataagaaagtttttcaatacatagcaggcgataggtttagccaaagatttacacaaaagagatgtcatagtttgcaaaatttcctaagaagggtctctttgcatcccgatctttctcaatcaaaagtcttcaaaacttttttggtgagtaaagattgggaatctcatcgcaaagtcctccaggatagcttgcaaccaaataaagatgaagttactgatgcttttatgaatgccttcaaaacagttcacaagcaaaacgaagagttcactgagataagggagaaaagtgataaactagatcggactgtgacaaagatagataaactttttcataaggttgtgaaaaaaaatgattcgatgtctgaagactatacaaagttgggcagtaatttacaggaattacaagaattggtcacaggcgaaaacgaggaacttgctgcgaagttgaagatttttaatgaaggtgtaacacagctgtcatatggcttgcaagatcttacaaagtatctggattacgaatatattgttgatttgaaggatcttgaacactacattgatagtatgcgacagctgatcaaattgaaagaccagaaacagatagactacgaagaactaagtgattattaa

SEQ ID NO: 80356 - DNA, 1851 bp, Saccharomyces pastorianus
atgaaaaatggtaagactgaaattcttgctaatgagcaaggtaacagaatcaccccatcttacgtggcattcaccgatgatgaaagattgattggtgatgctgcaaagaaccaagttgccgccaaccctcaaaacaccatcttcgacattaagagattgatcggtttgaaatataacgacagatctgttcagaaggatatcaagcacttgccatttaatgtggttaataaagatgggaagcccgctgtagaagtaagtgtcaaaggagaaaagaaggtttttactccagaagaaatttctggtatgatcttgggtaagatgaaacaaattgccgaagattatttaggcactaaggttacccatgctgttgttactgttcctgcttatttcaatgacgcgcaaagacaagccaccaaggatgctggtaccatcgctggtttgaacgttttgagaattgttaatgaaccaaccgcagccgccattgcctacggtttggataaatctgataaggaacatcaaattattgtttatgatttgggtggtggtactttcgatgtctctctattgtctattgaaaacggtgttttcgaagtccaagccacttctggtgatactcatttaggtggtgaagattttgactataagatcgttcgtcaattgataaaagctttcaagaagaagcatggtattgatgtgtctgacaacaacaaggccctagctaaattgaagagagaagctgaaaaggctaaacgtgccttgtccagccaaatgtccacccgtattgaaattgactccttcgttgatggtatcgacttaagtgaaaccttgaccagagctaagtttgaggaattaaacctagatctattcaagaagaccttgaagcctgtcgagaaggttttgcaagattctggtttggaaaagaaggatgttgatgatatcgttttggttggtggttctactagaattccaaaggttcaacaattgttagaatcatactttgatggtaagaaggcctccaagggtattaacccagatgaagccgttgcatacggtgcagccgttcaagctggtgtcttatccggtgaagaaggtgtcgaagatattgttttattggatgtcaacgctttgactcttggtattgaaaccactggtggtgtcatgactccattaattaagagaaatactgctattcctacaaagaaatcccaaattttctctactgccgttgacaaccaaccaaccgttatgatcaaggtatacgagggtgaaagagccatgtctaaggacaacaatctattaggtaagtttgaattaaccggcattccaccagcaccaagaggtgtacctcaaattgaggtcacatttgcacttgacgctaatggtattctgaaggtgtctgccacagataagggaactggtaaatccgaatctatcaccatcactaacgataaaggtagattaacccaagaagagattgatagaatggttgaagaggctgaaaaattcgcttctgaagacgcttctatcaaggccaaggttgaagctagaaacaaattagaaaactacgctcactctttgaaaaaccaagttaatggtgacctaggtgaaaaattggaagaagaagacaaggaaaccttattagatgctgctaacgatgttttagaatggttagatgataactttgaaaccgccattgctgaagactttgatgaaaagttcgaatctttgtccaaggtcgcttatccaattacttctaagttgtacggaggtgctgatggttctggtgccgctgattatgacgacgaagatgaagatgacgatggtgattatttcgaacacgacgaattgtag

SEQ ID NO: 80357 - DNA, 1443 bp, Saccharomyces pastorianus
atggaaggtgacgtggaatttaacgacgatgaagatgatctcaacggcctcggtgcaggtgttatcacaagacgtctgaatcttaccaccaatgccactggtagttttcaatctagtcaacttaccaactcgcaactgctgcaacaacagcaaaggcaatctcataaaaaatttaaaaaacttatcggtcatgaggccaaattactatttctcaaatccttccagttcatcttgaaaaggcaaatccgctggctcgtaactgaaatgcggtttccgaaagagttcgaacatgtcgccaagataatttggctcaagatattaaagacgattaacgaccaaccgcaagaagaactaaaacttcaattacatatgacttcgacaatttcgatcctctaccttgcatccactcatttgtccctaccagtttatacctgtgactacatcaaatggatatgcaccgccaaaatgccgtatttccaggcaagtgaaatactaccgaaatcgtggaggatccagctgccaaattattatgtttccatactagagggctcaatttcaccttttaatgggcaactgtacaacaaaatcgcattgacgtgtggtatgatccacttcaaagaatttttcaactctgaaatttcgtgccagggcttattactgaaactagtgatgcaatgcgctcttcctccagaattttatttttataccaaacaagttatcgaatttgaagaaacagacattcggaacctgacactgtgggaaagaacggacgaacgtcacacagggcgagtaagtaatcatgccgaactcagggtcctctcttattttatgctcacaataaattggatgctttcttttgatagagaccgacaatacccactaaaatggatcctttccctcacggaatcattgactcagcgcacaaccacaagtgaatctatcggcagaaatatcgttaaagtggtttacccagacaaaccgacttctagtgattatttccagtggtctgaggaggagaccctagagtttttgaagtggatggaaaagcaatttttgcccacacaaataaaatctttgcataatgagaatggttcgatggagatgacaattgatcaaaaaattgctagaaggaaactgtacaagattttccccttggatcgagaagccaatcatgatggcgaatttaatgactcaacgcatcagttaacttttattgaagatctgcaagaaagatacgctaaacaaacccccttttttgaaagcaacaaaatacgtgattctctcaattatcaagaggctaatccaccggccagaaaggaggctatcggtagacttctaacccatatagcatcacagcttttagtggattttgccatttctaaagagcaactgaaagactgcatttcaaggatcaaaaatgcctgtctgcataggatgaattga

SEQ ID NO: 80358 - DNA, 180 bp, Saccharomyces pastorianus
atgtctactttcataagaggtcccatctgcggtacagacaactgcccctcacggctttggcgtatcattgatgggagaagaacctgcaatatggtcacgttatggaaggtgacgtggaatttaacgacgatgaagatgatctcaacggcctcggtgcaggtgttatcacaagacgtctga

SEQ ID NO: 80359 - DNA, 168 bp, Saccharomyces pastorianus
atggtcattgaaacaaatgtgaacagaatagttgcttctgttgacgaactcaacaaagctgccgagtccacagatagtaaaattggaagactaacgtccactggatttggaagcgcactacaagcgtttgctcaaggcggatttgcacaatgggcaacggggcaataa

SEQ ID NO: 80360 - DNA, 1707 bp, Saccharomyces pastorianus
atggcagctccaccagctccagttctaagtaaggtgtcacatcctgaggacaaggtgccatctcatccagtgccttctgcaccctctgcaccttcagtaccctctgcaccttcagtaccctctgcacctttagtaccctctgcacctccagcacctccagcacctccagcactctctgtacctccagcacctccagcacctccagcactctctgcaccttcagtacccccagtacctctagtatcttcagcacctccagcactctcagcaccttcaatacctctagtacctccaacacctccagcacctccagcactctctgtacctccagcacctccagcacttccagcactctctgcaccttcagtacccccagtacctctagtatcttcagcacctccagcactctcagcaccttcaatacctctagtacctccaacacctccagcacctccagcacctccagcatctccagcacctccagcacctccagcacctccagcacctccagcgcctccagcgcctcttgcgctgcctaaacacaatgaagtagaagaacatgtcaagtcatctgctccccttccacctgtatccgaggaatatcatcctatgccaaatactgctccgccacttccacgtgcaccaccagtaccaccggctacttgtgaatttgactctgaaccaacagccactcattcacatacagctccttctcctccaccacatcaaaatgtcacggcctctacaccttcaatgatgagtacgcaacaacgtgtgccaacctcagtactatctggggcagaaaaagaatcacgaaccctaccgccccatgtgccttcattgacgaatcgtcctgtggattcattccatgagtcagatactacaccgaaggtggcctctataagaaggtcaacgacgcatgatgtaggcgagatttccaacaacgtcaagatagagtttaatgcacaagaaagatggtggattaataaaagcgcacctcctgctataagcaatctgaagttgaactttttgatggagatcgatgatcatttcatttccaaaagattacatcaaaaatgggtggtaagggatttttacttcttgtttgaaaactattcgcaactaagattctccttgacctttaatagtacaagcccagagaaaacggtaacgactcttcaagaacgctttccatcgccagtcgaaacacaatcagcacgtattcttgatgaatacgctcaaaggtttaatgcaaaagttgtagagaaatctcattcattaataaattcacatattggggctaagaatttcgtgtcacaaattgtatccgaattcaaagacgaagttatacaacccataggagcaagaacgtttggcgcaactatattgagttataaacctgaagaaggaatcgaacagttgatgaagagcttacagaagattaaaccaggtgacattcttgtaattagaaaggccaaatttgaagctcataaaaagatcggaaaaaacgaaattatcaacgttggaatggactccgccgctccgtattcgagtgttgttactgattatgattttacaaagaataagtttagagttatcgaaaatcacgagggaaagattattcaaaacagctacaagctaagccacatgaaaagtgggaagttaaaggttttcagaattgttgcgagaggatacgtaggttggtaa

SEQ ID NO: 80361 - DNA, 2265 bp, Saccharomyces pastorianus
atgagtgaacccgaggtgcccttcaaggtggtggctcagttcccatacaagtccgattacgaggacgatttaaattttgaaaaagatcaagagattattgttacgtctgttgaagacgccgaatggtactttggtgaataccaggattcaaatggcgacgttattgagggtatcttcccgaaaagttttgttgctgttcagggatctgaagttggaaaggaagccgaatcatctccgaataccggttccactgagcaacgtacaatccagccggaagtagaacaaaaggacctaccagagcccatttcccctgaaacgaagaaagaaactctgtccgggccagtgccagttccagccgctacagcagtatcagcacaggtccagcatgatagtagtagtggtaatggcgaaagaaaagttcccatggattctccaaaattgaaggctcgcttatctatgtttaatcaagatataacggagcaagttcctttaccaaaatcaactcacttgggtttagaaaacatacctgtgaaaaaaacaattgtggcagatgctcctaaatactatgtcccccctggaattccaacaaatgatacgtccaatcttgaaaggaaaaagtccctaaaggaaaacgaaaaaaagattgttcccgaaccaattaatcgtgcacaggtggaaagtggaagaattgaaactgagaatgaccaattaaagaaggatctgccccagatgagccttaaagaaagaattgctcttttacaggagcagcaaagattacaggctgcaagagaagaagaactcttgagaaaaaaggctaagctcgaacaagaacatgaacgtagtgcggttaacaagaatgagccctatatggaaactgaagaagcagaagaaaatgaaaaaactgaaccgaaacctgaatttacgcctgaaactgagcacaacgaggaaccgcaaatggaattattggcacataaagagattactaaaacctcacgcgaagcagatgaaggcacgaatgacatagagaaagaacaatttttagatgagtacacaaaggaaaatcagaaagttgaggagtcacaagcagacgaggcaagaggagaaaatgttgctgaggaaagcgaaataggttacggccatgaagacagagagggagataatgatgaggaaaaagaagaggaagatagtgaagagaatcgtagggccgcattgagagaaagaatggctaaactatctggcgctagtagattcggtgctcctgttggttttaaccccttcggtatggcttctggagttggaaataaaccatcagaagagccgaaaaagaaacagcataaggagaaggaggaggaggaacctgaacagctccaagaactacctcgtgccatacctgttatgccatttgttgacccaagttctaacccattttttaggaaatcaaatctaagtgagaagaatcaacccactgaaacaaagacgctagatcctcatgcaaccacagagcatgaacagaagcaagaacatggtacacacgcctatcacaatttagctgctgttgatgatgcacatcccgaatactctgaccatgattctgatgaagatactgacgaccacgagtttgaggatgcaaacgatgggttgagaaagcattcgatggtggagcaagcttttcagataggtaataatgagtcagagaatgttaattccggagaaaaaatttaccctcaagaaccaccaatctcccaccgtactgcagaagtatcacatgatattgaaaattcatcacaaaacacaactggaaatgttttgcctgtctcttccccacaaacaagagttgctcgcaacgggtcgataaattctttgactaaatctatttcaggggaaaatcggcggaaatccataaacgagtatcatgatacagtttccactaattcatctgcattaacagaaaccgctcaagatatttcgatggcagctccaccagctccagttctaagtaaggtgtcacatcctgaggacaaggtgccacctcatccagtgccttctgcaccctctgcaccaccagcaccctctgtacctccagcactctctgcacctccagcacctccagcacctccagcacctccagcactctctgcacctccagcacctccagcactctctgtaccttcagtacctccagcacctccagcacttctctgcacctccagcacctccagcacttccagcactctctgcacccttcagtacccccagtacctctag

SEQ ID NO: 80362 - DNA, 72 bp, Saccharomyces pastorianus
atgggcgtttacttgcaattgattcatcatattagtcgtttcagaactaacattgcttttatcactcaatga

SEQ ID NO: 80363 - DNA, 1344 bp, Saccharomyces pastorianus
atgagctcccctgcattaagcgacccaattactttgtatcttgaatacataaagtggctgaacaacgcctatccacaaggcggtaattccaaacaatctggaatgctcacccttttggagcgatgtttatctcacttaaaggatttggagagatatcgcaatgatgttaggtttcttaaaatatggttttggtacatagaactttttaccagaaattcattcatggaaagcagagacattttcatgtatatgttaagaaatggaattggttccgagttagcgtcattttatgaagaatttacgaatctgttaattcagaaagaaaaatttcaatatgccgtgaaaattctacagctaggaatcaaaaataaggctaggcctaataaggttttagaagaccggttaaaccatctcctgagagaactgggggaaaacaatattcagctaggaaatgaaacatcgatggactcgctagagtctacagtacttgggaaaaccagatctgaatttgtcaatagactagagcttgcaaatcaaaatggcacatcaagtgacgtcaatttaacaaaaaacaacgtatttgtagatggagaagagtctgatgtagaactattcgaaactccgaatagaggtgtttatagagatggttgggaaaattttgacttaaaggcagaaaggaacaaagaaaacaaccttagaatatcagtgctagaagcaaataccaatctgggtgagcttaaacaacatgagatgtcatcgcaaaaaaagagaccatatgatgaaaaactaccgatctttagagattctataggtagaagtgaccctgtttatcaaatgattaatacaaaggaccagaaaccagaaaaaattgactgtaattttaaactgatttattgtgaagatgaggaatctaaaggtggtagactagaattttcgctagaagaagtcttggcaatttctagaaacgtttataaaagggttaggacaaataggaaacatccaagagaagcagatttagggcaagaagaaagcgcaaatcaaaaagaagctgaagcacaatcgaaaagaccaaaaataagtagaaaagccttagtctccaagtcgttgacgccctcaaaccagggaagaatgttttctggcgaagagtacataaactgccctatgacgccaaagggacgaagcactgagacgtctgatatcatctcagctgtcaagccgcggcagttaaccccaattttagaaatgagagaatcaaattctttttctcaaagcaaaaattctgagatcatttcagatgatgacaagtcgagttcgtctttcatatcgtacccaccacagcgttga

SEQ ID NO: 80364 - DNA, 297 bp, Saccharomyces pastorianus
atgttgttgagagtgctaatgctgcttattatcaaagaaagatcaggaatgccgaaaatcctatctccaagaaatactatgaaatcgtggcattttttgaccactattttaacggtgatcaaatatctaaaatcccaaaaggtactacttttgatactcaaattcgtgccccaccgggaaagacgatatgtgtgccagttcgtgtggaaccaaaagtttactttgccactgaaagaacctacctgtcttggttgtccatctcgatattgttgggcggtgtctccactactttattaa

SEQ ID NO: 80365 - DNA, 939 bp, Saccharomyces pastorianus
atgcatagagcccacagggagttgactgggagagccgccagagaagctaatgctaaggtgctgatccatccagttgttggactaaccaaaccaggtgatatagaccatcacactcgtgttcgtgtctaccaggaaattattaagcgttatcctaatggtatagctttcttatccctgttgccattagcaatgagaatgagtggtgatagagaagccgtatggcatgctattattagaaagaattatggtgcctcccacttcattgttggtagagaccatgcgggcccaggtaagaactccaagggtgttgatttctacggtccatacgatgctcaagaattggtcgaatcctacaagcatgaactggacattgaagttgttccattcagaatggtcacttatttgccagacgaagaccgttatgctccaattgatcaaattgacaccacaaagacgagaaccttgaacatttcaggtacagagttgagacgccgtttaagagttggtggtgagattcctgaatggttctcatatcctgaagtggttaaaatcctaagagaatccaacccaccaagaccaaaacaaggtttttcaattgttttaggtaattcattaaccgtttctcgtgagcaattatccattgctttgttgtcaacattcttgcaattcggtggtggcaggtattacaagatctttgaacacaataataagacagagttactatctttgattcaagatttcattggttctggtagtggactaattattccaaatcaatgggaagatgacaaggactctgttgttggcaagcaaaacgtttacttattagatacctcaagctcagccgatattcagctagagtcagcggatgaacctatttcacatattgtacaaaaagttgtcctatttttggaagacaatggcttttttgtattttaa

SEQ ID NO: 80366 - DNA, 162 bp, Saccharomyces pastorianus
ggtgattattacgtcggcggttctttagatagcgattcaattacctcaacattagtgactatccaggtttgcgttaagacacctgcccaactaagactcgaattccaatcaagacaatgggaccgtgtcgtagctttccaaactcgtaatctcaatgcatag

SEQ ID NO: 80367 - DNA, 1305 bp, Saccharomyces pastorianus
atggccatgggtagacataacagaccttccatcatggtatatggtggtactatcttgcccggtcatccaacatgtggttcttcgaagatctctaaaaacatcgatatcgtctctgcgttccaatcctacggtgaatatatttccaagcaattcactgaagaagaaagagaagatgttgtggaacatgcatgcccaggtcctggttcttgtggtggtatgtatactgccaacacaatggcttctgccgctgaagtgctaggtttgaccattccaaactcctcttccttcccagccgtttccaaggagaagttagctgagtgtgacaacattggtgaatacatcaagaagacaatggaattgggtattttacctcgtgatatcctcacaaaagaggcttttgaaaacgccattacttatgtcgttgcaaccggtgggtccactaatgctgttttgcatttggtggctgttgctcactctgcgggtgtcaagttgtcaccagatgatttccaaagaatcagtgatactacaccattgatcggtgacttcaaaccttctggtaaatacgtcatggccgatttgattaacgttggtggtacccaatctgtgattaagtatctatatgaaaacaacatgttgcacggtaacacaatgactgttaccggtgacactttggcagaacgtgcaaagaaagcaccaagcctacctgaaggacaagagattattaagccactctctcacccaatcaaggccaacggtcacttgcaaattctgtacggttcattagcaccaggtggagctgtgggtaaaattaccggtaaggaaggtacttacttcaagggtagagcacgtgtgttcgaagaggaaggtgcctttattgaagccttggaaagaggtgaaatcaagaagggtgaaaaaaccgttgttgttatcagatatgaaggtccaagaggtgcaccaggtatgcctgaaatgctaaagccttcctctgctctgatgggttacggtttgggtaaagatgttgcattgttgactgatggtagattctctggtggttctcacgggttcttaatcggccacattgttcccgaagccgctgaaggtggtcctatcgggttggtcagagacggcgatgagattatcattgatgctgataataacaagattgacctattagtctctgataaggaaatggctcaacgtaaacaaagttgggttgcacctccacctcgttacacaagaggtactctatccaagtatgctaagttggtttccaacgcttccaacggttgtgttttagatgcttga

SEQ ID NO: 80368 - DNA, 297 bp, Saccharomyces pastorianus
atgggcttgttaacgaaagttgctacatctagacaattctctacaacgagatgcgttgcaaagaagctcaacaagtactcgtatatcatcactgaacctaagggccaaggtgcgtcccaggccatgctttatgccaccggtttcaagaaggaagatttcaagaagcctcaagtcggggttggttcctgttggtggtccggtaacccatgtaacatgcatctattggacttgaataacagatgttctcaatccattgaaaaagcgggtttgaaagctatgcagttcagggatcctcta

SEQ ID NO: 80369 - DNA, 558 bp, Saccharomyces pastorianus
atgttatcgaaaggcgacgagaagaagacaaagtcggattccagctacaggcaggtattagtcgaagaaataagcaggtataattccaagataacgcgacacgtaactaacaagcagcatgagacggaaaagtcgatgaggtgcacccaggagatgctcttcaacgtcggcagccaactggaggacgtgcataaagtgctcctgtctctatccaaagacatgcacagtctacaaacccgccagactgctctagagatggcgtttcgagaaaaggcagatcacgcctacgatcgcccggatgtgtctctgaatggcaccacactcctgcacgatatggacgaagcccacgataagcagcgtaagaagtccgtgccgccaccaagaatgatggtcacaaggtccatgaaacgcagaagatccagctccccaaccctatccaccagccaaaaccacaatagcgaagacaatgatgacgctagccatcggctgaagcgtgcggccaggaccattattccctgggaggaactaagacccgacactctggaatctgagctgtga

SEQ ID NO: 80370 - DNA, 396 bp, Saccharomyces pastorianus
atggtcgctagaggtagaacagacgagatatctacagatgtttcagaggctaattctgagcactcgttgatgattacagaaacatcatcaccgttcagatctatattctcccacagtgggaaagtaacgaatgcaggcgctttagaggaatcggacaagcagatactggaatgggcaggtaaactggaattggagagtatggagctgagggaaaactctgacaagctaattaaagttttaaatgaaaattctaagacattatgtaaatcgctaaacaagtttaaccagctactggaacaagatgctgctacgaacggttcgtaccaacacagtgcataccctcaagttttttattcattttcttccaaaacacatttactaacaactgtagtatag

SEQ ID NO: 80371 - DNA, 180 bp, Saccharomyces pastorianus
atgaggccaacaagagcaatctcgctgcctcgaagtaactgtgccttgcagatgaattccttgcttatgcggttgaaaacattggttatgaatagattagtatttttgtcgaagccgtttaggcttgctatgaggcattcgccgtcaactttgattataacaactcttttatttaagtag

SEQ ID NO: 80372 - DNA, 3243 bp, Saccharomyces pastorianus
atgccagagaatagaatgaagcacacaacttcggccatgaaattatctctacagttaatcaatgcagccattgaaatatccggtgacaaatttcctctatatccccggttattcagcttaatttctgatccaatatttaaaagtgttttattcattatacaaagttctacccagtattctcttttgcaagcaactttacaattattcacgagtttggttgtgatattgggtgattatttgcctatgcagattgaactgactttaaggagaatattcgaaattctagaggataccacaatcagtggtgacgttagtaagcaaaaaccacctgcaatcagggaattaattattgaacaactttcaatactgtggattcactctcccgctttctttttgcaactttttgtaaatttcgattgtaatttggataggtcggatctttcgattgactttataaaagagctaactaaattttctttaccagcggcggccgttaatacctctaacaacattcctccaatttgcctagaaggtgtactttcgctcattgaaaatatatacaatgacgtgcagagatttgatagggcagaattcgtaaaaaatcagaaagaaattgatattttgaaacagagagacagaaagactgaattcatattatgcgttgaaacatttaatgaaaaggcaaagaaaggcattcaaatgttaattgaaaaaggattcattgattcggattctaatagagacattgcttcatttttgtttctcaataacggacgtttaaataagaaaaccatcggtctattactttgtgatccaaaaagaacttcattgttaaaagaatttatagatctattcgattttaaagggttaagggttgatgaagcgatcagaattttgctgacgaaattcagattaccaggggaatctcaacagattgaaagaatcgttgaagcattttcatcaaaatattctgctgatcaaagcaatgataaagtggagttagaggataaaaaagcaggaaaaaatggctcagagtcaatgacagaggatgacatcattcatgtacagcctgatgcagactctgtgtttgtgttaagttattcgataatcatgttaaataccgattcacataacccgcaggttaaagaccatatgacttttgatgactactctaacaatttacgaggatgctacaatggaaaagattttcctcgttggtatttgcataaaatttacacgtccatcaaagttaaggaaatagtaatgcctgaagaacatcatggaaatgaaaggtggtttgaagatgcctggaataacttaatatcctcaacatctgtgatgacagagatgcaaagagatttcacaaaccctatttctaagttagcgcaaatagacatacttcagtatgagaaagcaattttctcaaatgttagagatattatcctgaagactttattcaaaatattcacagttgcttccagtgatcaaatatcattacgtatcttggacgccattagtaagtgtacatttatcaactattacttttcttttgaccagtcatataatgatactgtacttcatctgggagaaatgacaacgttggcacaaagtagcgcaaaagcggtggagctagatgttgacagtattcctttggtcgagatattcgtcgaagacaccgggtcgaagatatccgtgagtaaccagagtataagactgggacaaaactttaaggctcagttatgtaccgtattgtactttcaaatcattaaagaaataagtgatcctagcattgtttctaccagactatggaaccagattgtgcaactcattttgaaactattcgagaatttattgatggaacctaatttaccattttttacaaactttcattcactcttgaaacttcctgaactaccattgccagatccagatatatcgatccgcaaggcaaagatgagcagaagccttctgtctactttcgcctcttacttgaaaggcgatgaagaaccttcggaagaagacatcgatttttccattaaagcatttgagtgcgttaaggctagccatcctctcagttcagtctttgagaacaatcaactcgtcagtcctaagctgattgaaactcttctctcttcacttgtgattgaaaaaacgagtgaaaattcgccctatttcgaacaagaacttctctttttgttggaaatatccattatattaatatcagaggcttcttatggacaagaatttggagcactaattgctgatcatatgattaatatttcgaatttagatggcctttccaaggaggctattgcaagacttgcctcgtataaaatgtttttggtttcgagatttgataatccacgggacattttaagtgatttaatagaacacgactttttggtaaaaaatgaaatcttcaatactaaatattatgaaagtgaatgggggaagcaagtaataaatgatctgtttacacatctcaatgacgtaaaatacaatgagcgggctctcaaaaatgtaaaattttggaattttttaaggatattgatatcagccaaagaccgccaatttgccgtctacacatttttggaaaaatacattcaaaatggtgatatctttgtagatgatgggaactttatgaacatattaagtctgcttgatgaaatgtcatgtgcaggtgccgttggcacaaaatgggaacaaaattatgaaaattcagtcgaggatgggtgtgaagcacctgaatccaatccataccgttctattattgatctttctagtcgttccattaatataactgcagacctactttcgactgttgggaggagtaattcagcactcaacaagaatgagattatagctgctattcaaggtctcgcccatcaatgcctcaatccctgtgacgaactaggtatgcaagcattgcaagcattagagaacattctgttatctcgagcaagtcaactacgtacggaaaaagttgcggtggataacctactagagacaggattattaccgatttttgagttggatgaaatccaagatgtcaagatgaaacgaattactagcattttatccgttctttctaaaatcttcttgggccaacttgtggaaggcgtaacaagtaacgaaacttttttgagagtgcttaacgtatttaacaagtatgtagatgatcctacggtggaaaggcagttgcaagagttgattatttctaagagggaaatcgagaaggagtag

SEQ ID NO: 80373 - DNA, 285 bp, Saccharomyces pastorianus
atgcacgacgtgccaatggaaactgttttggccgtgaacccagctacgatgattgtcaaagagtgcatcaatctttgttctgccatgaacaagcagtccagagataaatcacaaacaagtgtggccgcgttgctgggcggaggtagtgatatattcttgagtcaaagtgattcgtttgttgacagcttccacaatttgcctacttctagctatcatgatcctctgatatctggtttagtacagctgcggctaaaaattaacgacttgaagggtttagattcataa

SEQ ID NO: 80374 - DNA, 2109 bp, Saccharomyces pastorianus
  modified_base (1057)..(1057): a, c, g, t, unknown, or other
atggcttctgaccaaaaatttaagatggatgaaaacgatctagagaacttgataatgaattcaaagccaagtgatttttcttacgaggattggaagaactcaacaaggacaaagaaggcattggaatcaagctatcatttagataagttgatagataaagtcgttactgatgggcacattttaattaccacgtacgttgggttaagaatacattcagataagctactaaaagttaaatggcagtatgctgttttagatgagggacataagattagaaacccagattcggagatttcattgacttgcaaaaaactgaagacacataataggatcattctttcaggaacaccgatacagaataatttaaccgagctttggtcgctttttgatttcattttccctggtaaattaggaactctacctgtgtttcaacaacagtttgtcatacctataaatattggtggttatgcaaacgcaacaaacatacaagttcagaccggctacaaatgtgctgttgcattgcgtgacttgatttcaccgtacctgttacgtcgtgtgaaagctgatgttgcaaaagatctgccacaaaagaaagaaatggttctcttttgtaagcttacgaaatatcaaagaagcaaatatttggagtttctgcattcttcagatttaaaccaaatacaaaacggtaagagaaatgttctatttggtatcgacattctaaggaaaatatgtaatcaccccgatttacttgacagagatacaaagagacataatccagattacggtgatcctaaaagatccggaaaaatgcaggttgtcaagcaattattattactgtggcataagcagggctataaagccctactcttcactcaatcgagacaaatgctcgatattctagaggagtttatatcaacgaaagatcccgatttatcacatttgaactacctacgaatggatgggacaactaatatcaaagggagacagtcgttagttgaccggtttaacaatgaatctttcgatgtattcttactaaccacaagagttggggggctangtgttaatttaaccggtgctaatagaattatcatttttgatccagactggaacccatctactgacatgcaagctcgagaaagtgcatggaggattgggcagaaaagagaggtatcaatatataggttgatggtaggaggttcaatagaggagaagatttatcatagacaaatattcaaacaattcttaaccaacaggattttgactgatcctaagcagaaacgatttttcaaaattcacgaactccatgatctgttttcactggggggtgaaaacggttattctacagaagaattgaacgaagaagttcaaaaacataccgaaaatttaaaaaattccaaatcagaggaaagtgacgattttgaacaactggtcaacctatctggcgtatctaaactagaaagcttttataacggtaaggaaaaaaaagagaatagtaaaacagaggatgatagattaatcgaagggttgctaggaggagagagcaatttagaaaccgttatgagtcatgattcggttgtcaattcgcacgcgggcagttcttcttcgaatataattacaaaagaggcttccagagtagcgattgaggcggttaatgcgctaaggaaatcgagaaaaaagatcactaagcagtatgaaattgggacacctacttggacaggtaggtttggtaaagcaggtaaaattagaaagagagatccgttgaaaaataaattaactggatcagctgccattttaggcaatattacaaaatcacaaaaagaggcatccaaggaagctcgccaagaaaattacgacgatggtataaccttcgcaagatccaaggaaatcaattccaataccaaaacgctagaaaatattcgggcatatttacagaaacagaataactttttctcatctagtgttagcatacttaacagcattggcgtcagtctttctgataaagaagacgttattaaggttagagcattattaaaaaccatagcacagtttgataaagagcgtaaagggtgggtgcttgatgaagaatttaggaataacaatgcttcatga

SEQ ID NO: 80375 - DNA, 123 bp, Saccharomyces pastorianus
atgagtctcttgtcaagcctacatagtgcttcctttggaggtatacgattgtctcaacttactatgattatggagaggagagcaacgcctacgtgtcaagacccatcgttaaccgaggtctag

SEQ ID NO: 80376 - DNA, 174 bp, Saccharomyces pastorianus
atgaccaccaattctcggctctgtccttcgagtccatcttcttccctaataaaacatttaactacatccgggggaccatcaacctcacttactataatgttgtcaagtcatcgctatacgaatcctccctgctggcatgagaaattggatacgccaagccctgggcagcctcct

SEQ ID NO: 80377 - DNA, 2988 bp, Saccharomyces pastorianus
atgttccaagatccactacgaacagctctggtttttaatttgtcatgcactgaaatttacgagatttctactgaggacattttttgtttggaagaaacagacgttaagctgagttatgtgacatcctcaccgatagtatccatagatgcgtgtatcaatttcaatgatttcttagataaggatgtctttacgttgtcgattctcacacgtgcacacaatgaggttgcatataagttggaagcatgcgtgtgtgtattcgagtctaaaccagccaaaggaacgaagtggcaaagaactaccaatttaacatttgtggaggaagcaacggtctcacaagtacttctcaaatcggtcaccaatattggtcattttgtttttacgccatggaaaacttactttattaaacatgcattgtcatcgaaacagaccattgatggtaaaacggtagacaaaatataccaagggcctggtgcctttgggtctgataacatggaaagaatcgaacttttgcagcctattttagcggataccacattaaatcatttaacatttacatttatgacgagtactgcaattctaataacatgcagaatgaatgcaatccttagcagttttgaagacgatacgtatatctgggaaaaggccttgtttgagaggcttcccatcaatggtggttcctcacatgatcactaccttgcagcgtttttcaatgagaagtgttggatactggtatccccaaagggccatcttacagtatattcagtcagaaatgaagggcatagtaattttgttcatcttggttcttttctttgcaaatcaaccttatattccgatttgatagggaactacaccaagtcacatttatcttgtggatcattacactgtgggcagggatacttgtgcttgaaatttcgatcgtgtggggacattttcgcgtccacttgcatgaagctacttttcaaaagtaaagacagtgttcctcgacaagtttactctacaagaaaaggtatctattgggcagatgtgaataataatgtttacagagatagtgagcgaatagactttgaaataaatggcagtttcattgctactaaagatggaactctattgaaagataacactatcgttactttggtcccaattcaaagagataatgagtgtaattacgcatacgtcacaaaacaaggttatctgaggtggagtttttcaaaggtttattaccggattcaaaacacgggagttgatttgactatagataattgctttttatctgctatatctagcaagggctcttttttgactgtacttgttctgaatgatgaaataacggtatttgatcattgcaaccgtttgaaaagccagaaagtagttttccatagactttctgacttagcgtccattttcctatatgaatacgaaagcacggtctacattttcatgtctggcaccgaaggaaacctttgcgttatgaaattggcaacttttgagatcgtagaagaggttaaaatttgcaagaagaagttacagttctgtgaagtccctaactcagattatttttttatatatacagccgatactataatttttttcaagccaagtaaaataaaaggtagatttaaaatccaagaagtatatgcaccatgtcctataagctgtttgatacctggagaaaaagatggctcagttgttatggttacttctcaaggtcaattttacgacgtacttgttcctggtgatgccggaagggctactctttgttctaagtttgaaaaagttttaaaaacatgtctcaaatttataactttggaatcttcatcaagatatgtgattgtagcggccctgccagtagcaaatccattgcaggacaagtattccgaaatttatgtgtatgatattaaacagttcaaaaacatttccgcattcaatttttctaacctcaacaatgatatcgagagtataaaatatgaaaacgctatgatatcagatattattgccgtacccatgctcaaaagaaccgaaacattaggaaaaagaaagacttctgagctgtataaggaagtgattttcaattcatgtatcttggtgtctctaaatttagactcaatagacgatattgatagtaaaaatatgaataacctattattgttttcatttgatgaggaatcgggttttattgaatttgtttttgggattaacacggggttctcaatcagtgggttacataactattacaatggatgtgttttggtttatggggagtttgtgcaagcttatcaactgaactattcagttcatgataacaagttcagtattgaacaggtttcaaataggttgaatatttctggtattacaataacatcatctatattttttgataaaaggaaggcaaagatggctaggaagcagcaaaatataggtacatgggtttatttggaagaaatgattttacttgatgtacggaaaggtgtgatgaggttcaatgtcatccatacaacagacggtaacatagaaaaggttcaattgcaggtacagcctctgaatttatttgagagggacctcatcaatagcattaccgacaccgggaaaatgtttaccggtgcagccgctataactttcaagaatattaggtatctactaatttcgtacggtgatcaaaagctcacgttatttagtttaaaacttgatggtgaggaagaaatagacgaaagagtgtaccatgttgctgagcaagttacaaccatcaactctgtaagaactactgattccagaatgagcacgtttttaggcgaatctacatttatgcccttattcttagtaagtaccttgtctaacggttgttatgtgatcggaatcctgcatgaagagtcagatatctcattacatatcttatcagaaaagaaagctgtcttcgcaaagcggtcggttcaaaagttcctgggcttcctcgatcctcaaatggatgatcacactgtaatatctgaaatttag

SEQ ID NO: 80378 - DNA, 1008 bp, Saccharomyces pastorianus
atgctttgccactgttatcagggccttgttggtggtggtatcatatggcgccagagttcctgccggaatcttgttccttcaatggcggttggggccacatttggacgggcagtaagtctactggtagagagatttataagtggcccttctgttattactcctggtgcctacgccttcctgggagcagccgctaccttgagcgggataactaacttgactttaactgtggtggtaataatgttcgagctaacaggcgccttcatgtatatcataccccttatgattgtagtggcaataacaaggataattttaagcacgtctggtatttctggcggtattgctgatcaaatgatcatggttaatggattcccatatttggaagacgagcaagacgaggaagaggaggaaaccttagaaaaatacactgcagagcagctcatgtcctccaaattaattactattaatgaaaccatttacctttccgagcttgaatctttgttgtacgactcagcgtctgaatattctgtgcatggttttccaataactaaggatgaggataagtttgagaaggaaaaaagatgtattggctatgttttaaaaaggcacttagccagtaaaatcatgatgcaaagcgtaaatagcaccaaagctcaaacgacactggtatacttcaataagtctaacgaagagttgggacatcgtgaaaactgcatcggatttaaggatattatgaatgaatctccaatcacggtgaagaaggcggtgccagtaacattgttattccgtatgtttaaagagctaggttgtaagactatcatcgtagaggaaagtggaattttaaaggggttggtcactgctaaagatattttgaggttcaaaagaattaagtatcgagaagttcacggtgcgaaatttacatataatgaagcacttgatagaagatgttggtcagttatccatttcataatcaaaaggtttaccactaatcgaaatggtaacgttatatga

SEQ ID NO: 80379 - DNA, 372 bp, Saccharomyces pastorianus
atgccaacaacttatgtgccaataaatcaaccaattggggatggtgaagatgtcattgacaccaatcgattcaccaatattccagaaacgcaaaattttgaccaatttgttacaattgataagattgctgaggaaaatagaccactgtctgtagactcggacagggagttccttaattcaaaatatcgacattaccgagaggttatatgggaccgtgcaaaaacatttatcacattaagctctacggccatagtttttggatgtattgctggtttcctacaagtcttcacggaaactctggttaactggaaaacaggtcattgtcagaggaactggctacttaataaatccttctgttgtaacggcgtggtt

SEQ ID NO: 80380 - DNA, 141 bp, Saccharomyces pastorianus
atgcttttgtcagtcttatgtgctctaattagtacactgttagtccactatgctgctcctacggctattggttcaggaatctcagagattcaggtatgggtatcaggttttgaatacaataaggaattttgggtttcttaa

SEQ ID NO: 80381 - DNA, 339 bp, Saccharomyces pastorianus
atgtacctgtcctcatggccagttcaagaagtgctttttttggcgacgcttactgctttgatttcttacttcaatgagttcttgaaattagacatgacagaaagtatgggtatattgtttcatgaatgtgtcaagaacgataacacctcaacttttagtcataagttatgtcagttggatgaaaatacgcacgcttttgagttcttaaaaatttttacttccctatgctttgccactgttatcagggccttgttggtggtggtatcatatggcgccagagttcctgccggaatcttgttccttcaatggcggttggggccacatttggacgggcagtaa

SEQ ID NO: 80382 - DNA, 564 bp, Saccharomyces pastorianus
atgctgcttcctttctgtttaaaaactctcgcttttatagtaaaccatgagtcaacggatgaaatcaatgaaggctttattaacatcatcgaagtgatagatcatatgctattagttcacaggtttaaattttccaatcgtcaccatttgtttaactccgttctttgccagatactagaaataatagcaattcatgatggtacattgtgtgcaaattcagcagacgccgtagccagactaataacgaactactgcgagccttataatgtatcaaacgctcaaaatgggcagaaaaataacttaagctcaaagataagtttgataaagcagtccatcagaaaaaatgtacttgtggttctaacgaaatatatacagttgtctattacgacgcagttcagtttaaacataaaaaagagtctgcagcccggtattcatgcgatttttgatatattatctcagaacgagttgaatcaattgaacgctttccttgacacacctgggaaacaatatttcaaagcactttacctccaatacaaaaaggttggtaaatggcgcgaagattaa

SEQ ID NO: 80383 - DNA, 2520 bp, Saccharomyces pastorianus
atgataagaacatttttcctttggcctaaagacaaattacttacacgtagcgtttcgtttataaaagcattttttgcgattaatgactacttgattgtcaatttttctgttgaagagtcttttcaacttttagaacatgccataaatggattaagttcgtgcccgacgactgactttgcgctttcatacttgcaagatgcctgcaatctaactcatgttgacaatattactacaacggataacaaaattgctacttgttactgcaagcatatgctactaccaagtttaagatatttcgcacagaccaaaaattctgcatcttcaaaccaatccttcattcgtctatctcattttatgggaaagttccttttacaaccacgcatagattacatgaaattaaataaaaagtttgtccaagagaatgcgtccgaaattaccgacgatatggcttattattattttgccactttcgtcactttcttatcaaaagacaattttgctcaactagaagtcatctttacaattttaggtgccaagaaacctagtttagaatgcagatttctgaatcttttatcggaatcgaagaaaaccgtatctcaagagttccttgaagcattattgcttgaaatgttagcgtcgactgatgaatctggagtgttatcattaataccaattatccttaaattggatatcgaggttgctattaaacatatttttcggttacttgaattgattcagctcgaaaatttgaacgatcctctcttttcctctcatatttgggatttaataatccaatcacacgctaacgcaagggaattatcagatttttttgccaaaataaatgagtactgttccagaaaaggacccgattcctattttttgataaatcatcctgcatatgtcaagtctataacgaagcaattgttcactttatcttctttacaatggaaaaatctattgcaaactttacttgaccaagtcaatcacgattccaccaacagggttcctttatatttaatacgcatatgcttggagggactatcagagggcgcatcgcgcgcaactctcgatgaggtaaagcctattttatctcaagtatttactttggaatcatttaataacagtcttcaatgggacctaaagtatcatataatggaagtctacgatgatattgtccctgcagaggaactagaaaaaatcgattacgtgttatcttctaatatttttgatactacatcggctgatgttgaagaactgttcttttattgcttcaaattgagagaatatatttcgttcgatctttctgatgcaaaagaaaaattcatgaggcactttgaaatacttgacgaagaaagaaaatcaaacttatcatactctgttgtgtccaaatttgcaacattagtaaacaacaactttacaagagaacaaatttcttctttaattgattcattactattgaactcgacaaatttatcttcgttattaaaaaatgatgacatttttgaagagacaaatatcacgtacgctttaataaacaagcttgcttcatcataccatcaaaccttcgctctagaagctttgattcaaattcctatccaatgcatcaacaaaaacgttagagtggctctcattaacaatctaacatgcgaatcattttgccttgattccgctactagagaatgcctccttcatttattgtcaagcccgaccttcaagagcaacattgaaacaaatttctacgaattatgtgagaaaacaataatgagccccgaaatggccatttcagagacaggtgatgaaaaaaaggaaatagaagacaaaatatctattttcgaaaaagtttggactaatcatctgtcacaggcaaaggaacctgtgagtgagaagttcttagaatctggttacgatatcgttaaacagtcaatgtcattgtccaatggtgatagcaaactaattatcgccgggtttactatcgcaaaatttttgaaaccagataacaagcatagagatatacaaggtatggcaattagctatgctgttaaaattttggaaaactactctgaaaattttgaatctgaaacaattccccttttcagaatatcaatgtctacattgtacaagattataacgaccggacaaggcgatatttctaagcataaatcgagaattctggatatattttccaaaattatgcttcgatatcattctaaaaaagtgtaccatgcgccagaagaacaggaaatgtttttggttcattcactccttacagaaaacaagttggagtatatttttgcagagtacttaaatattgagcatacagataagtgcgattctgccttggggttctgcttggaagaaagtcttaaacaaggtcctgatgcgtttaaccgcctgctctggaacagtgctaaatcgttttccaccattagccaaccttgtgctgaaaaatttgtgagagtttttatcataatgtcaaaaggattgcaagagacaataaccttggtcatcacctatttgtga

SEQ ID NO: 80384 - DNA, 189 bp, Saccharomyces pastorianus
atggatgaagattcagtggcgacagtcattgaagttatagaaactaaatgggatgacgctgatgaaaaaagttcaaacttatatgaaaccattattgaagcagataaaagcttacctagtagcatggcaacacttttgaaaaatttaagaaagaaactaaatttcaaattatgtcaagcgttcatgtaa

SEQ ID NO: 80385 - DNA, 2037 bp, Saccharomyces pastorianus
atgacaatcgatgattcaaatcgattacttatggacgtcgatcaatttgattttttggacgacggaacggcgcaacttagtaataacaagaccgatgaagaagaacaactatataaaagggacccagtcagcggggctatcctggtccctatgactggaaatgatcaaccgattgaaaaaaatggcgacaagatgcctttaaagttcaagctggggccactttcttaccaaaatatggcattcataactgcaaaagataaatataagctttatcctgttagaattcctagattagataccagcaaagagttttctgcatacgtatcaggtttatttgaaatttaccgtgatttaggtgatgacagagtgtttaatgtaccaacgattggagttgttaattctaatttcgcgaaggagcataatgcaacagtaaatctggccatggaggcgattctgaatgaattggaagtgtttattggtagagtcaaggatcaggatggaagagtgaaccgattttatgagttggaagaatctttaaccgttttaaactgtctgaggacaatgtacttcatattagatggtcaggatgtagaggagaacagatcagagtttattgagtcattgctaaactggattaatagatcagacggtgaaccagatgaagaatatattgaacaagtgttttcagtgaaggattctacagcaggtaaaaaagtgttcgaaacacaatatttctggaagcttttgaatcagcttgttttaagaggcctgctctcccaagctataggttgcattgaaagatcagatcttttaccatatttgagtgatacatgtgccgtttcatttgatgcagtaagtgactccatcgaactcctgaaacaatatccaaaagattcgtccagtacatttagagaatggaaaaatttggtgctaaaattaagtcaagcctttggtagttctgctactgatatttccggtgaattacgggattacattgaagatttcttgttagtaattggtggaaatcaacgaaaaattctgcagtattcaaggacgtggtatgagtccttttgtgggtttttattatactatatcccctcattagaactatcagcagaatatttacaaatgtcactggaagctaacgtcgtagacataacaaatgattgggaacaaccatgcgtcgacatcattagtggtaagatacactcaattttaccggtaatggaatctttagatagttgcacagcagcatttaccgctatgatttgtgaagcaaaaggtttgatagagaatatttttgagggtgaaaaaaatagcgatgattatagtaatgaagacaacgaaatgcttgaagatctattctcttataggaatggtatggcatcttatatgctaaatagcttcgcttttgagttgtgttcactgggtgataaggaactatggcccgttgccattggattgatagccttatctgcaacagggacgagaagtgcaaagaaaatggtgattgcagaattacttccacactacccatttgttacgaatgatgacattgaatggatgctaagtatatgtgtagaatggagactaccagaaatagcgaaggaaatatacaccacgttgggtaatcaaatgttatcggcacacaacataattgaaagtatcgcaaattttagtagggcgggcaaatatgaactggtaaagtcatattcgtggctattatttgaagcttcgtgcatggagggccagaagttggacgaccctgtgttgaatgccattgtgagcaaaaactctcctgcagaggatgacgttataataccacaagacattttagattgtgtagtgacgaattctatgcgtcaaactttagcgccatatgctgttctgtcacaattctatgagctgagggacagagaagattggggccaagcgctgcgcctattgcttttgctgattgaatttccttatttaccaaaacatttacttggttttgcttgtggcgaaattcctgtacccaattttccttttagatga

SEQ ID NO: 80386 - DNA, 267 bp, Saccharomyces pastorianus
atggatgtacctaaaatacagcaaacaaagccttctgaaacagaacattcaaaggaacctaaatctgaagaagagccctcctcttttattgatgaggatggatatattgtgacaaagagacccgcaacttcaacaccaccacgcaagccatcacccgtggtaaaaagggcattgtcgtcttcaaaaaagcaagaaacgccgtcatcgaataaaaggttaaaaaagcaaggaacattggaaagctttttcaaaagaaaggcaaaataa

SEQ ID NO: 80387 - DNA, 1137 bp, Saccharomyces pastorianus
atggctatccaaagaattagagaagctgctgaaaaggctaagattgagctatcttctaccgtttccactgaaatcaacctgccatttatcactgctgatgcctcaggtccaaagcatatcaacatgaagttctccagggctcaattcgagactttgacagccccactagttaagagaactgtcgacccagtcaagaaggctttgaaagacgccggtttgtctacttcagacatatctgaagtcttattggtcggtggtatgtccagaatgcctaaggttgtcgaaaccgttaaatctttgtttggtaaggacccatctaaggccgttaacccagatgaagctgttgccattggtgctgctgtgcaaggtgctgtcttgtccggtgaggttactgacgtcttattattagatgttaccccattgtctctaggtatcgaaactttaggtggtgttttcacaagattgattccaagaaacactactattccaacaaagaaatctcaaatcttctccactgccgctgctggtcaaacttctgttgaaatcagagttttccaaggtgaaagagaattggttagagacaacaaattgattggtaacttcactttagccggtatcccacctgctccaaagggtgtcccacaaatcgaagtcacttttgacatcgatgccgatggtattattaacgtttctgctagagacaaagctacaaacaaagattcttctattactgttgccggttcttctggtttgtccgaaaacgaaattgaacaaatggttaacgacgctgaaaaattcaagtctcaagatgaagctagaaaacaagccatcgaaactgccaacaaggctgaccaattggccaacgatactgaaaactccttgaaagaatttgaaggtaaggttgacaaggctgaagcccaaaaggttagggatcaaatcacttccttgaaggagttggttgctagagtacaaggtggcgaagaggttaacgctgaggagttaaagaccaagaccgaagaattgcaaacttcctcgatgaaattgtttgaacaattatacaagaacgactctaacaacaacaacaacaacaacaacaacaacggcaacaatgccgaatctggtgaaactaagcaataa

SEQ ID NO: 80388 - DNA, 999 bp, Saccharomyces pastorianus
atgcttgctgctaaaaacatactaaacaggtcaagcttgtctagctctttccgtattgccacacgtttgcagtcaaccaaggttcaaggttccgtcatcggtatcgatttgggtaccaccaactctgcggttgccattatggaaggtaaagttccaaaaattattgaaaacgccgaaggttccagaactactccttctgtagtagctttcactaaagagggagaacgtttggttggtattccagccaagcgtcaagccgtagtgaacccagaaaacaccctatttgctaccaagcgtttgattggtcgtcgtttcgaagatgctgaagtgcaaagagatatcaagcaagttccatacaagatcgtcaagcactccaacggggatgcttgggttgaggccagaggtcaaacttactcaccagcccaaatcggtgggttcgtcttgaacaagatgaaggaaacagctgaggcctacttgggtaagccagttaagaatgctgttgtcactgtcccagcttatttcaacgactctcaaagacaagctactaaagacgcaggccaaattgttggtttgaacgttttacgtgtcgtcaatgaaccaaccgccgctgccttagcatacggtttggaaaaatccgactctaaagttgttgccgttttcgatttgggtggtggtaccttcgatatctccatcttagatattgacaacggtgtttttgaagttaagtccactaacggtgacactcatttaggtggtgaagatttcgacatctatttgttgagagagattgtttcccgtttcaagaccgaaactggtattgatttggaaaatgaccgtatggctatccaaagaattagagaagctgctgaaaaggctaagattgagctatcttctaccgtttccactgaaatcaacctgccatttatcactgctgatgcctcaggtccaaagcatatcaacatgaagttctccaggactctagagatccccggtaccgag

SEQ ID NO: 80389 - DNA, 105 bp, Saccharomyces pastorianus
atgcaagctgctttcgatgaaggtaaggatttgatggtcactatcatttctgccatgggtgaagaagctgccatctccttcaaggaagctccaagatctgattag

SEQ ID NO: 80390 - DNA, 288 bp, Saccharomyces pastorianus
atgtctgacgaagaacacacctttgaaaatgctgacgctggtgcctccgccacctacccaatgcaatgttctgccttgagaaagaatggtttcgttgtcatcaaaggtagaccatgtaagattgtcgacatgtccacttccaagaccggtaagcacggtcacgccaaggtccatttggttacccttgatatcttcactggtaagaagttggaagatttgtctccatccactcacaacttggaagttccattctgtcaagagaagcgaataccaattgttggatattga

SEQ ID NO: 80391 - DNA, 273 bp, Saccharomyces pastorianus
atggtttcgttgtcatcaaaggtagaccatgtaagattgtcgacatgtccacttccaagaccggtaagcacggtcacgccaaggtccatttggttacccttgatatcttcactggtaagaagttggaagatttgtctccatccactcacaacttggaagttccattctgtcaagagaagcgaataccaattgttggatattgatgatggctacttgtccttgatgaccatggacggtgaaaccaaagacgtagtgtcaggcaccagaaggtga

SEQ ID NO: 80392 - DNA, 159 bp, Saccharomyces pastorianus
atgaagctattggataaagagataaggaaaggcgatgagtcaatcacgattgtagacgttactaataaggacattcaggaagttgaagcgcttatttggcaaatcgttgagcctgttttgagtacgcatattgatcatgataaattttcgttcttctag

SEQ ID NO: 80393 - DNA, 309 bp, Saccharomyces pastorianus
atgaaggaattaaagtcgatgctaaactccacccctactacaccaacacataatggccccactccgctccctgcaaaagctggcactcaattagataagcgtatgagcgacctatcactcaaatcggaaacaccggcttctacaaagaactttagcgcaccgaatgtttcgtcatcaggcaattcattgagaagcctcggaagtccaagcgtgtcatcctcgaaaaagaagaaggtaattcaccaccacttggacattaccaacagcgttacaaacatgtcatccgtgagcgcctttatctcaagatag

SEQ ID NO: 80394 - DNA, 507 bp, Saccharomyces pastorianus
atggatgaaccagatatgtcaaacgtaaactactggattctacgattttttccttttttgtactttaaatccagaattaattggtttaaaaattcatctcttatcgaaagcattttgggcaaaactagaatgcccctagatcatgaatattataaagatggaaagcacaaggaggacacaatagacttattggattctgaggaagtgataaaggatacagtactggaaaagacatttttgggaacctcccttggacagccttggaagttccaaggaaagaatgcgattttggtgctagctaacagatgtggtactgaagatggtaccacgatttttgcaggaagttctggcatttataaatttaacggtaaaaaacctaaaggttcacaggatgatgatgagagttcgcttgattctctcaatgaaagcgtagagttgctgggtaatttgggcaagggtctagaaggcgctatattgcgtgaggtccaatttgaagtgtttaggtga

SEQ ID NO: 80395 - DNA, 423 bp, Saccharomyces pastorianus
atgctaatagacgcaattcatggtgctaagatgagcacaaaacttttagtatcactaaaggtactagtaattcaactcaatccgcaaattgggcaagtagatcaaacaattaagagaacatggtcaatattggataaagttacgaaaagtgccacctatgtgaaaccagacataatactattccccgaatttgcattgacaggttacagttttcatgccagaaaagatattttaccttatgttactaagaaagatgaagggccctcttttgaactggctaaatcaatatccgagaaatttcaatgctacactataataggatatcctgaagaagatgatgaacagaagctatacaattctgccctggtagtaaatccgcagggggggcagatctttaattacagaaagactttttctctatga

SEQ ID NO: 80396 - DNA, 1083 bp, Saccharomyces pastorianus
atggctgtggaagccgtcataaatgtcatggaccaagatcgtaaagacgtggatttcgatttaatcaaaatgcaaggacgggttggcggatctataagcgattcaaaattgattaatggtgtcattttggataaagatttttctcatccacaaatgcctaaatgtgttttaccaaaagagggctctgatggtgttaagttggctatattaacgtgtccatttgaaccacctaaaccaaagaccaagcataaattagacatttcttcagtagaagaataccaaaaattacagacttatgaacaagataagttcaaagaaatgatagacgatgtgaagaaagcgggtgcagatgttgttatatgccaatgggggtttgacgatgaggccaatcatctacttctacagaatgatttacctgccgtaagatgggtaggcggccaagaactagaacacattgccatttccacaaacggtcgcattgttccaagatttcaggacttgtctaaagataaattaggtacatgttccagaatttacgagcaggagtttggtactactaaggatcgtatgctgattatcgagcaaagtaaagaaacaaaaactgtaacatgttttgttcgcggttccaataaaatgatcgtggatgaagctgaacgtgcattgcatgactcactatgtgtggtatgtaatttggttaaagattcacgtgtagtttacggtgggggagcagccgaagtgactatgtccctggctgtctctgaggaagctgataagcaacgtggtattgatcagtatgcattccgtggattcgcccaagcgttagacaccattccaatgactttggctgaaaattctggtcttgatccaatcggaactttgtctacattgaaaagtaaacaactgaaagaaaagatttccaacattggtgtcgattgcttaggttacgggtctaatgacatgaaggaactatttgtcgttgatccatttattggcaaaaagcagcaaattcttttagctactcaattatgtagaatgattttaaagattgataacgtcatcattagtggtaaggatgagtattga

SEQ ID NO: 80397 - DNA, 432 bp, Saccharomyces pastorianus
atggctgctcgtccacaacaacctcctatggaaatgccggatctgtcgaacgccattgtggcacaagacgagatgggtagaccctttattatcgtgaaggatcaaggtaacaagaagagacagcacggattagaggccaagaaatcacatatattggctgctagatcagtagcttctattatcaaaacttcgttgggtccccgtgggttagataagatcttgatttcacctgacggtgaaatcactatcactaacgatggtgctacaattttgtcccaaatggagctagataatgagattgcaaagttgttagtacaactttccaaatctcaagatgatgaaattggtgatggtactactggtgttgttgttctggcaagtgcgctacttgaccaagcattggagttaattcaaaagggtatacatccaatc

SEQ ID NO: 80398 - DNA, 1086 bp, Saccharomyces pastorianus
  modified_base (32)..(32): a, c, g, t, unknown, or other
atgcctgcaggtcggatttctatattggaaantgaggctttagtagcatcccaaggaccctcttactctttgagctatccaatcagacacggtcaagtggaaaattgggatcacatggaaagattctgggaaaattccatcttcaagtatttaagaacagagcctgaagatcattttttcctattgaccgaaccaccactgaatcctccagaaaacagggagcaagtggcggagatttttttcgaatcatttaattgtgctggtctatatattgctgtgcaagcagttttggctctggctgcgtcatggacctcttcaaaagtcacggatagatcattaactggtactgttatagattctggtgatggtgtcacccacgtcatcccagtggcggaaggttacgtcattggctcagcaattaaaaacattccaatagccggtagagacatcacattgttcatccaatccttgctaagagaacgtggtgaagcagacacttccttgagaactgccgaaaagattaagcaagaatactgttacgtctgtccagatattgtaaaggagtttaacaaattcgatagagatccttctaaatttgcccaatttgtggtggaaaaccaagaaaagacaaggagaaaagtcgtagatattggttacgaaagattcttggcacctgaaatcttcttcaatccagaaattgcatcctcagacttcttgactcctttacccacggtagtggatcaaactatccaggcttgccctattgacgtccgtaaaggtttatacaacaatattgtactatcaggtgggtctaccatgttcaaagattttggacgtcgtttacaaagagatctaaagtctatcgtaaataacagaatcgcacaaagtgagctgttaagtggaactaaatcgactggtgtagatgtttccgtgatttctcatcggaagcagagaaacgctgtctggtttggtggctcgctgctggcacaaacagccgaattgaaaggctactgtcacactaagaaagattatgaggaatatggtccggaaattgttagaaatttcagccttttcaacatggtttga

SEQ ID NO: 80399 - DNA, 2565 bp, Saccharomyces pastorianus
atgagactagcaaataaggcattgaacatgctactagaaggaggcaacgatcctagtttaccaaatacggtcaaagctcctcccccagttgtttacgcgcaactcaaatatatttgggctacaggagcttataaagaagcattaaaccacttgataggatttacatccaggttagcgcatgatcttggtttggatccgaataatatgatcgcgcaaagtgtcaaactctcaagtgcaagtactgctccgtatgttgaggaatacacaaaattattagctcgatgttttttaaagcaaggtgaatggagaatagcaacacaaccgaactggagaaacacaaatccggatgcaattcttggttcctatctattggctacacatttcgataaaaattggtacaaggcatggcataattgggccttagctaattttgaagtaatatccatggttcaggaagagactaagctcaacggaggtaagaatgatgatgatgatgacacggcagttaacaatgataatgtgcggattgacggtagtatcctaggaagtggttccttgactattaatggcaacagatacccgctagagcttattcaaagacatgttgttccagcgatcaagggcttttttcattcaatatctctattagaaacaagttgtttgcaagacacgttgaggttattgactcttttatttaactttggtggtattaaagaagtctcacaagccatgtatgaaggcttcaatttgatgaaaatagaaaactggcttgaagtcttaccacagttgatctctcgtatacatcagccagatcctacggtgagtaattcccttttgtcgttgctttctgatttagggaaagctcatccacaagctctcgtgtatcctttaactgtcgcgatcaagtctgaatctgtttcaagacaaaaagcggctctttcaataatagagaaaattaggattcatagtccagtcctggtaaaccaggcagaattagtcagtcacgagttgatcagagtagccgttctatggcacgaattatggtatgaaggactggaagatgcgagccgccaatttttcgttgaacataacatagaaaagatgttttccactttagaacctttacataaacacttaggcaatgagcctcaaacgttaagtgaggtatcgtttcagaaatcatttggtagagacttgaacgatgcctacgaatggttgaataactacaaaaagtcaaaagacatcaataatttgaaccaagcttgggatatttattataacgtcttcagaaaaataacacgtcaaataccacagttacaaaccttagacttacagcatgtctctccccagcttctggctactcatgatctcgaattggctgttcctgggacatatttcccaggcaaacctaccattagaatagcgaagtttgagccattattttctgtaatctcttcgaaacaaaggccaagaaaattctccatcaagggtagcgacggtaaagattataaatacgttttaaagggacatgaagatataagacaagatagccttgttatgcaattatttggtctagttaacactttgttgaagaatgattcagagtgtttcaagagacatttggatatccaacaatacccggctattccattgtcgcctaaatctggtttactaggatgggtaccaaatagtgacacattccacgttttgatcagagaacaccgtgatgccaaaaaaattccgttgaacattgaacattgggttatgttacaaatggcccctgattatgagaatttgactcttttacaaaaaattgaagtattcacgtatgctttagataatacaaaaggtcaagacctttataaaatattatggttaaagagtaggtcgtcagagacatggctagaacgtagaacaacttatacgagatctttagcagttatgtccatgactggttatattctgggactaggtgatcgccatccaagcaacctgatgctagatagaatcaccggtaaagttatccacattgatttcggcgattgttttgaagctgccatcttaagagaaaagtatccagaaaaagtgccatttagactaactaggatgttaacatacgcaatggaagttagtggaattgaaggcagtttccgaattacttgtgaaaatgtcatgagagtcttaagagataataaagaatcattaatggcgatcttggaagcttttgcgcttgatcctttgatccattggggattcgatttaccgccacaaaaacttactgagcaaactggaattcctttgccgttgattaatcctagtgaattattaagaaagggcgcaattactgtcgaagaagcggcaaatatggaagcagaacaacaaaatgagaccagaaacgccagagcaatgcttgttttgagacgtattacagataaattaacgggcaatgatatcaagaggttcaatgaattagacgtccctgagcaggttgataaactgatccaacaagccacttctattgaaaggttatgtcaacattatattggatggtgcccattctggtga

SEQ ID NO: 80400 - DNA, 3105 bp, Saccharomyces pastorianus
atgttcaaatgccctctttccgactatatgcaggaaacgtttcaaattctgactgagagaataccatcactaggccccaaaataaatgacgagttgcttaacctagtctgttcaaccttatctggaacaccatttatccagccagggtcaccaatggagataccatcgttttcgagagaaagagcaagagaatggagaaataaaagcatcctacagaaaactggtgaaagtaacgatgataataatgatataaaaatcattatacaagcttttagaatgttaaaaaatatcaaaagcagattttcgttggtagaattcgtgagaattgttgcactttcttacattgagcatacagatcccagagtaaggaaactagctgcgttgacatcttgtgaaatttacgtcaaggataacatctgcaaacaaacatcactacactctctgaacactgtatctgaagtgttatcaaagcttctagccattacgattgcagaccctttacaagatatccgtttagaagttttaaagaatcttaatccatgtttcgatccccagttggcacaaccagataatttgagactcttgtttattgcactgcacgatgagtcgttcaatattcagtcagtagcaatggagcttgtcggtaggttgtcttccgtaaaccctgcatacgtcatcccatcgataagaaaaatgctactggaactgctaacaaaattaaaattctcaacttcttctcgagaaaaggaagaaactgccagtttgttatgtactcttatcaggtcgagtaaagatgttgcgaaaccttatatcgaacctcttttaaatgttcttttgccaaaattccaagatacctcatcaacggttgcatcaactgcactgagaactataggtgagctatctgttgtagggggcgaagatatgaagatatatcttaaggatttgtttcctttaattatcaaaacatttcaggatcaatcaaactctttcaagagagaagctgcacttaaggcccttggtcaacttgcagcctcatctggttgcgtgatagatcctttactcgactatcccgaattattgggtatattggtgaatatattgaagacagaaaactctcaaaatattaggagacaaacagtcactttgataggtatactgggagctatcgacccatatcgccaaaaagaacgtgaggttacctctactaccgatatatctacagaacagaacgccccgcctatcgacattgctcttctcatgcagggcatgtctccttcgaatgatgagtattataccactgttgtcattcactgcctgctaaaaatcctaaaagatccatccctatcatcttaccacactgccgtgatccaagcgattatgcatatttttcaaacccttggtctaaaatgtgtttcattcttggaccagatcatcccaactattttggacgtaatgcgtacatgctctcagtcactattagaattttacttccaacagctttgctctttgattattatcgtaaggcaacacataagacctcatgtcgattctatattccaggctatcaaagatttttcttcggttgctaagctacaaataacgcttgtaagtgttattgaagcaatatcaaaggctctggagggtgaattcaaaagattggtccctcttactctgaccttgttccttgtaattttggagaatgacaagtctagtgacaaggtcctctccagaagggtattgagactgttagaatcgtttggtcctaacttagaaggttactcgcatttgattacacccaagatagttcaaatggcagaattcaccagcgggaacctacaaaggtctgcaataattactattggcaaactggccaaggatgtagaccttttagagatgtcctcaagaattgttcactctttacttagggtactaagttcaacaacgagtgacgaactctcaaaagtcattatgaatacattaagtctactgctaatacaaatgggcacatcctttgctatctttatccctgtcattgatgaagttatactgaagaaacatattcaacacacaatatatgatgacttgacaaacagaatattaaacaatgatgttttacccacaaaaattcttgaagcaaatacaacggattataagcccgcggaacaaatggaggcagcagatgctggggtcgcaaaattacctataaaccaatcagttttgaaaagtgcatggaattctagccaacaaagaactaaagaagattggcaggaatggagcaaacgtctatccattcaattattaaaagagtcaccctcccatgctctaagagcttgtccaaatcttgcaagcatgtattatccactagccaaagaactttttaataccgcattcgcatgtgtttggaccgaactttatagccaatatcaagaagatttaattgggtcattatgtatagccttatcttctcccttaaatccaccagaaatacatcaaacattgttaaacctggtagaatttatggaacacgatgacaaggcattaccaataccaactcaaagcctgggcgagtatgctgaaagatgtcacgcctatgccaaagcgctacattataaagagattaaatttattaaagagcctgagaactcaaccattgaatcactgatcagcattaacaaccaactgaatcaaacggatgctgcaattggtatattaaagcatgcccaacaacatcattcacttcaattaaaggagacatggtttgaaaaattagagcgttgggaagatgcactacatgcttataatgaacgtgaaaaggcaggtgatacttccgtgagcgttacactcggtaagatgagatcccttcatgcccttggcgaatgggaacagttgtcgcaattggcagctagaaagtggaaagtttcgaagctacaaactaagaagctaatagctcccttggcagctggtgctgcgtgggggttgggagagtgggatatgcttgagcaatatatcagcgttatgaaacctaaatctccagataaggaatttttagatgcaattttatacttgcacaagaatgatacgacaatgctagtaagcatatattaa

SEQ ID NO: 80401 - DNA, 108 bp, Saccharomyces pastorianus
gtcacaccacagccatgcagatctgcattcaataacaatgatcgtattttttcattaagtagtgctacgtacgtgaagcagcagcatggccaatcacaaaacgactaa

SEQ ID NO: 80402 - DNA, 1011 bp, Saccharomyces pastorianus
atgacagttgaacttttcaacagaatagtagaaagagaaaccaattggataatttatccgctgtgggtgatggctaaacaattaattcgtctggcaaacgaatctagtgaacttaataaagactcaattgaagaatgcggacgcactatccatagaagctttactatatgcctcaatgataggaacccaagattgaatgaaaataaaaaaatcggatgttatatgtttgctaatctagagttttccatctaccatcggttaagtaataaagatatgattaaaaatttagtgaaagtcctcgagagcagagtgaacgcccgggatataccaccgttgaataaaagcctggcaatggaacataagtctcaagtggtgttgtataattattatctaggtcaatactacggatgtctggaaaacgatcacgaacgcgggttcttccatttaaatgaagcattattgcaatgtccaatgctatatgtggaatctaccggcaagttcgtcttacagggccaaatggaaaagataatgatactgctggttccacttgctcttttaactaaaaggttgtaccctcactgggatcatccagtaatcgccggagtaattactaggagtaagcgcttaagtcaagtttatccgacattagtgcgtagcgtaatctcagggaacctgtcactgtacgaggctaccgcagcaagccatgaaagatttttcctttcgcaaggattgcatgtcgtcatcacattacttcgagaggtggtcttcactcggttggtacaacgatgttggcaatgggggaatgatcggaaaagtatcatgcccttgaaaattcttctggcaacaaaacaacacgatagttctgccaatgaggacgaagaggagcagttggatgccctagaatgccgtctagcaagtgctatagcaagtgggcttttgcgtgcttatctttctcactccaaccgctgcatcgttttcagtaagaaggagccctttccccatagcaaatga

SEQ ID NO: 80403 - DNA, 165 bp, Saccharomyces pastorianus
atggatgttgatataggatgttattttgaagagaaacgctatgacgacaaactgttagacttcatcagatatgacgttaaaacacctaaaaagactaaatatatactacaaaggcctacggcgacagatgaagagagtgtacgattacaaggttttaccaattag

SEQ ID NO: 80404 - DNA, 354 bp, Saccharomyces pastorianus
atgggcccatttgataaagcccgttattgtttggaacaggtcctatgtattacaccattcaattacgcttgttttggtaggctaagtgagactctgtattatgaggctctacgtagcaagaaaccaacccagaccgagctcttggaaaaggcattaaagaatgctttgaggagcgttgaacttagcgaactatacctaaaagggtgggcattggttaacatcatttctcgcgaactgggacgtaataaaccaaatgacttgatcaaactatctgcatcgaagctaaatgaaatttctgcgaagtctaacaataaagataagattaccgctgaattaattttgaataagatatga

SEQ ID NO: 80405 - DNA, 492 bp, Saccharomyces pastorianus
atgaatgaaaggcattggatcgcattggaacggaggaaattatacaaagcagtagataaaacaatgttgaaggatttggttagagaaaagcttttgacaattatgaataccaaagcgtatactcaatttaatccagaacaattactgcaactagaaaatgaaatgaaaatttacatgaaaagtggagactctggactaacagaaggaaactatttcttcttgatggaaatgcttttctatgttttggtgtaccgaaaccaagacgttgatgcgcaagttgtttataatacattaagagatcgtcttggtgaaaattcgtataaaatggtaatcatgaaagccactttattgcagataaacggaaatgataaaggcgctattgaatatctggaaaatttgttgaatgatgatctggagtatgaaacggacttcgttacttatgtctctattgcaaagaaattgatagctatcaagacacttccaagaacttga

SEQ ID NO: 80406 - DNA, 1851 bp, Saccharomyces pastorianus
atggaaaatggaagcactacattagaagagggcaatttaaatcgtgatgtcttagcagataagaaagaagttatttcgacaccaactgcaaaagaaatcaaacgtccaaatgtccagctaacccaatcatcgtcacctataaaaaagaaaagaaagtttaaaagaatatcgcctagaaaaatctttgatgaggaagatagcgaacactcccttaataataattctgccaacggagacaacaaagataaggatttggttatagattttacaagccatatcataaaaaatagagatgtagggagaaagaatgctattttagatgacagcacagatgaattcagtttcagtaaccaaggacataacacatttgacatacctataccaacctcatcacatttgctcaaaggtatagattcagataatgacaatgttatacgagaagatgatactggcataaatacagacacaaaaggagcgtcttctaaacacgaaaaattttctgttaattctgaagaagatttaaatttcagtgaacggaaactcacaggtagagacagtagtactaatattcttataagaacgcaaattgtagatcagaatttgggtgatatcgacagagataaggtccccaatggtggatccccagaaattccaaagacacatgagttaattagagataattctgagaagagggaagcacaaaacggggaatttcgacatcaaaaagattcaactgtacggcaatctccagatatattacattctgataaaagtggtgataattccagtaatattaccgcaatacccaaagaggaacaaaggagaggcaatagcaaaacatccagtattcccgctgatattcatcctaaaccaaggaaaaacttgcaagaaccaagaagcctatcaataagtggaaaagttgttccaacagaaagaaaattagataacatcaatatagatctaaatttttcggcgtccgatttttcaccatcatcacaatctgagcaatcatcaaaaagctcaagcgttatttcaacgccggtagcgagccctaaaatcaatctcacacgcagtttgcatgcagtcaaagagctttctggcctcaaaaaagaaactgacgatgataagtattttactaataagcaggaaactataaaaatactggaagatgcgtctgtgaagaatgagaccccaaataatgaaatgttactttttgagactggaaccccgatcgcatctcaagaaaacaaatcaagaaaattatttgatgaagagttttctgggaaggaattggatatgcctatagattcatcaactgtagaaataaaaaaggttattaaacccgaatttgagccagtcccatcagttgcaaggaatttggtgtctggaacctcttcatatccacggaattcacgtttagaagaacaaagaaaggaaacaagcacaagtttggctgataattctaagaaaggaagttcatttaatgagggcaacaacgaaaaagaaccgaatgcagcagaatggtttaaaattgatgaaaatagacaccttgtaaaaaattacttccatgatttgttaaaatatataaataataatgatgctacgctagctaatgacaaagacggtgatctggcttttttgattaagcaaatgcctgcagaagagttggacatgacattcaacaattgggtgaacctaaaagtgcaatctattaagcgcgaatttatagatgactgtgataagaaattggacatattgagaagggattactatactgccacaaattttattgaaactttggaagatgacaatcaattgatcgatattgctaagaaaatgggcattttatag

SEQ ID NO: 80407 - DNA, 480 bp, Saccharomyces pastorianus
atggatggtcaaatagataaaatggagaagcgatatagcatgaccaaactggagaataggttaaggactttccaagatggtgttgcacttgaaaaaaaaaagttaaagtggagttttaaagttatcccgtatcaggcaatggccaagcttggattttactttgatccagtgatcgatcctaagacatctaaactgaaaaaagactctgtaagatgttgctattgtcatcgtcaaacatacaatgtgagagactgcagatccaaaagaaaagatgttcttgagactctaagcaatataatgaggcaacatctgactgttactgataacaaacaagtttgcctccttatttacttgcgcaataagctattgacggactatagcttccatatgggggtttcagactggaaaaatgacaagtacttcagcaatccagatgatgaaaacgtgataaacctaagaaaatttactttttcaagataa

SEQ ID NO: 80408 - DNA, 135 bp, Saccharomyces pastorianus
atggtgaatgcaggactcatgcgatacgactccagcatagaaggcttaggcgatccaagcatggataaaacacttatgaacgatacctgttattgtatttattgcaaacagttgctacaggttggtcataaatga

SEQ ID NO: 80409 - DNA, 198 bp, Saccharomyces pastorianus
atgctaaactttaataacggaacccgtttatcgttgccacaactgagcctaactaaccataacaacactactatggaattagtaaacaatgttggctcctcacaacctcatacgaacaacaacaacaataataacaacacgaactataacgacgataacaccgtttttgaaactctgactttacactctgcaaactga

SEQ ID NO: 80410 - DNA, 1665 bp, Saccharomyces pastorianus
atgctttctatacctgtatttaaccagcaatcacaacaatcgcagcaccaaaaccatagttcgggttctgctggttttagcaatgttctccatggttataataataacaatagtatgcacggaaacaacaataactcagcaaatgaaaaagaacaatgtcctttccctctaccaccacctaacgttaacgaaaaggaagatttgttaagagagatcatcgaactttttgaagcaaattccgatgaataccaaatcaattcgttgataaaaaaatcgctgaatcacaaaggcacttccgatacgcaaaactttggacctttaccagaaccattgtctggcagggagttcgatccaccaaaattacgcgaattgcgaaaatcaatcgattcaaacgcattttccgacttagagatcgaacagttggctattgcaatgcttgacgaattgccggaattgagttcagattacttgggtaacactatcgttcaaaaattatttgaacattcatctgatattattaaagacatcatgctgaggaaaacaagcaaatacctaacctctatgggtgttcacaaaaacggaacatgggcttgtcagaaaatgatcactatggcgcatactccgagacaaatcatgcaagtgacgcaaggggtcaaggactactgtactccattaatcaatgaccaattcggaaattatgtcatacagtgcgttttgaaatttggattcccctggaaccagtttatttttgaaagtataatagctaatttttgggttattgttcagaatagatatggtgcaagggcagtcagagcttgtttagaggcacatgacattgtaactcctgaacaatcaatagttttgagtgcaatgatcgttacatatgctgaatatctaagcactaatagcaatggggcgttgttggtaacgtggtttttagatactagtgttttacccaacagacattctatcttggcaccaagattgacgaaaagaattgtagagttatgtggccacagattggcttctttgactattttgaaggtcttaaattacagaggggatgataacgctagaaaaatcatcctagattccctatttggaaacgtgaacgcacacgattcttcgccaccaaaggaattaacaaagcttttatgtgaaacaaattatggcccaacctttgtccataaagttttagcaatgccattattagaagatgacttaagagcccacatcattaaacaagtcagaaaagtattgacggattctactcaaatgcaaccaagccgccgtttattggaagaagtcgggttggcatcaccctctagtactcataacaagacaaaacaacaacagcagcagcatcataacagcagcatttcgcacatgttcgccactcctgatacttctggacaacacatgagaggtctttctgtttctagcgttaaaagtggtggatctaaacataccacaatgaacaccacgactacaaatggttcttctgcctctacattatccccgggccaaccattgaatgccaattctaattcttcaatgggctattttagttatcctggcgtcttccctgtcagcggcttttcaggcaacgccagtaatggatatgctatgaacaacgatgacttaagttcccagttcgatatgcta

SEQ ID NO: 80411 - DNA, 1677 bp, Saccharomyces pastorianus
atggataaaagtaagcagatgaacatcaacaacttgtccaacatccccgaggtgattgaccctggcatcactatcccaatatacgaggaagaatacgagaacaatggagagagtaatagccaactgcagcaacagccccaaaagcttggatcatataggtcgcgagcaggaaaattttctaatacattgagtaaccttttgccctccatcagtgccaagttacaccattcgaagaaaaatagtcacggaaagaacggtgctgagttttcctctagcaacaacagttcccaatctacggtggcgtccaagacaccaagggccagcccttccaggagtaagatgatggaaagttctatagacggtgtaactatggatagacctggcagtttaacccctcctcaagacatggaaaaattggtgcattttcctgactcgagtaataacttcttaattcctgccccccgaggatctagcgactcgtttaacttgccacatcagatctcgaggacgagaaacaacacaatgtcttctcagataacttccatttcatcaatcgcccccaagcctcgtacttcgagcggaatatggtcttcaaatgctagtgcgaacgatcccatgcaacagcaccttttgcaacaattgcaacctacgacaagcaataatacaactaattcaaacacgctcaacgattattcgacaaaaagtgcatattttgacaacatggtatctactagtggaagccaaatggcagataataagatgaatacgaataacttggctatcccaaactctgtttggtcaaataccagacagagatctcaatccaacgcgtctagcatatataccgacgctccactgtacgaacagcccgctcgtgccagtatttcatcgcactatactattccaacacaggaatctccattgattgctgatgaaatagatccgcaatccatcaattgggtaacaatggaccccactgtaccatcaataaaccaaatatcgaaccttttacccacaaataccatttctatttccaacgttttccccctacagcaccagcagccacaattaaataacgcgataaacttaacaagtacttccttggcaaccctatgctccaaatatggtgaagtcatatctgctaggactttaaggaatttaaacatggctttagttgaattttcttccgtggaaagtgccgtaaaagccttagatagtttacagggcaaggaggtatctatgattggagcaccaagtaaaatttcatttgccaaaatcttacctatgcatcaacaacccccacaatttcttctcaattctcaaggcttgccattgggtttagaaaacaacaatttgcaaccacagcctttattacaggagcagttattcacatggagctgtgactttccaacaacaagtaaatgttctatggctgtatttaacagcaatccaaacaatccaaaggtaatatgctttctatacctgtatttaaccagcaatcacaacaatcgcagcaccaaaaccatagttcgggttctgctggttttagcaatgttctccatggttataataataacaatagtatgcacggaaacaacaataactcagcaaatgaaaaagaacaatgtcctttccctctaccaccacctaacgttaacgaaaaggaagatttgttaa

SEQ ID NO: 80412 - DNA, 2193 bp, Saccharomyces pastorianus
atgagaagaaatacactcatctctaaaaggattcaagataacataagaactcaaaagggtcacgctccacttattaggccaagcgtcatgaaacttaatggcgaagattctggttttcagaatcatttcttggaggtagaacaaccgcaagaacacgaaaatatcccattaagtacgcacctaagcgaacaagatatcacaacaaatgtaggcctcgatgaacagaaattaccaaccaatacccaggacgaagctgaaatttccattcgggaaatagagagtgcgggtgatatcacttttaataggggcgatttactatctttatcctttgatgaggaattgggtcaggattttgctaattttctagacgctttggatcatgactccacatctttcaatcatgggccggatgattcatccagttttcaaagagacagttcaaagaaaagcttcaattctctttgggaaagcagttacgaactaaaaccgccaccttccataagaaagcaacctattgcccccgacgtcctgcaaaaattattagaatcagatactaaagatgacgcagatttggaaaaaattagagaagagcgtataactgaaccaaggactggtttggggattggaatgctgaaaacaccagttaaggatgtttcaattgcgctagctgcaagcattaaaggatatgaggcaagtttcagcgatattgactctcgtccagagggcatgaataatagtgataccatcactttgaacatgttcgacgatttcgaagaagataaaatgaccccttccactccagttcgtagtataagtccaataaaacggcatgttagcagtcctttcaaggtcgtgaaagctggaaacaaacaagagaataatgaaataaacattaaggctgaagaggaaatagagccaatgacgcagcaagaaaccgatggtttgaaacaagatattcctccactgctagcgcagacaaaagataacgtcgaagcaaaagaagaaacgataactcaacttgaagaaccacaagacgttgaacaagaatttccggatatgggaacactttatttaagtataaaggctatttccacgcttgcattatatggaactaagagtcatagagcaacatatgctattgtttttgacaatggggaaaatgtcgttcagacaccctgggagtcgcttccgtatgacggtaacatcaggatcaataaggaatttgaattgcccatagattttaaaggaaaagccgaaacatcctccgcttcttctgaaagagatagctacaaaaaatgtgttatcacattaaaatgtaaatatgaaaaacctcgacatgaattggtcgaaatagtagacaaggtgccggtgggtaagagtttttttggaaagacaaagtataaatttgaaaagaagtatgtacagaaaaaacctaaacaagatgagtgggattatctatttgcacaagacggttcatttgctcgttgtgaaattgaaattaatgaagagtttttgaaaaacgtggcatttaataccagtcatatgcattacaatatgattaacaagtggagtagaatcgcagacaaaattcacggctcaaaaaggctgtacgagttaccacgcaaggcgcctcacaaagtggcttcgttggatgtggaagcatgtttcttagaaagaacttctgcctttgaacaatttcccaaacaattttcattggtcaataagattgtttccaaatacaagttgcaacaaaatatctataaagaagggtatttattgcaggatggtggtgatctgaaaggaaagatagaaaacaggtttttcaaactgcacggctcgcaactttctggttatcatgaaatctctagaaaggctaagatcgatattaatctgttgaaagtcacgaaagtcctacgtaatgaagacatccaggcggataatggagggcaaaggaattttacagattgggtactctttaatgaatgcttccagctagtatttgacgatggtgaaagaattactttcaacgcggaatgctctaatgaggaaaaaagcgattggtacaataagctccaggaagttgttgagttgaatgttttccatcaaccctgggtgaaaaagtattgtgaaaagttagctgaggaggaaaagactcgaacaaccggtcataatttgaagcaagattttaattag

SEQ ID NO: 80413 - DNA, 1734 bp, Saccharomyces pastorianus
atggcacaagatatagataaactagcccgtgatgaggaaaagcccgtaaaacttagcagctctccccttaaatttactttgaaatcgactcaaccactgctgtcgtatccagaatcgcccatccacagaagttctattgaaattgaaacgaattacgatgacgaagatgaagaggaagaagatgcatacacatgtttaacacagtcacctcaaatattacactctccatcaaggattccaataactaacgcagtgtcgattaataagctcaatcttgatttcacattgaatcccaacgaatcagacaaaagtctagtatctgacacctcagttgatagcacaggacgagaactagatacgaaaacaatcccagaattaccattttgtatgtcatcaacgcccgaaatgacgccagtcgatgagaaatgtaaccttccaagtaaattgttgaacactagtaacaattcacattctgattcaagatcgccaacagcctctgtggaggatttaaacatttcaacgaatctgccgggtgctgattccagccaaaataatccagtcactactgatgcggatgcgcttattgaaaacgatgttgtgcgggaccttcaacagaatatggaacatatcgatgatgcttttgatgagaaaaaagttcttgacgaaggttgcagcaatgagcccgttacctttttgggtgaaaatgacactaggtccatagtatactctaataaagggaccaatgctaatgttcaagaattttcacaggaagattctctagcgcacagtgaacccaaattcaaagatcttaatgctacatcggatgacgtatggaatgaagacaaagaaacagacgcaaatatttcaacatctacaaagtcagaggaaagctacattgctgactataaagtaacgagacaagaagactgggataccaaaaagcttcatcaagaaagtgaacatgcaaatgaacaaccggcaataattcctcaaaaggattcttcagaagaaacattcactgaactaaataatgaaagtgaattccaaaggaactttaaggatggagaggaataccgaatcgttcaacacgaggagagcctgtatggacaaagaacaaagagtccagaagaaaatataataaatggcagtgaaattggtgtcgaccatggagaggccgctgaagtgaatgaaccattggcaaaaacttctgcagaagaacatgatctttcatcatcatgtgaagatcagtcggtgagcgaggctcgtaataaagacagaattgaagagaaggaagttgaaactaaggatgagaacattgaaaccgagaaagatgaaagtgagtaccataaagtcgaagaaaatgaagagccggaacacgttcccctcttaccacccctgccaagatgggaagaaattcaattcaacgagccatttatagatgaaaatgatacctccaatgattccatcgatttaaccagatccatgaaaccatcagattacatttctatatggcatatccaagaagaggaaatcaaatccaattcaccagaatccattgccaactcccaattttcacaacaatcctcgattaccactgcatctacggtcgattctaagaaggataatggatcaacttcgttcaaattcaaacctagaatagtgagcaggagtaggatttacaatccaaaaagcagagtatcctcattgaattactacgataatgaagattacatt

SEQ ID NO: 80414 - DNA, 459 bp, Saccharomyces pastorianus
atgcaagaagcggttgatgaaggattggttaagtctataggggtttccaactatgggaaaaagcacattgatgaacttttgaactggccagaactgaagcacaagccagtggtcaaccaaatcgagatatcaccttggattatgagacaagaattagcagattactgtaaatctaaaggtctcgtcgtcgaagcctttgccccattgtgtcacggctacaaaatgactaatccagatttattaaaagtttgcaaagaggtggaccgtaatccaggtcaagttttaattcgttggtctttacaacacggttatttaccactaccgaagactaaaactgtgaagaggttagaaggtaaccttgcagcctacaactttgaactgtcagacgaacagatgaaatttcttgatcatcctgatgcttatgagcctaccgattgggaatgcacagacgcgccataa

SEQ ID NO: 80415 - DNA, 126 bp, Saccharomyces pastorianus
atggttcctaagttttacaaactttcaaacggcttcaaaatcccaagcattgctttgggaacctacgatattccaagatcgcaaacagccgaaatgtgtatgaaggtgtcaagtgcggctaccgtc

SEQ ID NO: 80416 - DNA, 93 bp, Saccharomyces pastorianus
atgacggatttgaaatcaatggcaaaagcattcatatctatcgttgacagcgaaaaagaaggaagaagatctcgaacacgaacttcttcatga

SEQ ID NO: 80417 - DNA, 1878 bp, Saccharomyces pastorianus
atgatgggaactccggctactgatcttatttccgataatgataaatataataagcaatgtctttctgattcaagtgatagtggtagtgatgtaagctttttttccgtaaatgaaagcgaaggtgaattggatacaatggagaaagtggataccttgattggaggtgcaagagttataagcaataaagtagaaaaagacagcgatagtgaacaaaggggaagaaagaaggaaacaactgggcccaataactatcataatttagaagaggagcaagcgagtgccatttctcttgacgctgatgatgaagatctcgatgaaattatttcttattcgcatgacgggaactatgacagctctcataaaactttctccttttccttaccatttggtaatacaaatttccgatcaagttcaccattagccataattaaaactgtgctacccaagactccagatgagttcatcaaaaagaatctaagaaagaatgagatcaggcaaaaactgaaaatatcaacctccattttttccttggaagagatagaattatttaaatacgaaaggggcattgataattcaaggttgagggctgttaaagaatctttggaaatggatgccttgaagaactccattaagcaaataacagcagacccattcgacaaaactcatgacggatattaccgttcgcgtttagaatctatatggaatgaattggaaggagatgtcgttataatgggtggatatcgaggtagtgtgctaagggatgctactactcataagcgaatttggatcccattaaaggcaggtttgaatatgacgaaagtcgatttattgatcggacctaatgacgaagatgaacttaaaactcagaaggagattgtccctgatggaatgctaacacatatagggcctgttgatatctctaagaggttgataaagaggctagacgcaaatcctaatctaaatgttcagcagtttggctatgattggagattatccttggacatatctgccaagcatttaacgactaaactagaggaaatttacaataagcaaaaaaataagaagggaatatacatcattgcccattcaatgggcggactggtcgcacataaagtgttgcaagactgtactcatttgataagaggtattatttatgtgggttccccaagccaatgtccaaatattttaggtcctattaggtttggagatgatgtgatgtggaataaaactattttcactaaagaaaccaacttttttatgagaagtagtttctattttctaccgttagatggtagatgttttgttgacaaaattaccttagagaggtatgatttcgatttttttgatacagatgtttggaaaacccttggcttgtcacctctcgtcaatgagaaaagagaggaatcagctcacgaaaaatcaaaattattaccaaggaaaacgaaatcagcgctttcgcttaaagctaccctaaacgcaactagcaagtttgtcctaaatgcacctgttgttaggaatgtagccggcaataataaacaggtaccaagggatgtgcctttcgatgaagtcttccatacatcttatgaagatagctgtgaatatttagcgagaactttaaaacgtacaaagaattatttggatagcttagattacgacccgaacaaagaatatcctccattggccatggtttacggtaacaaggttcccactgttaggggtgctaaagtgaacggtatacaagatataaaagatgggaattatgaagatttttactatggtccgggcgacggtgttgttcaccataaatggttattgcctgaacagagagctttccagttgtttgtaaaatcgccagttcttcaggtcatgttagcttaa

SEQ ID NO: 80418 - DNA, 471 bp, Saccharomyces pastorianus
atgttgataatggcagtgactccactcactatcacgacgggtaaagaaggaacgacagtaggagaaaccattcagaactggcatctctggaggcgtcgttacgaattattccagaaagatggagtagaaggatccacttttgaccaatttggtaagatagatgcacctttcttatcatttgattttcctgtaacagatgctgatggtaagataatggcgagtgtagaccgaaattgggttggtttaggaagagaaatgtttaccgatactggtgtttatgttgttagatttgattcgcagagatgctttgataatatttatcctactgagatgctaagttctcaagtactaactttggatcaaagggccgtgttattagcaaacgctgtgtccatcgatttcgattatttttcgagacattccagacaaactggaggtttcctttcttttggcggtggctatgatgagtag

SEQ ID NO: 80419 - DNA, 291 bp, Saccharomyces pastorianus
atgaacgtttttctaggtttcgagcaggctaataggtatgccataatggatgtgaacggaaacaaaatagcatcaatgatggaaagagatttttctataacaaaggccataatgcggcagttttatcgtctacatcgtccttttttggtagatgtctttgataattggggaaatgtaataatgacgattaaaaggcccttttcgttcatcaattctcatataaagactatcatacctccttccgcgtatgttgataatggcagtgactccactcactatcacgacgggtaa

SEQ ID NO: 80420 - DNA, 321 bp, Saccharomyces pastorianus
atgaccaaagaaggcaaatgcttaccgattgaccaaagtggtaggagaagcagcaataccaccactacgagatattttatattatggaagagcttagacagttgggcttctttgatactacagtggttcgaagactctggaaaactgaatcaagtcattacgttatacgaattgagtgaaggtgatgaaacagtcaattgggagttccatagaatgcccgaaagcttgctctattattgtttgaagcccctatgcgatagaaatagggccacaatgctgaaagatgaaaatgataaagtaattgccattaaggttgtttaa

SEQ ID NO: 80421 - DNA, 213 bp, Saccharomyces pastorianus
atgggtaacgtaaagacggacgaaaatggtgtggccaagggctccttcaaggactctttgatcaagcttatcggtcctacctccgttgtaggcagaagcgtcgttatccacgccggccaagatgacttaggtaagggtgacactgaagaatctttgaagactggtaatgccggtccaagaccagcctgtggtgtcattggtctaaccaactaa

SEQ ID NO: 80422 - DNA, 213 bp, Saccharomyces pastorianus
atgtttgctgaagacaccgtgactatccgcaagctacaggccaacaagtacgtgttaggggtgctgatctgttcattatgcgcaagtgtaacgagtgaattcgcccaaagcgtggtttcgcggggacaaagggtgttcgatgtgaaggatattatttgtaatttctggggcagtctgcttggtgtgggcattgccttctaccaggaccgataa

SEQ ID NO: 80423 - DNA, 387 bp, Saccharomyces pastorianus
atgatcatgcgccacggtaagaaggaaaaggcacaaaccattctgtccagggccttatatctggtgtactgccagacccggcaggaccccatccaggctttggaaaagtcactcgacgaactagctccgctgatgatgaccaagacgttcaacacaggcgtggccaaggcttctgtcattcctgtgcctctgaacaagaggcaaagaaataggatcgcgtggaactggatcgtacaaagcgcaaaccaaagagtgtcgagcgacttcgccgtgcgcttgggagaagaactcactgccattgccaaaggcacttcgtctgcctttgaaaagagggaccagattcacaagacagccattgctcacagagcatatattcaattaaagtaa

SEQ ID NO: 80424 - DNA, 381 bp, Saccharomyces pastorianus
acttcagtgcctcccattgtgccaactgctctgcagttggttatcttggagcccgcctgcgaaccctgtaagaggtctactttggactggcccggtggagccagcgaggtctctggcaggtattcttttgcagagaactcttcccttagctcgttgatcgcttcaagccactcgtcgacccctttctctgccgatggttcgctagctggtgttcgtactgacgactggaagcgagcaacacatgtcccactttgccacaggagacgtggcctgactaacatatacctcctcgcacaatgcagcattatattcacctcagatccgtatctatctatttttcttctgaaaacgatagctgctgtcttttctgcacgtgtataa

SEQ ID NO: 80425 - DNA, 387 bp, Saccharomyces pastorianus
atgatgaacggtagaaacaacggtaagaaattaaaggctgttagaatcatcaagcacactttggacatcatcaatgtcttgactgaccaaaacccaatccaagttgttgttgacgctatcaccaacactggtccaagagaagacaccaccagagtcggtggtggtggtgccgctagacgtcaagctgtcgatgtttctccattgagaagagttaaccaagctattgctttgttgaccattggtgccagagaagctgctttcagaaacatcaagaccattgctgaaactttggccgaagaattgatcaatgctgctaagggttcctctacttcttacgctatcaagaagaaggatgaattggaacgtgttgccaagtctaaccgttaa

SEQ ID NO: 80426 - DNA, 1371 bp, Saccharomyces pastorianus
atgtcaccggtagggagagtgccgaggataccatcggtgccgatgagtgctagagatgtccaaccaattttagaaagattgaatggcaggggttttcaaattgggcccggtagtaatataaaagattttggatcattcactggaccttcaagctctatcgataaagtccatttgcataatgagctaacttacaacatcaaggaaatgagtagtgtagaggttagtatccctggtatattcactgagggggagattattatcggagctcatagggattcgctcgcctcgagtagcgccggtgatgcaaatagtggcagcgctattcttttagaaattgcacgaggaatgagtaaattacttaagcatggttggaagccactgcgtcctatcaaactaataagttgggatggtgaacgatccggccttctgggatctacagattatgcagaagctcatgctgcgattctcaggagaagggccttggtatacctaaatctagataatgcagtctctgggacaaattttcactgtaaagccaacccacttttacaagacgtcatatacgaagctgctaagctcacggaatttaatgggcacgaagactggtcattgttcgaccattggaaatacacttctaatgccactatttctctacttgatgggttgtctagttacacttcatttcagtaccatcttggagtgcccgctgcacattttcagtttaatgccaatgatacttcaggcgcagtctatcatagtaactccgtattcgatagcccaacttggttggaaaaatttaccaattctgactacaagttacacaacaccatggccatgtttgtaggtttgacaacgctgatgctgagtgaaaacgaactggcaagattcagtacacatgtttacctgaagaaaatatataactggtatatcgcatggcactctaatctatcttcagcatttccccaggacgatgaagtgaacagcttagcaaaaagggttctggacttattaaaagttgccacacaggaagatagcatccaatttgaccaacaaaatgatattctctataaagagtgtagggaagctttacctgtttgggctttttacaaaaaaatcaagagctatattaaactgcaacgatccaatagcaaatcaaagcaaattgatcaattatttattacacacagaggactgaaagacagggaatggatgaagtactctcttttagcacctagtaagtttgagggatctgtcggggaagttttgcccggccttcacgaaggattggctgatattgatagaaacgaggtcattcagtggttaaccattttgctaagccaattcagcaacgttcgctatttacttcaataa

SEQ ID NO: 80427 - DNA, 1077 bp, Saccharomyces pastorianus
atgagaatgatacagagagagagagagagagagaaagaggaaggtcaattaaaggagagaactgttgttaatatggcagaccctgatgacaatgaggccgaagccactggattacaacaatatagtggtgagaccactcgcgatgacaatgaagaaagcatgaatgattctttcactttaacatccaggaatagaggcagaagtaatacaatatctagtattgttagtggttatgaaataatgaaagaacatatggacaaggaaaagtttatgtacttgattctagcgagtctccttttgtacatgggatttgttgccgcatttgctcccaggacgtctttatcaagagactttcggcggtttcactcttccagattgacgaatgcagaggtttataggatatacttgaactccttgcaacaggaaaatagagcgaaagaacatgtatacaagtatgctgggtacatgagcaacggagcaagtgattcgtcaacgtttaaatataccttggacgagtttctagatatggggtacaaacccaaagttgaaaaatattacccatggataggtgaaccagtagacactaacgtagctcttttagaaaatggtaaagtggtctacgaagcaagcatgatcgaggatagagttaaaggtgatcctgcttctcacgctaggaaaaggcaaaagggtttccatcaatattcaaaaaatggaagtgtaactgctcgatacgtgttttgcaattatggtagcatcagtgactacaagctacttttgaagaaaaacattgatattgaagataaaatccacatcgtacgatcgggtaaaatattacctggattaaaggtaaagaatgcagaactttatggcgcttccagtgtcattatatatacagacccatttgacgatggtaaagttactgaggaaaatgggtttttacactatccttatggaccagcaagaaacccaagttatattaagagagattctgtaactatttcagtgacactccaggagatccgacaactccagggtatccctccaaggattccgacactgaacatatgtcaccggtag

SEQ ID NO: 80428 - DNA, 192 bp, Saccharomyces pastorianus
atggacccgaataccgatataaatgagacaattcaactaattgtagcggcaagtctatcctccaaatgtttatatttgggtgttcaaatattaggtgatgcgccaatttggcctataatattatcgttcgctcatggtttgcaatcaagagctatctatagtgttacgaaaaaaagaaacactagaatataa

SEQ ID NO: 80429 - DNA, 873 bp, Saccharomyces pastorianus
atgtctaatggtaacgaggcatatgaaaattgtttgagatttctttctacaggcgatagttttttttacgggaatgctagggtttcgttaagtacatgtctatcattgttgatatctatccatgagaaaatacttattgaaagaaataacgcaaggatcagtaataacaacaccaatagcaataacattgagttagacgatattgagtggaagatgacttccagacaacggatcgatacaatgttaaaatactgggaaaacctttatttgaaaaatggtggcatcttgacacctaccgagaatagcatgtcaacaataaacgccaatccagcaatgaggttaataattccggtatatttgtttgccaaaatgagacggtgtttggacctggcacatgttattgagaaaatctggttgaaagattggtccaatatgaataaagctttggaggaagtttgctatgacatgggttcattgagggaagctaccgagtatgcactgaatatggtggatgcgtggacttcattttttacgtacattaaacggggcaagcgcagaattttcaatactcctgtatttgcgaccacatgtatgttcactgcagtattagtgatttcggaatacatgaaatgtgtagaggattgggcacgcgggtacaatgccaacaaccctaactcagcattattggatttttcggaccgtgtcttatggctaaaagcagaaaggattttgagaagattacaaatgaacttgataccgaaggagtgtgatgtgttgaaatcgtacactgatttcttaagatggcaggacaaggatgccctaaatttgtcagcactaaatgaagaacaagcacaaagggccatggacccgaat

SEQ ID NO: 80430 - DNA, 1539 bp, Saccharomyces pastorianus
atgagagatcgaattgaaagcatgttcttggaatcgtggagagactattccaagcatggctggggatacgatgtgtatggacctattgagcacacttcccataatatgcctcgtggcaaccagccgttaggctggattatcgtagattcagtggataccttgatgttaatgtataactcctccacacgatacaaaagtgagttcgaggcagaaattcagagatcggagcattggataaacgatgttttggattttgatattgatgccgaagtgaatgtttttgaaactactattagaatgctaggtggtttattatccgcatatcatctatctgatcttttagaagtgggtaataagactgtctacttgaacaaagcaatagatttgggggataggcttgctttggcgttcttatccactcagaccggaattccatactcaagtataaaccttcatagtggccaagcggttaagaaccatgcagatgggggggcatcttctaccgcagaattcactacgctacaaatggaattcaaatatctggcgtatttgacaggaaatcgtacttattgggagttggtggagcgtgtttacgagccattatacaaaaataacgatcttctaaatacctacgatggattggttccaatttatacatttccagatactgggaagtttggtgcttcgactatccggttcggatcaagaggtgattctttttatgagtatttactaaaacaatatttattgacgcacgaaacactttattatgacctgtacagaaaatccatggaaggtatgaaaaagcatttattagcacaatccaaaccctcttctctgtggtacattggggaaagagaacaaggtctacatggacaactttctcctaagatggaccacctcgtgtgctttatggggggattgttagcatcaggctctactgagggcctttctattcatgaagcccgtagacgtccgtttttctctctttcccttgaaagaaaaagtgactgggatttggctaaagggataactgacacatgttatcaaatgtacaagcagtcttcctcggggcttgcgcctgaaatcgttgtcttcaatgatggaaacataaaacaagatggttggtggcggtcgtctgtgggtgacttttttgttaaaccactcgataggcacaacctacaaagaccagaaacggtggaatcgattatgttcatgtatcatttatctcatgatcacaaatatcgtgaatggggggcggaaatcgcaactagcttctttgaaaatacctgtgttgattgtaatgacccaaaattaaggcgattcaccagtttaagtgattgtatcacgttacctacaaagaaatctaacaatatggaaagtttctggttggcagagactttaaagtatttatatatattgtttttagacgagtttgatttgaccaaagttgttttcaacacagaagctcatccttttccagtattagacgaagaaatattaaaatcgcagtctctgaccacaggttggtcgttgtag

SEQ ID NO: 80431 - DNA, 807 bp, Saccharomyces pastorianus
atgggtgtcgaaggcttcaagcaaaaagtggaggaatactggggtaagaaattcgagcctgagagaccatttgagtttaaatctaatattgattactttggatggattaaagatgaaactgggttaaaccactttaccgcatttattgaaaatggtagggttgaagatacaccagatttgcctcaaaagacaggtattagaagggttgctgaatacatgcttaagactaattctggtcatttcagattgactggtaatcaacatttggttatctctaatattacagatgaacatgttgctggaataaaatctattttaaagacctataaattggataacaccgatttcagcggtttgagattatcttcatcttcctgtgttggtttgccaacatgtggtttagcgtttgccgaatctgaacgtttcctacctgacattattactcagttggaagattgtttagaagagtatggtttacgccatgattccattattatgagaatgactggttgccctaacggttgttctcgtccatggctaggtgaattagctcttgttggtaaagctccacatacttataacttgatgcttggtggtggttacctcggccaaaggctaaacaaattgtataaggccaatgtgaaggatgaggaaattgtcgactacatcaaaccattgtttaaaaggtatgctttagaaagagaagaaggggaacactttggtgatttctgtataagagtaggtatcattaaaccaaccaccgagggtaaatacttccatgaagatgtgtctgaagatgcctattaa

SEQ ID NO: 80432 - DNA, 3393 bp, Saccharomyces pastorianus
atgactgcttctgacctcttgacgctcccacaattgttggcgcaatattcctctagtgctccccaaaataaagtgttctacactactagcacaaaaaatagtcattcatccttcaaagggctagaatctgttgccacagatgctactcatctattgaacaatcaagatccattgaataccatcaaagatcaactctctaaggacattttaactaccgtttttacagatgaaactactttggtcaaatccatccaccatctatattctcttcctaataaacttccattggtgattacagtggatttgaatttgcaagattattccgcaattcctgcgttaaaggatctttctttccccatcttaatatcttctgatttgcaaactgcaatttcaaacgcggactcttcttataagattgctacaagttctctgaccccagttttccattttcttaacttggagaaaattggcacgagtacagctattgaacaagacatcgacattcctaccttggagattgctaacgaagagactaaagtagcattgtcagaagctactgattcattgacaaattttgaactggttaaaggtaaagagtcaattaccactgtcattgttaacctgtcaccatatgacgcggaattcagtagcgtattgccttcaaacgtaggattgatcaagattagagtatacagaccatggaatttttccaagttcttggaaatactgccatcttctgttaccaaaatcgccgttttacagggtgtctctaagaaatcgcaatcaaacgaatttcaaccatttcttttggacttctttggcaattttaatgaattagtttctaggaacatcgagcaggtagtgttgactaatattggtaatgtgaatgattatggcaacgttatcaacaccgtcatatcgaatattaacaagaaggaaccagataataacttatttttaggtgaatccaatgaaaaggctgaggaacaagctgaagttactcaacttatttcttctgtcaaaaaagttgtgaacttagaagacgcctatatcaaagtgctaaaacagttattttcatcaaatctacaaattttgaatcaattttccagtgagacaattgaaccaagtaatccagaatttggttttggacactttttaaaacaagaagcccagcgtgaagaattgatcagcttagcaaaaacctctcttgatccaagtctttacttgtccgaggatgcaaataaaattgttcaactattatctaaatggttgtcattcaatggacgcgatcttgacgaagctcaattacaagaggccaatgcgacaggtttggaaatatttcagttattacaatctaatcaagattcctctactgtcttaaaattcttaaagatagctccaacaagcgattcttttattttcaaatcaagctggctaattggctccgatgcctggtcttatgatttgggtcactcaggtattcaacaggttttatcctcccgtaaaaacattaatgttttattgattgattcagagccatatgaccatagaaagcaaaaccaggatagaaagaaagatgttggtttgtacgccatgaattattacagtgcctatgttgcctctgtagcagtatatgcttcttacacccaactattgactgcaataatagaggcatctaaatacaatggtccttctattgtcttggcttatttgccgtataattccgaaaatgatactccattagaagtcttaaaggaaaccaaaaacgccgttgaatctggttactggccattgtataggtttaatcctgtttatgacgatccatcaacagataaggaggcatttagcttggattcttcggttatcagaaaacaattacaggacttcttagaccgtgagaataagcttaccctattaaccagaaaagatccatctttgtcaagaaatctaaagcaatctgctggtgatgcgttgacaaggaaacaagaaaaaagaagcaaggctgccttcgatcagttattggagggtttgtccggcccaccgctacacgtctattatgcttctgacggtggtaatgctgcaaacttggcaaagagactagcagcaagggcatctgcaagaggtttaaaggctactgttctgtccatggatgacattattttggaagaattacctggtgaagagaatgtagttttcattacttccacggctgggcaaggtgaattcccccaagacggtaagtctttctgggaagctctgaaaaatgacaccgacttggatttagctagtttgaatgttgctgtttttggtctcggtgattctgagtattggccacgtaaagaagataaacattattttaacaagccttcacaggatttatttaagcgcttggaattattgagtgccaaagccctaattcccttgggactgggtgatgatcaagatgctgatggtttccaaactgcttattctgagtgggaacctaaattatgggaagctcttggtgtttccggcgctgctgttgatgatgagccaaaacctgttacaaacgaggatattaagagagaatctaatttcttgagaggtactatcagtgagaacttaaaggatacttcttcaggtggtgttactcacgctaatgaacaattaatgaaatttcacggtatttacacccaagacgatcgtgacattagagaaatacgtaagtcacaaggcttagagccatactatatgtttatggcaagagctcgtttaccaggtggtaagaccactccacaacaatggcttgctctggatcacttatctgatacttcaggcaatggtaccctgaaattaacaacaagggcaaccttccagattcatggtgtgctaaagaagaacttgaaacacacattgagaggaatgaatgcagttcttatggatacattagctgctgcaggtgacgtgaacagaaatgtcatggtttctgctctaccaaccaatgccaaggttcaccaacaaatcgctgatatgggaaaattgatttctgatcatttcttaccaaagactacggcctaccacgaagtttggctggagggcccagaagaacaggacgatgatccatcctggccatctatttttgaaaacagaaaagatggtccaagaaaaaagaagactctagttagcggtaacgctttggtcgatattgaaccaatttacggtccaacttatctgccaagaaagtttaaattcaacatcgccgttcctccatataacgatgtggatgtattatctatcgatgtcggtttagttgctatagtaacccagaaactcaaatcgtggagggttataatgtttttgttggtggtggtatgggtaccactcataacaacaagaaaacttacccaagattag

SEQ ID NO: 80433 - DNA, 153 bp, Saccharomyces pastorianus
atgggtaccactcataacaacaagaaaacttacccaagattagggtcatgcttaggttttgttaaaactgaagacattattccaccacttgaaggtatcgttattgtccaaagagatcacggtgaccgtaaagacgtaagcatgctcgtttaa

SEQ ID NO: 80434 - DNA, 831 bp, Saccharomyces pastorianus
atggatgacgaagttaagaagcaatcctctaagatatatgacagttctatcatgtcgcttccagatggaagatggactaaagaagagcttcgctcagattctgatttctcgatagaatgtcttaactgtaagcaaaaaattataagcaaagataactgtcaagttttgaatgatatgccttcagagttttggttcgagttaatggattattggcattgccacaaacccgatgttaaggaagacaagtcttcctacacaagatttgaaacgctaaaaccatctaaaaacgaaattttaattggaagctcttattttcaaggcactcctgcgacttttgaaaatgtagcgactacaaagggaaatgataatgttttatgcataaagtgctcagcagtgttaggccaagtaactgctggttcgctttataaactacacaaatggaaactgcagttaatacgcagtggaaacacatacaaatttcctccagaatgtgacattacaatttctttaataaacgtagttaaggcaaactcttgtcgttacgtactagtaaaatgtaaaacggaatcattgctagtttggatattttccgttgacattggagtcacattgacgggaaagaaaagcttcaagagagcgatgaagttgctttacacaaacagcgttaccacaataaatcgatgtctcaatcgacaagtcgtcgaggaattagatttccaagaaacatcgtttaatgctttttacagctcccttcaacatactaatgcacttttaccctcaagcatgaaaaaaattggtgaatggaccattagctatacatcactaatctaa

SEQ ID NO: 80435 - DNA, 327 bp, Saccharomyces pastorianus
atggttcaatatgtggtagaatggttaccaaggatacagagcatttcagtggtagtagaaggttggaagcaggtggagataaagaacttgaaggagacactcatgagcatatctggtgatgaagaacaagttgaagatattttacttccagtagaagttgaagaaaaagtagacacttcttacaagttcaaaaacagaggtaaagacttagaatggatgacgaagttaagaagcaatcctctaagatatatgacagttctatcatgtcgcttccagatggaagatggactaaagaagagcttcgctcagattctgatttctcgatag

SEQ ID NO: 80436 - DNA, 654 bp, Saccharomyces pastorianus
atggaaactcaaaaatctatgtttgaacataacaataaactatcatcagagcatccatttgcctctgaaccctacagttggcccggtagtttaagtggtgtttcgttctggaccaacggtgacgaaaagaagcaaatatatttcattggtaacatcattgggtggtggttccaagtcatatcattggctgtttttgttggcattatcgtggccgatttaattactagacatcgtggctattatgccctaaacaagatgaccagagaaaagctgtatggcccattgatgtttttcttcgtctcctggtgctgtcattattttccattctttttaatggcgcgtcaaaagtttttgcatcattacttaccagctcatttaatcgcgtgcttattctcaggagcactatgggaagtaattttcagtgattgcaaatcattggatttggagaaagacgaggatatttcaggtgcatcatatgaacggaaccctaaggtctacgttaaaccctataccgtcttcttggtgtgtgtctcctgtgctgttgcgtggttttttgtatacttttcaccactagtgtatggagatgtcagcttgtcaccatcggaagttgtttctagagagtggtttgacatagaattaaatttctccaagtaa

SEQ ID NO: 80437 - DNA, 1017 bp, Saccharomyces pastorianus
atgtattgttacgttcgtttctacaagtgccaattgcgtcaaccttttacatggagttggtatatttggttacacgccactggtttgtctttatccttcgtgatttccacaaaatatgttggtgttatgacatattccgctattggttttgctgttgtggtcaacttatggcaattactggacatcaaggcgggtttgtccttgaggcagttcatgagacattttagtaaaaggctgaatggtttagttttgattccatttgtgatttacttgttttggttctgggttcatttcaccgttttgaatacttcaggtcctggcgacgcatttatgtctgctgaatttcaagaaacacttaaggactctcccttaagtgttgactctaaaaccgtcaattattttgatattatcactatcaaacatcaagatactgacgcattcttacattctcacttggcacgttacccacaacggtatgaagatggtcgtatctcatccgctggtcaacaagttactggttacacgcatcctgacttcaacaatcaatgggaagtgttaccaccccatggcagtgatgtcggtaaaggacaagctgttctattgaaccagcatataagattgagacatgtagccaccgatacctacttgttagcccatgatgtcgcttccccattttaccctaccaatgaagaaatcactacagtaactttagaagaaggtgatggggagttatatcctgaaacactttttgcattccaaccactgaaaaaatcagatgaaggtcacgttttaaagagtaaaacggtttctttccgtcttttccacgttgatacctccgtagctttgtggactcacaacgacgagttgttaccggattgggggtccaacaacaagaagttaatggtaacaaaaaagttattgatccttcaaataactgggttgttgaagaaattgttaacctggacgaggttcggaaggtatatgttccgaaggttgttaagccattaccattcttga

SEQ ID NO: 80438 - DNA, 591 bp, Saccharomyces pastorianus
atgcagcgtcacgttaaagttgacggtaaggttagaaccgacactacctacccagctggtttcatggatgtcatcactctagatgccaccaatgaaaacttcagattggtctacgatgtcaagggtagattcgctgtccaccgtatcaccgatgaagaagcttcttacaagttgggtaaggtcaagaaggttcaattaggtaagaagggtgttccatacgttgttacccacgatggtagaactatcagatacccagacccaaacatcaaggtcaatgacactgttaagatcgacttggcctctggtaagattactgatttcatcaagttcgatgccggtaagttggtttacgttactggtggtcgtaacttgggtcgtatcggtactatcgttcacaaggaaagacacgatggtggtttcgatttagttcacatcaaggactccttggacaacactttcgtcactagattgaacaacgtcttcgtcatcggtgaacaaggtaagccttacatttctttgccaaagggtaagggtatcaagttgtctattgctgaagaacgtgacagaagaagagctcaacaaggtttataa

SEQ ID NO: 80439 - DNA, 363 bp, Saccharomyces pastorianus
atgaccaatacaagaatgacagatactgaggtatttgaaaggagataccccgttctgttgaaagagttctcgatcagaagaggttcaggaggcaaaggtaaatatactggcggaaatggcgtagtaagggatgttcaatttcggaaggctgtaacagcatctatattatcagaacgtcgtgtcattggccctcatggtataaagggaggacaagacggtagtagaggtgagaatttatgggtaagacatagcacaggcgcattaatcaatgtcggcggtaaaaatacgatttacgctcaacccggtgatcgattcatcattaaaacccctggtggtgggggatttggacaatacaaggattaa

SEQ ID NO: 80440 - DNA, 3336 bp, Saccharomyces pastorianus
atgcagaaaggaaacataagaattgccatcgataagggtggaactttcactgattgtgtggggaatattggtacaggtaaacaagaacatgatactgtcatcaagctcttgtcggtggatcccaaaaactatccagatgctccccttgaaggcataagacgtctcttggaggtgcttgaacacaagacaattcctcgcggtattcctctagacatctctaatgtgagaagtttaagaatggggacaaccctagctacaaactgcgctctagaaagaaatggtgaacgttgtgccttcattactacgaaaggctttaaggattcattgctgattggagaccaaaccaggccagatatcttcaacttaaatataaaaaaggtagtgccattatatgacactgtagttgaaatagatgagagagttactttagaagatttctcggaagacccttattttaccaaatcgtctcctaatgaacaagaaggtatcctggaaggtaatagtggcgaaatggtaagggtcataaagaagccagatgaatcaagcgtaagatctattctgaaagtgctttatgctagcggaatcaagtctattgcgatagcatttttacactcatacacttttccagaccatgaacgaattgttggtaatattgccagagaaattgggttctctcatgtttcattatcatctgaagtctccccaatgataaaatttttaccgagggctcacagttctgtcgcagatgcctaccttactccggtaattaaaaagtacttgaatagcatttctgcaggtctgagccacgcagaagatacccacattcaattcatgcagtctgatggtggtttagtggatgggggaaaattttccggtttgaaatctattttatctggtcctgcaggtggcgtaataggttattctagtacatgctatgataaaaataataacatacccttaataggctttgacatgggaggaacatctactgatgtcagtaggtacggtgatgggaggttagaacatgtttttgaaaccgttaccgcagggatcatcatacaatctcctcaacttgacatccatactgttgctgctggaggaagttctattttgtcatggaaaaacgggttattcagagtaggccctgattcagcagctgctgatccaggccctgcagcctacagaaagggcgggcctttgactattacagacgccaacctctttttaggacgtttggttcctgagttcttccccaaaatttttgggcccaatgaggatgaatcacttgacttagaaaccactactttgaaattcagagaattaacagatgtcatcaataaggatctgaattcaaatctaaccatggaagaggttgcctatggatttatcaaagtagctaacgaatgcatggcaagacctgtgagggccattacagaagcaaaaggacatgtagtatctcagcatcggttagtttcctttggcggggctggcgggcaacacgccatagcggttgcagattcattgggcattgacactgttttaattcatagatattcttctatcttgtccgcttatggcattttcttagcagatgttattgaagaaaaccaagagccttgctcttttatcttgggtgagccagagaccatcttgaaagtgaaaaaaagattcttagaactttctaaaaattcaatcaaaaaccttttatctcagtcgttttctcgggaggacatagtcttggaaagatatttaaatctcagatatgaaggtactgaaaccagtttgatgatattacaaaaatatgatgaccaatggaattttagggaatggttctctgaagctcataaaaaagagttcggattctcattcgatgacaaacgaattataattgatgatataaggataagagcaattgggaaatcaggcgttagaaaagaaaaaacggttgatgagcaattgattgaaatttcccatttcaagaaagccgacgtgtcaaaggatgctagttttacccagaaagcatattttgacaacaaatgggtcgacactgcggtcttcaaaattgatgatcttcctgccggaacaattatcgagggcccagccatattggctgacggtacccaaacaaatattattctaccaaacagccaagcaacaattttaaactctcatatatttatcaagatcaaccaaaaggctgtgaagacattatctaaaagcggatatgaacttgatatagatccaatcttattgtctattttcagtcataggtttatggatatcgcccttcaaatgggtactcaattgaggaaaacatctgtttcaactaacgtcaaagagagattagatttttcatgtgcactattcgactctaaaggaaacttagtggctaacgctcctcatgtacctgttcacttagggtcaatgtcaacctgcatatcagcacaggcgaagttatgggaaggcaaattaaagcctggtgatgttttaatcacaaaccatccggatattggtggtactcatttaccagacataacagtaataactccttctttctcttcaactggcgaattgatattttatgtggcttcaagagcccatcatgcagatattggaggtattctacccggttcagtgcctccaaattccaaagagttgtacgaagaaggaaccgcaatttattccgaattggttgtcaaagagggaattttccaggaagaattaatttacaagcttttcgtagaagatccaggcaaatacccaggctgctcaggttcaagaagatttagtgataacataagcgatttaaaagcgcaagtcgcagctaacacaaaagggatacagttaattgggtcattaactaaggaatatgatctggctacaatattgaaatacatggctgcaattcagacaaatgcatctgaatccataaaaaaaatgcttgcaaaaatggttgaacattttggcacaacgaagttttctggcgaagatcgcttagatgatggaagcttaattaaactacaagttatcataagacctgaaaaggaggagtatatttttaatttcgatggcacttctccccaagtttatggtaatttaaatgcaccagaggctattactaattctgcgattctttattgtctacggtgtctagtaggcgaagatattcctttaaatcaaggttgtttaaaacccttaacaataaaaattcctgctggttccctcttgagcccccgatccggtgctgctgttgtcggaggcaatgtattaacttcccaaagagtgacagatgtaatcttaaaaacatttaacgtcatggcagattctcataggtga

SEQ ID NO: 80441 - DNA, 75 bp, Saccharomyces pastorianus
atgattctcgaagtttgcgcagatgacaaggaaggagaggatgttgaagttcctttcattaccattcatctatga

SEQ ID NO: 80442 - DNA, 150 bp, Saccharomyces pastorianus
atggttataacgcatagtgaacaaatgatgaggtcttgtaactcgattgcagttcttaaagatggtaaagtggttgagcgaggtaacttcgacactttatataataatcgcggggaattattccaaattgtttccaaccaaagcagttaa

SEQ ID NO: 80443 - DNA, 3207 bp, Saccharomyces pastorianus
  modified_base (990)..(1015): a, c, g, t, unknown, or other
atgcttcagcgaatatcaactaaactgcacaggcggttcttatctggcctgctgcgtgtcaagcactacccattaaggcggattctccttccactgattctactgcagatcatcattataacgtttatctggtcaaattcaccgcagcgtaacggacttgggcgggacgctgattaccttctaccaaattacaacgaacttgacagtgatgatgattcctggtatagcatcctgacttcgtctttcaaaaacgatcgcaagatccagttcgctaagacactatacgaaaatttaaaattcggcaccaaccctaaatgggtcaatgaatatactctgcaaaatgacctgctctcggtcaaaatgggccctcgaaagggcagtaagctcgaatccgtggatgagttgaagttttacgacttcgaccctcgtctcacgtggtccgttgtgctgaaccatttgcaaaataatgacgcagatcagccagaaaagttacccttttcatggtacgactggacaaccttccacgagctgaataagctgatttccatagataaaactgttctgccctgcaattttcttttccaatccgctttcgacaaagagtctctagaggccattgagacagagctcggcgaacctttgttcctatacgaaagaccaaaatacgcgcagaaactgtggtacaaggccgctagaaaccaggacagaatcaaagactcaaaggaactaaaaaagcattgttccaagctattcactccagacgggcatggctctcctaagggtttaaggtttaatacgcaattccaaataaaggagctgtatgataaagttagacccgaagtttaccaattgcaggcaagaaactacattttgactacacagtcgcatccactatccatttccatcatcgaatcagataactccacgtatcaagtccccttgcaaactgaaaaatcaaaaaacttggtgcaatccggcctgttgcaggannnnnnnnnnnnnnnnnnnnnnnnnnccaacaagagaagaaagaaaaataaacaggacgtagaattcaaccataacaggcttttctatgaattcgtcaataacgaccaagttaactccctatacaaactggaaattgaagaaactgataaattcacttttgataaagatttggtttatttatccccttcggatttcaagttcgatgcctccaaaaaaattgaagagttagaggaacagaagaaactctatccggacaaattttccgctcataatgagaattatctgaacagtttgaagaattccgtaaagacaagccctgcattgcaaagaaagttcttctatgaggctggtgccgtgaagcaatataaaggtatggggttacatcgtgacaagaggttcttcaatggtgatacattaatcaatgataaacaagaataccaggctagattgaattcaatgatcagaacattccaaaagtttactaaagccaacggcatcatatcttggttgtctcacggaacgctgtacggctatctttacaatggaatggctttcccctgggataacgatttcgacttgcaaatgcccattaagcatttacaattgctcagtcaatacttcaaccaatctcttatattggaagacccaagacagggtaatggacgttatttcctagacgtcagcgactccttgacagtaagaattaacggtaacggtaaaaacaatatcgatgcaagattcattgacgtcgacaccggcctttacattgatattaccggtctagctagcacttctgcccctagtagggattacttgaactcttatattgaagagcggttgcaagaggaacatttggatatcaataatatccctgaatcgaacggtgagaccgctactttgcccgacaaagtagatgatgggttagtcaatatggctacactaaacatcactgagctacgtgattacattaccagcgacgaaaataaaaatcataaaagagtccccactgatactgatttgaaagatcttttgaaaaaggaactggaagagttaccaaagtctaagaccattgaaaacaagttgaatcctaaacaaagatattttctcaacgaaaaacttaaactttacaattgtagaaacaaccattttaactcgttcgaggaactatctcccttaatcaatactgttttccatggtgtgccagcgttgattcctcacagacatacctactgcttgcacaatgaatatcatgtacctgatagatatgcatttgatgcttacaaaaatactgcttatttgcccgaatttagattttggttcgactatgacgggttaaagaaatgcagtaatattaattcatggtatccaaacatccccagtattaattcatggaatccgaacctcttgaaagaaatatcgtctacgaaatttgagtcgaaactttttgattccaacaaagtctctgaatactctttcaaaaacctatccatggatgatgttcgcttaatttataaaaatattccaaaagctggctttatcgaggtatttactaacttgtacaattccttcaatgtcactgcatataggcaaaaggaattggaaattcaatactgccaaaacctgacatttattgaaaaaaagaaattattacatcaattgcgcattaatgttgctcctaagttaagctcccctgcaaaggacccatttctttttggttatgaaaaagctatgtggaaggatttatcaaaatctatgaaccagactacattagatcaagttaccaagattgttcatgaagaatatgtcggaaaaattattgatctgtccgaaagtttgaaatacaggaattttacacttttcaacattacttttgatgaaactggaacaactctagatgataacacagaagattatactcctgctaatactgttgaagtaaatcctgtggattttaaatcaaatttaaactttagtagcaactcctttttggatttaaattcatatggtttagacctttttgcgccaactttatccgacgttaacagaaagggtattcaaatgtttgataaggaccctattattgtatacgaggactatgcttatgccaagttacttgaagaaagaaagcggagggagaagaagaagaaggaggaagaggagaagaagaagaaggaagaagaggaaaagaagaagaaggaagaagaagaaaagatatag

SEQ ID NO: 80444 - DNA, 702 bp, Saccharomyces pastorianus
atgaacaatatacaaaagtctctggcacagtttgactgcgttagaccaggccagggcatttctgaagctttacgtatcactagagaagttattttggcaatgagaatctactacatcggtgtatttcgctctggaggagaaaaggctctagagttgagtgaagttaaagacttgtcacaatttggtttctttgaaaggtctagtgttggccagtttatgactttttttgctgaaacggtcgcttctagaactggtgcaggacaaagacaaagtatagaagaaggcaactatattggccacgtttatgccaggagtgagggcatatgtggtgttttgatcaccgacaaagaatatcctgtcagaccagcatacacactattaaacaaaatattggatgaatatttagtcgcacatcctaaggaagagtgggcagatgtgactgagaccaatgatgcattgaaaatgaagcaactggacacttacattagcaaatatcaagatccttcacaggctgacgctatcatgaaagttcaacaagaactggatgagacgaaaatcgttttgcacaaaacgattgagaatgttttacaaagaggtgaaaagttggataatttggtggacaaatcggagtcattaacggcaagttccaaaatgttttataagcaagctaaaaaatccaattcgtgttgcattatcatgtag

SEQ ID NO: 80445 - DNA, 438 bp, Saccharomyces pastorianus
atgaaattagatagagatagctcagggtctattgataaaaatgaatttatgagcattcctggcgtttcgtcaaaccctcttgctggacgtataatggaggttttcgatgctgataatagtggggacgtggattttcaagagttcatcacaggattatccattttcagtgggcgtgggtccaaggacgaaaagttaagattcgccttcaaaatctacgacattgacaaggacggtttcatatccaatggtgagttgttcatcgtgttgaagattatggtaggttctaatctggacgatgaacagctgcaacagatagtagataggacgatagtggaaaacgatagcgacggcgacggacgtttaagtttcgaggagtttaagaatgctatcgaaaccacagaagtggccaagagtctgacattgcaatacgatgtgtga

SEQ ID NO: 80446 - DNA, 1491 bp, Saccharomyces pastorianus
atgatgttgctactgcatttgtcattaaatatacttggggcgcagctggcttggtactatgctcgattccaatatttttcaaacaacaaacctagtgaagacaccttacagcttaaggaacccgggaatgatatgacggctgatttcatcacaaatagaagattattagtcactgcatctagctctatcggaagatttgtggaactgaagagaaatatacaacaattacgcggtatcagattgagattgaacaagttcaatgatttgttggatgctaataaaggtgatgacgacaaagaaccaagagatgaaaggtgtatagtggaatatgatgattcaaggataaagtttgaaaatattcctttaataacacctgccaatcaagttctagtaccggagctaagttttgatctgaagcatggaaatcatctactaattattgggcccaacggttgcggtaaatcttcattatttcgtattctaggcgggctttggccgataagggcgactcccaataaaaatcatcaatccaagttaattatgccgcgtagaactgtggatagagattgcgcaatattttatttaccccaaaggccatatatgggcaataggtcgacattcagggaacagattatttatccagacagtattgaacaattcaaagaaagatatcacaatgattatgatctaggcgatgcagatttaataaaaatcctgcaattattagatttggaggatttagtcactgaaaatatgtcacttctgctggcgcaaaggacttccaaaaatgattcacagcagttgtcgacggaagacaatcagtcaccatgcgccattaaagttcgtgatgcattcagtatagtaagaaattggtccgaagaattaacaattggtgtccaacaaaggttagctatggcaaggatgtactatcataaacccaagtttgctgtgctcgacgaatgtacatctgcagtagccccagaaatggaacaaaggatgtacgaaaatgcgcaaaattttggtatctcgttaatatcagtttgccacaggacaagtttatggcattttcataactatctgttaaaatttgatggtaaaggcggataccaatttggaccgtttaacccgaaggaaaggttatgtaatgaagaaaaacttcttgaactaaatgccatcttggatcaacaggtgccactttgggagcggaagttgaaagatctgacaattgctaaagaatccaacatcattcgtaaatcagaaactaacctgaatctttttgaaaagatcgaagatccaaaaacgtccaaatctaatgcattgtttaatgcaaataaagggcagcgaatcacatcacctacagggcaggagattagtaagagattaccactgttttcccaaccatctagttcagcatcatcaaatttactaagaaacaataaaagcttgaacaaaaaagttaaaacaaaaaaggaagaaggaaaagagaggtaa

SEQ ID NO: 80447 - DNA, 1167 bp, Saccharomyces pastorianus
atgatctcaatagcttctgcattttatcagaagcatagagtaaatttactgcgttcttcatacataatattgttgctagccacgctttacaattcaaattccagttctagtaacaacaaaactgataagaaggattctgagtcaacggttttagaaaataagaaaattgaagagggaaaagaaaccgcagtagatagagaggaagatgaaagtagcaaagaagagttaacgatagtctccaaacatagcacagattcagaagatggtgcaataataattgataaagaaagcaaaactaatcataaggggggagagcgaaaaggaaaggtagattttttgttcaaacttttgcttcatgataagaagtgcctcattttatttattacacaggctattcttctgaacatcagaacattgctgtctcttcgtgtggctactttagatggtcaattagtgtccacactggtaagagctcaatacgcaaacttcacaaagatattgttggggaaatggatgatccttggaattcccgccagttttattaattcactgatcagttacacgacaaaactttgtgctgtcactattaataggaaagtttcagactttctactctcaaagtatctatctaatcaccatactttctattccgtagcttctgctgaatctgtttcagaaattcaggataatttgacaaaagatatttacacattttcaatgaactcgtcattattactgaatcagctattaaagccaatgctggatttgatcctctgttcattcaaattattaacctcaaacactagtgttatgggtgaaggaactttggcactgggcttaattgtctacgcctccaattcattactaaaattgattcaaccgaatttcactaggttaactatggcaagcgcatctttggaaagttggttcagatctttacactcgaatctacattcaagcaatgaagaaattgcactgctaagagggcaaaagagggaactagaaaacgttgattattcattctaccgtttggtgctatttttaaacagagaaataaaggcaagagctatttatgatgttgctactgcatttgtcattaaatatacttggggcgcagctggcttggtactatgctcgattccaatatttttcaaacaacaaacctag

SEQ ID NO: 80448 - DNA, 1485 bp, Saccharomyces pastorianus
atggattacaatccaatttcctcattaacaccaggcaattcaccagaattcaacaaggcaagcttatctcagattagttttacaaatccattgaactatgggtctggcttaggtttttcctctaattcacaacctcgactaccattgttagacaggctatcgtcagtctctttatctaagagaccggagcgcccacaacaaagcttaccatcactaaggcatctgcaattattacccagtcctcttttacaagaaaacgcagcacgcttccctgatacatcaaaacgtacatctaattggaaaactgatcttacccattggtgtaaggatacaaactatcaagactatgttaaaatacgcgaagaagtggctcatttcaagccattaagtatacccaacttaactaataatcaaaataatgatagtttcaattacggcaaggaattggaatcgactaggtcgtccaaattccattccctgtctaaggaatcatttgatcgtaccaaactaattccttcgattctagaagctaaagatcaatttaaagatctttccaacaatgcatggagtattactcctcccgtcacaccgccaatgagtccaccaaccaatagagccatggagcgcacgacgcttagaggagtagaggcctctttttttgaggggaaatccagcaataacggttcaatattcaatccaattattagtgaaaaattggttcaagaagttaaacatcaaagacaattacgtggaaattcatttcccatgccaaatgccagtcacaaaaagacgaacagtttcaaagctttgcaaataaaaaaattgcttgcgaatagagatattctatcgaacaattccaaatctaatgtaaggaaaccatctaagaacaaaatctcaaagcaagcatcaaatgttttcggtaacactgcaagacaattggtgatgaaactcgacaacgctagttacagttctgtctctgcatcttcatctccatctccctccacaccgacgaaaagtggcaagatgagatcaagatcatcctcacctgtgcgtcccaaggcatacactccaagcccaaggtcacccaattatcatagatttgctctcgactctccccctcaaagccctcgaagatcatcaaattcaagcataacgaaaaagggaagtagaaggtccagtggctcatcacccactcgtcacaccacaagagtgtgcgtgtcgtgtcattcgagtgattcgccctgttggaggccatcgtggtcgccaagaaagcaagatcagctatgtaactcttgtggtcttcgatataaaaaaacacatacaagatgtttgaacgatttatgtcgtaagatccccacaaagggtgaaataaacattatgaaatccaatggaatagacaaagaatttgtccccgaacgcaactgcgaaattgaagggtaccgttgcttattttgtaattacataactgagacagtagagaattga

SEQ ID NO: 80449 - DNA, 309 bp, Saccharomyces pastorianus
atgtcaagcttatacatcaaaacaccactgcatgcattatctgctggtccggattctcatgcaaatagctcctattatgacaatcttttattgccttcattttccaatttatccagtaatatcagcaggaacaatatcacaaccgataacaatataattcagcaagtcctaggaagtattcgtttcattcgctcaatgtgtcgccaattctttccccaatatctttggctaacgaaatacttggaaaaaaatcaaatactgcaccagcatcgccacatcatatggattacaatccaatttcctcattaa

SEQ ID NO: 80450 - DNA, 3141 bp, Saccharomyces pastorianus
atgtgtcaaaatccaatgcaaaaaccagtgccttttgttccagttttggatcgtagattcgagatttttttcaaaaaagattcgttatggcaatctgagcacttggaagccgtcgtcaaccaagatgttcaaagaacatgtatcctacatggacctgttgcagcacaattcactaaagtcatcgatgaaccaattaagagcattatggatggtattcacgatggtcacatcaaaaagttactgcatcaatattacggtgacgatgagtcaaagattccagcagttgagtactttggtggtgaaagccctgtagacgtacaaagtcaagttgattcttcctctgtatctgaagactcagctgtttttaaggcaacatcctctactgatgaagaaagctggtttaaggctttggcgggatccgaaattaactggagacatgcaagtttcttatgttcctttatcactcaagataaaatgtttgtttctaacccaattagaaaagttttcaagccaagccaaggaatggttgttgagatttccaacggcaatacttcttcaaagactgttgtcactctttcagaacctgttcaaggtgaattgaaaccaactgttattttgaagttgttgaaagataacataatccaaatggaaatgattgagaacagaactatggatggtaagcccgtcagcttgccattgttgtacaacttcaacccagataatggttttgctccaatctctgaagttatggaggacagaaaccaaagaattaaggaaatgtactggaaattatggattgatgagcctttcaatttggactttgacccaagagatgtcattaagggcaaagatttcgagatcaccgctaaagaagtttatgactttacacacgctgttggaaacaattgtgaagacttcgtttctagacctgatagaacgatgttggccccaatggactttgctattgttgtcggatggagagccatcatcaaggccattttccctaatacggtcgatggtgacttattgaagttggttcatttgtctaacggctacaagatgattcctggcgctaagccactgcaagttggtgatgttgtttcaactactgctgttattgaatctgtcgtcaaccaacctacaggaaagattgtcgatgtggtaggtacattatcgagaaatggcaagcctgtcatggaagtcacctcctcattcttctacagaggcaactatactgactttgaaaacactttccaaaagactgttgaacctgtttatcaaatgcacatcaaaacttctaaagatatagctgtcttgcgctctaaggagtggttccaattggacgatgaagacttcgatctgttaaacaaaactttgactttcgaaactgaaactgaagttactttcaagaatgctaacatattctcttcagtgaaatgttttggcccaattaaagttgaattgccaaccaaagaaaccgtggagatcggtattgtcgattatgaagccggtgcctctcacggtaaccctgttgttgatttcttgaagagaaacggttccacattggaacaaaaggtcaatctagaaaatcccattccaattgcagtacttgattcgtacactccaagtaccaacgaaccatacgctagaatttctggtgatttgaatccaattcacgtttcacgtcattttgcctcttacgcaaacttgccaggtactatcacgcacggtatgttttcttctgcttccgtccgtgctttgattgaaaactgggctgctgacagtgtttcatccagggtacgtggctacacttgtcaatttgttgacatggttttgcctaacactgctttgaaaacatcgattcaacatgttggtatgatcaatggtagaaaattgataaagtttgaaactagaaatgaagatgacgttgtagttttgactggtgaagccgaaattgaacaacctgttactaccttcgttttcactggtcaaggttcacaagaacaaggtatgggtatggacttatacaaaacttctaaagctgctcaagatgtttggaatagagctgacaaccatttcaaggacacttatggtttctctatcttagacattgtcattaacaacccagctaacttaacaattcacttcggtggtgaaaagggtaagaggatcagagaaaactattctgctatgatctttgagactatcgtggatggaaaattgaagactgaaaaaattttcaaggaaattaatgagcacagtacttcttacacatttagatctgaaaagggtttattgtctgctactcaatttacacaaccagctttaactttgatggaaaaagctgctttcgaagacttgaaatctaaaggtttgatcccagccgatgctacttttgctggtcactctttaggtgagtatgctgctttggcctctttggctgatgttatgtctatcgaatctttagttgaagttgtgttctacagaggtatgactatgcaagttgctgttccaagagatgagctgggcagatccaactatggtatgattgccattaacccaggtagagtcgctgcatcattctctcaagaagctttgcaatatgttattgagagagttggtaagagaaccggctggttggttgaaatcgtcaactacaacgttgaaaaccaacaatatgttgcagctggtgatctaagagctttagacaccgttaccaatgttctaaacttcatcaaattacaaaaaattgatattattgaactacaaaagtccttatctttggaagaagttgaaggtcatttgtttgagatcattgacgaagcttccaagaaatctgctgtcaagcctcgcccacttaaattggagagaggttttgcttgtatcccattagttggtatttctgttcctttccattccacctacttgatgaatggtgttaaaccattcaagagtttcttgaagaagaatatcataaaagaaaatgtgaaggttgctagattggccggaaagtatattccaaacttgactgcaaaaccattccaggttactaaggaatatttccaggacgtttatgatttgactggctccgaacctatcaaggaaatcatcgacaactgggaaaagtatgaacaatcctaa

SEQ ID NO: 80451 - DNA, 2820 bp, Saccharomyces pastorianus
atggacgcttactccacaagaccattaaccctatctcacggttctttagagcacgtgcttctggtaccaaccgcttcatttttcattgcttcgcaattacaagaacaatttaataaaattttgcccgaacccactgaagggtttgctgcagatgacgagcctaccacacctgctgaactagtggggaaattccttggctacgtatcttctctagtcgaaccttccaaggtcggtcaattcgatcaggtcttgaacctttgcttaacagaatttgaaaactgttatttagaagacaatgacattcacgccttggctgctaaactattacaggaaaacgacacaactttagtgaagactaaagaactaattaaaaattatattaccgccagaataatggctaagagaccatttgacaaaaaatccaactctgctctttttagggccgtcggcgagggtaacgcacaattggtagccattttcggtggtcaaggtaacaccgacgactactttgaagaattgcgtgatctatatcaaacttatcatgtcttagtgggagatttaatcaagttctccgctgaaactttaagtgaactgattagaactactttagatgctgaaaaagtctttactcaaggtttaaacatattggaatggttggagaacccttcaaataccccagacaaggactatttactttccattccaatttcatgccccttaattggtgtcattcaattggctcactacgtagttactgccaagcttttgggtttcactccaggtgagttaagatcttacttaaaaggtgctacaggtcactctcaaggtttggttactgctgtcgccatagctgagacggattcctgggaatccttcttcgtctccgtaagaaaggcaattactgtattattcttcatcggtgttcgttgttacgaagcatacccaaacacttccctaccaccatccatcttggaagattccttggaaaacaatgaaggtgttccatctccaatgttgtccatttccaatctaactcaagaacaagttcaagactatgtaaataagactaactctcatttgccagctggtaaacaagttgaaatttctctagtcaatggtgcgaagaatctagtcgtatcgggcccaccacaatcattatatggtttaaacttgaccttaagaaaggccaaggccccatctggactggatcaatcaagaatcccattcagcgaaagaaaattgaagttctccaataggttcttacctgttgcatcaccattccattcccatctattggttccagcttcagatttgattaacaaagacttagtcaaaaacaatgtcagctttaacgctaaagatattcaaatccccgtttacgacacttttgatggttcagatctaagagtcctttcaggttccatttccgagagaatcgtcgactgcatcattagattacctgtcaaatgggaaactactacacaattcaaagccacccacatattagactttggtccaggtggagcttccggtttaggtgttttaacccatcgtaataaagatggtactggtgttcgtgttatcgttgccggtactctcgacattaacccagatgatgattacggattcaagcaagaaatctttgatgttactagtaatggtttgaagaaaaatccaaactggttggaagaataccatccaaaattaattaagaacaaatcaggcaaaatttttgtcgaaacaaaattttctaaattaatcggtagaccacctttattggttcctggtatgacaccatgtactgtttctccagatttcgtagctgctaccacaaatgctggttataccattgagttggccggtggtggttacttttccgcagcaggtatgaccgccgctattgattctgtggtttctcagatagaaaagggtagtaccttcggtatcaacttgatctacgtcaatccatttatgttacaatggggtattccattaatcaaggaactaagaagcaaaggttatccaattcaattcttgaccattggtgctggtgtcccatcattggaagttgctagtgaatacatagagacattaggtttgaagtacttgggtttgaaaccaggttccattgatgctatttcgcaagttataaacattgctaaagcacatccaaacttcccaatagctttacaatggaccggtggtagaggtggtggtcatcattctttcgaagatgctcacactccaatgttacaaatgtactccaagattagaagacatccaaacattatgttgatattcggttctggtttcggttctgctgatgacacttacccatacttaaccggtgaatggtccacaaaatttgattatccaccaatgccattcgatggtttcctatttggttcgagggtcatgattgctaaggaagttaaaacttctcctgatgctaagaagtgtattgctgcttgtactggtgttcctgatgataaatgggaacaaacctacaagaagccaactggtggtattgtcactgttcgctctgaaatgggtgaaccaattcacaaaattgccactcgtggtgttatgctatggaaggaattcgacgaaaccatcttcaacttaccaaagaataagttggtaccaactttggaagcaaagagagattacattatctcaagattgaacgccgatttccaaaaaccatggtttgctaccgtcaacggtcaagcccgtgacctagccacaatgacatacgaagaagttgcaaagagattgggtggaattaatgttcatcagatctaccaactcttggtttga

SEQ ID NO: 80452 - DNA, 180 bp, Saccharomyces pastorianus
agaagaagaacttacagagctcacggtagaatcaacaagtacgaatcttctccatcccacattgaattagttgtcactgaaaaggaagaagctgtcgccaaggctgctgaaaagaaggtcgttagattgacttctagacaaagaggtagaatcgccgcccaaaagcgtattgctgcttaa

SEQ ID NO: 80453 - DNA, 99 bp, Saccharomyces pastorianus
atgatgttatatgatgataatggaatagatagtgagcttcgcgattcagaagctttacggattttttcatctcttgttcattattgtaatgcaggttaa

SEQ ID NO: 80454 - DNA, 363 bp, Saccharomyces pastorianus
atgaccctacttgccacagagcatatcttattgtatcccttgtctttcaagtgttctatctacacaaccatcattagccataattcttgtccccagaggttcaccggtatttttattaatcaaaacgcaagcagtatctccgaatgcaacggtggagccatcctttctgcacatgttacgctgtttagaccttacgacaattgcgtgacaaatatcaccttttttgacacggttggtgttggctgttcccgtaatgttttgagtcaagggctttgctttctgtataacacagactattctgtctccaaccattgcaggactcttgggggaccctttccttattactttaatacattctgctaa

SEQ ID NO: 80455 - DNA, 1755 bp, Saccharomyces pastorianus
atgtcatacttgattggtgtgaactatcctaaaaattcagttggtgagttaccaatagcatatatcgatggaaaagaaagtgacaagcttgccgcattgtacaacaacgcaagaagcattttagagcagtacttagtcaagcaagatgaggtaacagactctcaatttttttataaggaatacttcaagtttgttgaaaagtctcattcacattacttagaagagatagaaaccttaattcagcgtatatctgaaggagaaaactatttggaacaagaagcaatcacccttacagaggaattaatgcagataatattggaaggtttacattatttgacaacctataattggagattcattagaactattgttacatttgggtttgttgggtggatctttttttcttttataatatttttgaaatcattcatattagagaatgtaattgatgaccaaaaagcgtcaccattaagccatgcagtatttggttccataggaattttactaaattggattttgttctaccaacattctccgttcaatttttacatgtaccttcttttcccattatacttttggagctatatttttacaaatagatccgtactacgttcaggtatcaaggaattcttcaaaggtacctctccttggaaaagagttttaataacaatctccattatttcagtttatgagggaattgtatatggatttttccatagatggacgtttacgctaattacaaatatattggcgttttacccgtttatttgtggggtgagagagctatccgtgaatatattgtggatcataactagtgttcttttatctacatttaccttatttgacgctgttaaaatcgaggacttgaaccagatacatctagcagggttattaatcattctcagtgccttttatgctctttacaaaatacattccaggataaattcctacacgcgtgctatatttgccattcaaatttccttggtggctgccatgttggcggttactcatcgttcagttatctctttacagctaagacaagggttaccaagagagtcacaggtcgctggatggataattttttttgtatctctttttgtaatgccaattttacattataggaagcccaacaatgattacaaagtgagattattgatcatttatttaaccttcgcaccatcctttatcattttgactatatcattcgaatctcttttctacttcttgttcactagttacatggtacaatggattgaaattgagaacaaaatcaaagaaatgaagacccaaaaagatgaaaattggttacaagtgctaagagtttcagtaatcgggttctttttacttcaagtcgcattctttggaactggtaacgtcgcttcaatctcttcattttcattggagtctgtttgtagattgttgccaatttttgatcctttcctgatgggcgcattattgatgttgagattgataattccctacgggctattgtccacatgcctaggtatactgaatttgaaactcaacttcaaggactacacaatctcatcattaattatttccatgagtgatattctgtcgttgaattttttctaccttttaagaacggaggggtcgtggttggatattggcataaccatttccaactattgtttggcgatcctatcatctttgttcatgcttattttggaagtactcggtcatgtgttgctaaaaaatgtcatcatacaggataaaaccaaaaaaacacaatag

SEQ ID NO: 80456 - DNA, 642 bp, Saccharomyces pastorianus
atgtggaacaaaaccagaacgacgcttctggctgttggtgtcttatttcatttattttacctatggtctatttttgatatctatttcatttcaccgcttgttcatggtatgagcccatatcaaagtactccaacccctcctgcaaagagattgtttttgattgtcggtgatggtttacgtgcagataccacttttgataaagtcactcatccagtatccggaaaaacagaatttctggcaccttttattagatctttggtaatgaataatgccacctacggtatatcacataccagaatgccaactgaatcccgtcctggtcatgttgctatgattgctgggttttacgaagatgttagtgccgtcacaaaaggttggaagtcaaaccctgtcaatttcgatagttttttcaaccaatctactcatacttattcattcggttcacctgacattttacctatgttcaaagatggcgcttctgacccaaataaagttgacacttggatgtatgatcatactttcgaggattttacgcaatcttccatcgagctggatgcttttgtctttagacacttggatcaattattccacaattccacactgaactcaacattggattatgaaattaggcaagacgcgtaa

SEQ ID NO: 80457 - DNA, 210 bp, Saccharomyces pastorianus
atggggttggtcctagcatctgctctgtttgctaaatttgtcacaccaaagggatccaatgtggtgagaccatacactcctgtgagtgatctttcccagaagggtcacttccagctggtcgtcaagcattatgaaggtggtaaaatgacctcacatttatttggtcttaaaccaaatgacaccgtttctttcaagggtcctattatgtaa

SEQ ID NO: 80458 - DNA, 561 bp, Saccharomyces pastorianus
atggctatgatgtattggagatgcctttcgatgccaaataatgaaagtttggttaatgatctatgtcaaagtaaacttccaatgatctccaatacactggagaagttttcactagaagtgctagagaaactattaatggaattgggtactataagttccatttatttcaagcccgactcaaataggagaaaaggcaaaaagtatgttcaaaatatagttaaaggaaaacatatagaggaattagaaagcatggcaaaaaatgaaatttctagcaaggctaacgatgatgtgctattggattttgatgaaagagatgatgtaacaaatacaaatgcaggaatgctgaatacttcaacaactttaggcgatttggatgatttatttgatttcggaccatctgaggatgccacacaaataaatacaaatgataccaaggctgtacaagggttgaaggagctgaaactaggtggcgactcaaacggtatatcttctggtggtaaaaacaatcccgatgtttcgggcggcaatatagtgtcacaggatctcctcgatttattctga

SEQ ID NO: 80459 - DNA, 1593 bp, Saccharomyces pastorianus
atgccaccattggataaaagaatcaagaagtttctaaaagactccattagaattgcgccaaaaatatccggtaagggtgaactgagtgaattaagaactggtttagtatctcaatacccacagactcggaaagatgcaataaagaaaacgatccagcaaatgacgttgggaaaagatgtctcttcgctgttcccagatgtcttgaaaaacattgccacaattgacgttgaacaaaaaaaactggtttatctttatgtgatgaattatgctgagacgcatcccgaattatgtattcttgccgttaacacattcattactgatgcacaagatccaaatcccttaattcgctgcatggcaatcagaacgatgtcaatgataagagttgacaaaatcctggaatacattgaaacaccactctgccgtaccttgcatgatgataatgcatatgttagaaaaaccgcagtgatatgtgtcgcaaaacttttccaattaaacaaggatttatgcgttgagttgggtgtcgtcgaagatttggtcaatgccctagacgactcaaatcctttagtcattgcaaacgcaacagcagcattaattgaaattcacaatatggatatggatgccgttgatctttcaagtttgatccagtcccacgtttcacaattcttattagctttgaacgaatgtacggaatgggctagaattatcatactaggaactctttcggaatattcggcaaaagattctttagaggcacaagatatcattgatcgagtaactgcgcatttacaacacgttaatccagccgttgttttagctacaataaaggtaatcgtaaggaacttgcctcaaattgaatattcctcgaacagtctgataatgaaaagattatcatctgcttttgtatcactgatgtctacgccgcctgaaatgcaatatgttgctttgaaaaatattaggatcatattggagaaatatccagagctgttaaccaaagaattgagaatattttatgtcaagttcaacgatcctctttacgtcaagttagagaagatcgatatccttgtaagactagtcgatccttccaacttgaaacaatgtactttgttgttgacagaattaaaggaatacgcaatggaatatgaacctgagtttgtttcaagagctattcaagctttgtcccagttgggtattaaatatgcacaagaatcattcgtcagtaaagtcttggatattctcctagaactgttagaaagacaagacacaataaaagacgactgctgtatatcattatgtgatttattaagacattgccccggaaacgataagatggccaaacaagtttgtgcagtatttaatacttggtcaaatccagaggtgttattacaatcagatattgcaaagtgcaactatgtctggttgctaggacagcatcccaacaatttctcagatttggagtcaaaaatcaatatttttatagagaactttgttcaagaggaagctttaacacagatgtctttactaatgacaatagtcagactacatgctactttaacgggtagtatgctacaaagcgtcctagaattggccacataa

SEQ ID NO: 80460 - DNA, 207 bp, Saccharomyces pastorianus
atggaaagcgaaatggatcagagaatacttaaggcattatcccttgctcactacggtattggtgtgataaatttgcataagggacgcttgagggcatctaagaaggaacttaaaaaggctattcgtatttcagagatgaatagatttaatgaactcattgaggaagctcaacgtgaacttaaaaaggttgatggtacgcctatataa

SEQ ID NO: 80461 - DNA, 1077 bp, Saccharomyces pastorianus
atgtggaaataccttcatagatcagtcaaaaatgaagggaccgtagaacggctcactaacctcaacttatttaccaatcaccgtttcaagttttattctacattaaaggaacaaagtttttggagaataccattcaaaagaaggagcaaattacagaaatgggtgttatcgacaggcatcgtaagtttcatcgcttttaacatatggtgggtttattggccacatcatacttttcccaaacccgttgctaaaatattaaggaaggggttacattcagaaattaagaaagaaggtgcgaactaccaaaaaagccttgagtactacctcgaagctttagaagaatgtaaagccgaaaacgtggatctactttcggatgaatataccggtattgaaatcaaaatcggagaaatgtatgagaaattacatatgtataatgatgctacagctttatatggagacatgctgaaaaagttctataatgaactaagcaaaactactgataagtcaacgaagagaaaattctttttgttgaaaagagaccttcaaattttggtaaggttcaatgaaataaataaagactctgaaactaatgcaacgttattgataatgcaccttttattagctcaacgagaatttttggagaactcaccggagttcaaaaatgttctttccaaatcagaacttttaaacaaccaacagcttgactggaagaatttcaagggtctaccatttattggtaaatccaaacctgactaccaaatgcatttaaactctaaaagaaaacaggagttgaagataaaggaacctgaaagcgaacaatgcgttttcatgaaagaacttctgactgcaagagatttatatactcgttactgtctcaatcggaataatctttctggggccttgaatagcaaaataacaacactagaatggatgttactagcggatagtcctctggacgacatcttgcttgcccaggcagagctcggatcgattttttatctaaattcagagaagttcgaaggaagtctatacactattgataatgaaccgtacaaaaatcagaaccttagaacttat

SEQ ID NO: 80462 - DNA, 270 bp, Saccharomyces pastorianus
atgattgagtctttgcgtataggcagcaacctgctagatttagaagttgtccaatttgccattaaatgcgcagatgaggacggaacgaatatcggagaaactgataatatcttcttgcaggagattcttcctgtcaactccgaagaagaatttcagaccttgtcagctgcgtggcactccattttagatggtaagctgagcgccttggacgaagaatttgatgttgtcgctactaaatggcatgacaaatttggtaaattgaaaaactga

SEQ ID NO: 80463 - DNA, 456 bp, Saccharomyces pastorianus
atgagcaaagacaaagatatcaaagtcactcctggaacttgtgaattagttgaacaaatactcgccttactctcccggtatctctcatcttatattcacgtgctgaacaagttcatcagtcatttgcgaagggtagctacgctacgattcgagagaactactttgattaaatttgttaagaaattgagattttacaacgattgtgtgttaagctataatgcatcagagtttatcaatgaaggtaaaaacgaattagatccagaggcggattcgtttgacaaggtaattttaccaatagcctcaatgtttgttaaatgtgttgaaacgtttgacttactgaactattatctaacgcagtcattacaaaaggaaattttatctaaaactttgaacgaggacctaacgctaacagcagagtccatattagccatgacgatacctacaatcatttcgtga

SEQ ID NO: 80464 - DNA, 486 bp, Saccharomyces pastorianus
atggaaaggtttaaacatttctatgcagcatttcaagcactttgttacattttctgtttcagacataacatcttcagagatacagatggtaactgggaatgtgaactggacaaattctttcaaagaatggtcatttcaaaatttaacccattaaagttttgtaatgaaaatgtcatgttgatgtttgctcgtattgcccaacaagaaagcgtcgcgtactgtttcagcataattgaaaataacaacaatgaaagattgaggggaatcatcggcaaagctgatagcgacaagaaggaaaattccgcacaagcaaataccacatcgtcttcttggtctttggccactcgacaacaatttattgacttacagagttacttcccatatgatcctttgtttctgaaaaactataaaattttaatgaaggaatactacatagagtggagtgaagcaagcggggaatacgaaagtgatgggtcggatgactaa

SEQ ID NO: 80465 - DNA, 1344 bp, Saccharomyces pastorianus
atgtcagcgtatgaggttgagttgtatataagagcgaaagagtttcaaatgatgagcccgccaatggtgaaggactttggcacgtatttggtcagtgacgaccagcagtttattaaggatcgtggcattcaaagctattttttgctaccaagcattaatgataatatagacgaatatggaaactttctacccagttttattgtccaggataaactagatattcaattttcaaagttcaataagagctcatccactgtaatgaactatcccctacctcacaataggaaggacgcagtgtatttcgaagttaaaattttcagacatattcaaaagtccaatagtatattcagtataggtttgactactgtaccatatccttatttcagggtaccgggcatggccaaatactccattgcatacgaatccacaggtaaactgaggataaataatcccttcactgccagcacattattaccaaaattagaagacggtgacacggtaggattcggttacagatataaaacaggtacaatcttcattacacataatgggaaaaaattaatggatgtaacacaaaatattggcattgatcttttcattggaattggcgcgtttaatgccgcatatacaagaacatatacgagggatggtctattggaagacccggataatgttagcttccgtgaagctctctctgaaggcaaagatattgaagtcgccaaagatcttcaaagagttcacgatccacatgatgaaagtgatgaaatgacgtcagatgaggttgaattacatgttaatttgggccaagttgggttcgtctttatagaagccaatgtgaaaaaatatgcgtttgggagtgtttatggccaaattggaattcctcctgcgtataatggaaccgagatcaagaaggatactattttacagaaaggagaagaattgccaccaagatatgctgacaccgataatttctttggtagtatgaaggtaaaagaagggtcatcctctagaataacggcgcaaactagtaagcccctgtggtctgttgggacgtatgaaagaatctcttctaactttgacagagaaaataatgtttaccacgacagtcttgaaaccgacgataacaacaccgataacaatgttaataacaacgatgagaacgctggttgcaatgaaaattcgccattattggaagatgatggcaataaaagaccggaaaattcaaataccccccgtgaagtatcagatggagctatcaataagaaccctagaaataaatctactaaaaaacgtcaaagaaacagaggcaaatcttctaaaaagaagaacagatcgagaaaataa

SEQ ID NO: 80466 - DNA, 426 bp, Saccharomyces pastorianus
atgtatgtcacttttaatgaggctttggatagttcttttggtaatctagagagtccgaatcatgacttcaaagtaggtgaccctaacatggtaccaactccccctatggattcagattctgcagcaattagtttggctttcttaataagtctttctattacgtttgcaatattaatgctcatcttggtagtaatagcggcatatgttaccttttgtggtgatgatgaatcagaatacgatgaagagaacgccttaggtacacgaacttcaggaactctgcactctttgtttggtaaaaaacatagtggcatcttgttggattcgagttttgcatccctggcgggtttgatgatgagatcgttcttcaggaaagagaacttgaagaattaccaaagatgtcagcgtatgaggttgagttgtatataa

SEQ ID NO: 80467 - DNA, 156 bp, Saccharomyces pastorianus
agaaagtttgtactggtaattttcaacgcgggtctgttcttatctttttttctgtgttacacaattagacaagtatattctgagatagtaatcacatctacgcttcgaattcatccatacccacagcagctgttaggttataccgacaatggatga

SEQ ID NO: 80468 - DNA, 231 bp, Saccharomyces pastorianus
atgctgttgccccatttcatagaaactacttgcttggtttatagatgtttcgcgttgcgttacagaataaggcagccttttttttttttagattttcatttttcacatactgatggattagcagacgaaaagggtaaagttaaatacattccagtaaatgaactaagaaggctgagcacaccatcctcttatggaacgttattcctaagcatagaaagtttttacttgtaa

SEQ ID NO: 80469 - DNA, 714 bp, Saccharomyces pastorianus
atgcctgatcatgtccctctatacattgataaaaataatagtgcactctaccccaaagaaccccccgccaggaagtctagttttgagaaggaaagacctgcgaaggataacctaggatttagaagcatgtctttgagagagccacttatcacaaagaatgctacagccacagcagcagagaacctggatgtggaagaaaagaaggaaaaaggaggtcatgtctcaagaaaatcatggacttttggtttgccctctccgctgaaaaggagaacaagtcattctactcataccacgaacgaaacagagatagttaatcccatgacgaacttcaaaaataagaccaacgaaaacgatatgccaatattagcaaataaaaagagctgcaacaacgatgattcttccccttacactgcatcatccatgaacactaatgacgtaagcgaagctggtacagaaggccaccggttttcattattcggaaataaaagccaattgtcaaataggaacatatctggtggaacagccactttggagtcatcaaatcctgacctgcctacagccttaccattaagcgttccggtgactatcattgataaaaatggagagatacacaagcttcataacgatgatgcagctataaaagataagtcgcatgaccgtcacggtcacagtaaattcggtaggaaactgaaaaaaatttttggcaggaaatga

SEQ ID NO: 80470 - DNA, 2787 bp, Saccharomyces pastorianus
atgatccaagaaagtagtccagatgccttagcagcagcagcagcaattggaaatgcgctcagttataatgggaggaccgttgacaagagtaaaataccgcaatacaatcagagttttacctctcgaactacgtcaatcgcagggattaataggtatacaatgctcttgaattctaggactaactcaaggatgctcttaatgaatggtaacgttcgccaatactctaagcgcacgtcgagtttgccaaaccaaggacataagaatacctctaataattcggcggggagaaggcaacacagggctcacgaggatgcagaaaccacgtttcgagaatttggaggcaagcagtcatcgaaggttttaaacatttcaagttcgaatggtcagaatagtaaatcaaggaccacatcacttgggaactcaggcagcacaataaggacgataaaaaaatacataccaggccctagggggttaatggctgtggaagtacccatggaagtagagcctcctagatacagtctgagcaaccgctcaaaccaacgaggtggtagagcatattctttgcctactcgaaacaacaaaactagtctaatgcataggaataaaactactaagaaagcaggatcacaagagaaaaaaagtgaaagcggcggtaaatcaaaaaacgattatcatggcaaagtattatctaaaatgcatactacatcattaaagcaacggcataacaatgttccattaataccaacaactatgaacgaggaaacggaacaagaactgcaagaggatcttcatgatcctttagaatttaaacccatgattatatccgatgacgaaaactcttttattgaacccagcgttctcgatcgtagcatacccaaaaaagataaaagtggtctcagtggacgtgagaaaaaggaagaaattgaaacattgcttaaagaggttcatagcttggaggaaaaaatatcaaatatcgaaatagcaaaattgaacgaagaagaaagggaaaaaagcttaattttggaattgcgaaaagttaagctagatgaagaacggagaatggagttattgaaaagagagctaaatatagttaaggagaatgccgaccttgaagcccaagaattaaaactaattgaaagcaaaagaaaacaacactttcacaaagaacaggaagtagcatccgaggtcaaatcgatcacgattcgtcaacctacttcatcagaacctaagcctgcctatgtacctccggaagacgtggagaaagagccatcaactctctccaatcaaactcagaatattgaaaatgcagagaatatcgattctgttgatgccgaaggaaatttagtagatcctattcttctcggttctttaaacaattctaacttccacatgaattcagataacgaagtgaggtgcattgcagattcaaacagtctcactggcagcgaattatccgattataattatatagaaggctcggcaactgatcttcgcgctactgcaaagacaagtgtggagtctgaaataggcggaaatcaggttggactaaaaattccgcaagatgatgatagtgaaaaacaggaagaacgtacaaagggaaaaaagtcaggcctcgtcgatacaaattgctttttagtccaaaaagaagatcaagaagaggcgctttccgataatgaaccggaaagttctgaaaaattccctagcacttctgggatcgagaacgttaaactggaggatgagactggtagtgttatggacaaaaataatggacccaacaatgacaaggacgatgatgatgacaaagacaatgataatgacgatgatgatgacaaggacgatgatgttaacgatgatgacaaggatgaaaatgttgacgatgatgaaaatgttgacgatgatgatgacgatgatgatgaatatcatgattcttatgacgtgataatgagagatccggttcaaatagaacaagatatatctgacgtgccttcattaaaacacccttcagaatattctaccgagacagaagataataaaaagaaggaacaaaattctgaaaatgcagaagttagtcagtccggaacaaacatggccaagtatttacgtggtgctaatccttacctcactaacacaagttcagacactttcagcctagattccgaaaacgtgaactccaagtcctccacggataccacaagagttgcacctgaccttttgaaaagctcactacaaccacaacttagatctgatttgaaacaatcagccgttccatcaagtacttcctcgtccatttattcgatagaaacgtctccaaatattgattcctctacagggaaaactgcttccaatacgaaaacgaacagccatggccctccgacgagtatttcaaaacagaaatacgatcaatctagttctcatcaaatacccgtgatgtctcccaagcgtctcgacgataaaagaaaaatcaccaatcgttcgtgcctaagaactctacgtggtagttcaaatgaggctactctttcgcataatatagtatatccagcttctgactcatcttcatcccctccatatcatagcaagaagccatcaaatcctccatcatctggcaacttggcttcacacgaggcgtccaagtgttttccaaaagctcctcaggcgagcacaacatcgagacgatgcctgatcatgtccctctatacattgataaaaataatagtgcactctaccccaaagaaccccccgccaggaagtctagttttgagaaggaaagacctgcgaaggataacctag

SEQ ID NO: 80471 - DNA, 654 bp, Saccharomyces pastorianus
  modified_base (65)..(150): a, c, g, t, unknown, or other
atgcatgccatcttaagctctgctgtgctcttctcgttaaggaaaaaatgcgatggtatatatannnnnnnnnnnnnnnnnnnnnnnnnnnnnnnnnnnnnnnnnnnnnnnnnnnnnnnnnnnnnnnnnnnnnnnnnnnnnnnnnnnnnnggtcctcccttctttttacctgtttttaatctaccctcaaatccggctcttttctttggtacggcactaccgacatactttcttttcatcttttcttgcttatttctctttttacccttgttgtctttcctaatcctcaggttctcttctcttctcttttgtctttcagatatcgtgtcttccacaaccctcttacgttcgctccattcaatcgcagactttctcttttgtgcttcctttctctttatagctttgcgaagtagtttttcgtcatctctaatcttaattccttctgcttgtaacatagccttttgccatttttccttttccttctgcttgatttgttctagttcgtctttcgtctccatcttattcttcttggcttctaataactttaagtgtgattttacatcattcttagccggacccttcgttctaccagcttttcttaacctttgtaaatctgaagtggcccttgcaccatcatcgaatatgatattttga

SEQ ID NO: 80472 - DNA, 927 bp, Saccharomyces pastorianus
atgagcaacattgctcgtccattcctttctttcaaaggtttgattccatacaacaagaaagacgttgatgcttgttttgttaaaatcgacaacctagctgctgtcttcgatgctagattgagagactacacctttgttgctaccgaaaacatttctctaggtgaccttcatgccgctggttcttgggcttttggtttggccactattttgggccctgaatggagagctaagcaccctcatttgatgagatggttcaacactgttgctgcttctccaatcgtgaagactccatttgctgaagtcaaattggctgaaaaggctctaacctacactccaccaaagaagcaaaaggctgagaagccaaaggccgaaaagccaaaggctgaaaagaagaaggacgaagctaagccagcagatgatgctgctccagctaaaaagccaaagcacccattggaagctttaggaaagtccacatttgtcttggatgactggaagagaaagtactccaacgacgacaccagaccagttgctttgccatggttctgggaacactacaaccctgaagaatactccatctggaaggttggttacaagtacaacgacgaacttaccttgactttcatgtccaacaacttggtcggtggttttttcaacagattgtccgcttctactaagtacatgttcggttgtttagttgtctatggtgaaaacaacaataacggtattgttggtgccgttatggtcagaggccaagatttcgctccagcctttgatgtcgctccagactgggaatcttacgaatacaccaagttggacccaaccaaggaagaagacaaagaatttgtcaacaacatgtgggcttgggataagcctgttgttgtcaatggcgaagataaggaaattgttgacggtaaggttttgaaataa

SEQ ID NO: 80473 - DNA, 228 bp, Saccharomyces pastorianus
atgtcccaaggtactttatacattaatagatctccaagaaactacgcttctgaagctttgatttcttactttaaactagatgtcaagatcgctgatctagaacaatctagcgagtttgcttctttgttcccattgaagcaagcccctgcatttttgggtccaaagggcctaaagctaactgaagctttggctattcaattttattgtatgttccatattttattttaa

SEQ ID NO: 80474 - DNA, 450 bp, Saccharomyces pastorianus
atgaacgttaggctactagaacaaattcagcttcaagaaagagagattcaagagcttttaactactaacgccatcttaaagggtgaactagaaactcacactaaacttactgaaacacgcagtgaaagaataaaatctttggaaagttctgtcaaagagctctctcttaataaatctacaatcccatctcctagaagagggtctatgagctcgtcatcaggaaatactatgttgcatatcgaggaaggttctgaaatatcaaatagcccttggtcagccaatacttcctcaaaacctttaggatggggcgcgagaaaggtttcttctagcagtatagcaaccactggatcacaggagtcttttgtggcaagaccgtttaagaagggattaaacctccattcgataaaagtcacttcgagtactccaaaaagcccctcttctggaagctga

SEQ ID NO: 80475 - DNA, 438 bp, Saccharomyces pastorianus
atgccggttgaggtcagagatgaatggctgcaggaccaatttgatcgtaggatcgttgtatcagttcagccaatatacatatcagatgaagatttcgatccactacaatacggtattttactatacatcactaagggttcaaaagtgtttaagcctactaaggagcaactggctttagacgatgcaggtataacaaatgatcagtggtattatgttgcattatctatccctactgtcgtggtggtatttttcgtcttcatgtactttttcttatatgtcaacgggaaaaacagagatttcacagatgttactagaaaagctttaaacaagaaacgccgtgttttgggtaagttctcggagatgaagaaattcaaaaacatgaaaaatcacaagtacaccgaattgccatcttataagaaaaccagtaaacaaaattag

SEQ ID NO: 80476 - DNA, 186 bp, Saccharomyces pastorianus
atggtatctactgatatgggccaatatggcattgatcattttaaagaggagaatatagacatcagcggcgtaaatattatcacaccagaagaaagtgcctctgcgctaattgatgtcttccgaaaaattttaccagaagataatggaaagttcttcaactatgacggcagcgaaggcgtcttttag

SEQ ID NO: 80477 - DNA, 267 bp, Saccharomyces pastorianus
atgacgcctgatgtcaaatgcttttggctcccagtgaaattgccacacttccttcttctttccgaactttatagtatcatcgaaaaatacaagttggcaaaggtctgttacaatcgcggaacgtacgatgttcatacggtttcagcgaagagtcttgtagtatccggaagcatgcctaccggcattattataggtacttcatcggccttggactatgtaggggtacaagtaaataggcaacttgaaatggatgtccctattgaatga

SEQ ID NO: 80478 - DNA, 159 bp, Saccharomyces pastorianus
atgacatgggagggtacatatgagcgccttttttttctcgctttgggcagctcacatcatgttccctcactagctaataatataatgaattttttagaaggagcacgattatataaaaaaataccacttatgttgctacccttatatacgaatttataa

SEQ ID NO: 80479 - DNA, 708 bp, Saccharomyces pastorianus
atgcctccatattacacaaaggatgaacggaacctgattttcgcagcttttgttctcggcagcattggtgaactagcccttttattctgttccatcttctcaaccgccctgtaccatcgcgttcacattgctatggtctctgttttcgtcgtcttcatgttcctatccacttgctgcttgattgcagagtatttcctcatgggaaggcactatgcctcagtccaccccctagccagccctcatttcaatcctcaatcatctgaaaaaagctttaaccaagattataacactgtggatgagctgccttggtataaatggaaaggccatgtatggaataaatttaccatcagtgcaactctaaaagttatatggttaactctcgcagttgtatgggccatttgttttggtgctatcaatgatagatctaagagtgcttgtttcgaatggttgctagcattttggtttggtatcatatttatgattctttccgccgacttttatttaggtggaagatacagacaatcccgctatttcaaccacgtggaatcattttcgggttattacaagtatgacaaggcgctaggcctctaccacagtgaagacgttttgccttcggacgataacgccggcgtgattgccacagaaacagcatcttcaaatatttacaataattcctcttccaacgaatctattcaagtagtcgtatga

SEQ ID NO: 80480 - DNA, 354 bp, Saccharomyces pastorianus
atgattcaatttaaaagtccaggtaactggctgttcatagtaccctggattgccttcattccatggtatggtatgctgatagccatgcttatttgctgggccagtcaaggccatcccatatattggttcatgcactcggagcaattccctgtgtacatttcagatataggtgccactaatttaaggccactgtttatatcgtgcgccggctggcagggtctaggctatgtaatcactgttgcccttgagttttttcaaagatccggctatctgcctttccaactgaaaaaaaagacccttctatctctgattccacatcttatgctgaaaaattgcacagcggtaaatacttaa

SEQ ID NO: 80481 - DNA, 690 bp, Saccharomyces pastorianus
atgagattccccaaggtcaaggatcccatggtagatgacgaccctgtctccgaaaattatgatcagataaatgtaccaaaacacagagcaccggatgctacaggtaatcctcgtacaactaacaaagtctccaatacttcagaccaagatagcagactaaaagccattgaaagaaccctctcggtcctcacaaattatgttatgaggtcagaagacggtaataacgacaggatgtcacccttaccttctcctttaaatacgatatcgccaataaataatcgtctgaattttcaagagcgaaagagatataatccaaccgttaaggtaaatccgtctgatgacgatatcatgatgtatgaaagtgcagagctgaagcgtgtcgaagaagaaatagaggagctaaagagaaaaatacttgttaggaaaaaacatgacttaagaaaattgtctttaaataaccaactccaagagctgcaaagcatgatggacggtgatgacaatataaaacttgacaatgtttcgaagcataatcatgctacgcatcgtcattcttcccaatccagtcgcgattactcaccctcttcggatgcttgcttggagtgttctaatgacttatacgagaaaaatagagtcaagcctgaaaataatatgtcagaaacattcgcaactcccactcccaataatcgatga

SEQ ID NO: 80482 - DNA, 444 bp, Saccharomyces pastorianus
atgtacacttccagagcgcagttggattctgttcgaatgaagatagatgaagcaatcagaatgaacactttgtcaaatcaaatggctgacagtgcgggcttaatgagggaggtaaattcattggttagactacctcaattgagaaatacgatgattgaattagaaaaggaacttatgaaatctgggattataagtgaaatggtggatgataccatggagagtgttggggacgtaggggaagagatggacgaagctgttgatgaagaagttaataagatagttgaacaatacacaaacgagaaattcaagaatgttgaccaagtgccaaccgtagaattagcagccaatgaagaagagcaagaaattccggatgaaaaagttgatgaggaagcagataggatggtaaatgaaatgcgtgaaaggctgagagctttgcaaaactag

SEQ ID NO: 80483 - DNA, 189 bp, Saccharomyces pastorianus
atggattatataaaaaaagccatatgggggccagaccctaaggagcaacagaggagaatcagatcggtcctgaggaaaaatggtcgaaatatagacaaatcgttgcgggaactcacgttttgcaaaataaaacccagcagcttatcaagaaatctgctaagaagtacgatgttaggacagttcgactat

SEQ ID NO: 80484 - DNA, 522 bp, Saccharomyces pastorianus
atgttcaaatcagtggctaaattggggaagtctccgattttttacttaaattctcagagattaattcatattaagactttaacaactccaaatgaaaatgctttaaaatttctctccacagatggcgagatgctacagacgcgtggctccaagagtatagttattaagaacactgatgaaaacctcatcaaccattccaagttagcacagcaaatttttttgcagtgtccaggagtggagtctttaatgataggtgatgattttctcactattaataaagacagaatggtccattggaatagtatcaagcctgaaattatagatttgttaaccaagcaacttgcttacgatgaagatgttatatccaaagaattccatgctgtccaagaagaagaaggagaaggtggctacaaaataaatatgcccaaatttgaacttaccgaagaagatgaagaggtcagcgaattgattgaagagctgatagatacaagaataagaccagccatcttggaggacgcgtga

SEQ ID NO: 80485 - DNA, 1710 bp, Saccharomyces pastorianus
atgacaacaacaaagctgggttcactacagccagggcaagggatgatgctgaaaaaacaagacgtgattcacataatgaagtacaggatactttggaagtgcaaagcgtttttattgccgccctcaatgaatgtttccaaaaaatcgtggatattcatcccaaattcagagaaaacaacgaccaaatttcgccgaagatcaaagtcatatattagatccacttttattcttttaaattacattttggcatttgttggatacgataactcatttgtacttggaatgtcggtgacgatttttaacgaatttaaattatacaaacttctattatttccggagccggatgtaaatgatgtgaaggctccagttgatgaagaggctaacactggtaatgggaatacaaaaacgtccgaatttgaaattggttctgaaagtgctgggcatatgaatccatccaattcaccaaattccatggacgaaaacactagtcactattcagtgttgtttaaaagattatacgttttgctttcagtgtttgattctttacaaagctgtgcattcggtggtcccaagctattaaacatttccatccaaggttctacagaaagatttttttctaatgatttgggctcaaaatggtgcctggaacaaagccaattgagactgaaaagcgtcttgcaaagcttgaaattgggtgaattgatgagtgagcttaccaggaatagaatatcaatgaacggcaataggaagcctgggttcgatattacgaactcgtcttcactcttgtcggaatatgtcgaaactcaacctctatccgtagcacagttattttgcaaactattaattggcaaacacaatttcatcaattgcctattatcattatacgattcagaagcaggagtctactcagatttgacattggatttgagttcgaaaatagcagactctctgtgctcattgatatcaataattttgcaagtattgacgttgatattaagactgaatcctacgaacagtattgattttaattatagaccaccgaacccacccgctaataatccgacagtgcaagagggcccatctgctatgggctcgtctccagtcgctgggaaccttaacgctgcacctccatcggaggggaatccagatttttacaagaaattactaggcctgaaacaagacactggcactatcctttcagacctttgccgggggataatttccccctttgctattgctatcctgcacgaggtctacaacatcactgaactggtcaagcagatgcctacatcactcattagcattatgatgacggcaactacaacgcagaatactcaggacaccaagaagtcgcaggacctggtcatgaagctgtcaaactcgatgaatgaagtagttcaaatcaccagcgtgctgacaatgatcaagccattcaagatcttcgagcacgagcttaataagcccataatgtccctgacaggaggactttcgtccacgaccagaaacgacgtcatgtggccaaagtcgggccaaggcctccgcgagtcatcagtcatgaagacattgcttgatgaacgccgtacttctggcacacaaccgacaacggcgccagtagtcgcagaggaatccaggcttgagaacgttgccctggaaaatttcgttagtatcggctggaagctgttggacgattccgagttaggctggtattga

SEQ ID NO: 80486 - DNA, 963 bp, Saccharomyces pastorianus
atgaacgagctgaacactgtttcgactaactccagtgactccaccaagaacggtggtacatccaatagtcccgacgatatggactccgcagcagcagcaagtcacgcaataaagaaaagaacaaaggcctcccgggcctgcgatcagtgtcgtaaaaagaagattaaatgtgactacaaagatgaaaagggggtctgctcaaactgccaaaggaatggagaccgttgtagttttgatagggttcctttgaaaagaggaccctcgaaaggctatacgaggagcaccagccatccaaggactaacgaaatacaagaccacaataactcaaggtcgtataatacgtttgataatagtaacaataccctgaataataatacgggcaatagcggcgacaacggtataaacagtaacacagttccaagtaccccttcgagatttaattcagttttattgcccccgctgacacagtacattccccaggctggtggcattcctcctagtttccaaaatccagcgatacaatcaactatgcccgcgggtaatattggccaacagcagttttggaaagtgccctaccatgagtttcaacaccaaagaaaaggatctatcgattctttgcaaagtgatatatcggtaagaacattaaatcccaacgagcagttgtcttataacaccgttcaacagtctcccataacgaataaacatactaatgattctggaaatgcaaacggaagtgtcaccggctcaggcagtgcctctagtagtggtggttattggtcctttataagaacttctggtttactagctcctactgatgatcataatggggaacagacaagaagatcaagttccataccttctttgctacgaaatacttcaaactctcttttactaggtggccagactcagcttcccccaactcagaaacaatcgcagccacaagcacaccaaacaaaagttgca

SEQ ID NO: 80487 - DNA, 507 bp, Saccharomyces pastorianus
atgaccacttcttcaactatcgcctatggacagatatccgatgtggatctaatagacacctactatgagttcatacatgtaggatttccgatcatacctttaaacaaaacgaccttgaccagtgacttattgttggttaacacacagccaatttccaatatacacgaagtcaattcatatgttattttgtggtttagaaattcattggaattgttagttcgtgttgctctgaaacaaaagccaggtggcaagtttttcgataatattgttggcgtggctttgtcgccaagcaatgacaacaacaaagctgggttcactacagccagggcaagggatgatgctgaaaaaacaagacgtgattcacataatgaagtacaggatactttggaagtgcaaagcgtttttattgccgccctcaatgaatgtttccaaaaaatcgtggatattcatcccaaattcagagaaaacaacgaccaaatttcgccgaagatcaaagtcatatattag

SEQ ID NO: 80488 - DNA, 1365 bp, Saccharomyces pastorianus
atgaccatgaaagacgtacaggattcttataataatgccaactttaaatgtgagtatttgatttttcttcagttggaaccatggaatcaatacacaagagatcagatcaagttaatagatgatgaattgaattggcccctggggcgtccggcaaatctgtctagtttaccgcccataaatgttgtctctggattactgtattctccagactgtggcgtacgattagggcttcataacgtaaagggtacacggtacgaattaaaaataatgtcgatcagaaaacatctattgttcggtattgcattatttgcagcccagatatacttattgcttactcagatgcatcatacaaataccccctccatggtcaacaaaatctcattctattgtttctcaatgataaacttagtcgatggttccttggccactttgtactttgttgcagctagtgtcgttcccgaattgtacttgcccctagttataagtgctttttcgtgctttatcttggcatctatttttgaaatacgctacttaatttcaatttacgcttcacaggttaacgaacagaatgttgggattatcaacctcctgcgtggtaacactggcacatatgatgagaataggccaagacccgcattcattcccgatgaagggtctatcggtggctcgttatatggtaggtttttctttatgctaatcattttcacatttttgatattgagttcaacttcatggccccgtcagctaaggatggtatttgagtatatcctaatcttcatattaaactcatattggatccctcaaattttccgtaacgctgttaaaggtattccttcaagaagagaaagagcaagatctagcattggaggaaatagaagtcaaaacaaaatgccattactgtggagttttgtaattggtacaacaataattagaagcttgcccgttgtgtatgttttcacttactcctctaatgtgttcaggcaccataaagatgttcatttcgtcgtatttttatcattgtggctactgtttcaaattagtatactgtattctcaagatgtattgggatcgcgctggttcttgcctaagcacacaatacctgatggatattcgtatttcaagcccctttcaaacgagtatatatcggagcatggtggtggaactgctgaacataccgttgattgcgcgatatgtatgtctgatgttccaatttacatagaggaaattccagaaactcataaggtggatcagcactcttacatggtcacgccttgtaatcacgtatttcatacttcgtgtctagaaaactggatgagttataagttacaatgtcctgtgtgtaggtcaccgttacctccgttgtag

SEQ ID NO: 80489 - DNA, 942 bp, Saccharomyces pastorianus
atggaaatcgatggcaacactctggtgttcataatagtgatccttttcctatttttctcctcaccgggtggtgatggtgtgtcttctcaatatgagttcaatcaactccagagactcaagcagcagttccgaagagagcacaatacgttcgtcaatatgacatatacagatagttttcgaaatattaccgggcttaaactcagctaccaagacatgctgaataatcctctccaaaatgccacttacccactaccaggaaaagattatgatcgatggtttcccaatcaaaactacatggttttgcccaacgatgtcatagaggccataaatactgaagtctggaatacttcgaatgatgacgcttccaaccttttccctcccaatattacaagcaccctgttaggtaaaatcgaccttgtatcaaataacaagtacgaaaagataaggatgcctgtacccagattctatgagccggcaactgatttttcagaggatattcctcctgaaggtgagacgtactggtctgagtggccttcgtatggcgaacttcataatgtgagttttcagcatggcgaaatagctattcaaatttctcatatgagcaatcttcaggacaataataattacttaaggagaaatttcataaataagaaaaatgaccgttggaagttgttaaatcttcagattgatttctcagataaggctgaaaaggaaaagcattccatatactcgaaggctgtatatgacattcaacgtggtagaattctttctatttctcagagttctacatttcattcattgttcgcccttcctcattacatgtccttccagaatgattatcctgggaacatattcatgatgtcaagaactcgtgaacaatttgcaattcaccgataccagatttctgacctaaagacgtcagaggttatatatgccaattaa

SEQ ID NO: 80490 - DNA, 156 bp, Saccharomyces pastorianus
atggtgtccaggccgggtagcaacccaggtctcgagtcgccctctcttagtggcgacaattcggctagttggtccactgcagcggagatcatcttgtctgtgatagtggtggcacgcgatagtacggcacctaaaccgatacctgggaaagagtaa

SEQ ID NO: 80491 - DNA, 696 bp, Saccharomyces pastorianus
atggaccttttgttcaatgatgatactgataccgtagtatcttccggcggaagtaccatagagggacaacaacagctagactacaaatatttaggagagctattatttaacctatccattaatattgaaaactctaacaacaacactgcccctaaagaatatcgattggaggaaataacccctcaatcaattgatgaaatgcgacagatcgatgataagttcaaggatgtactcaagtatctcatatcagacaacggcgattccaaaaagaacattcatgatcttactagtcacttttatgataagatgttcatggtcctggaatcgtcacaaacctatacagaatacatggagtctgtcttatcaagagaactagaaaatggcagattatttagactggtcaacaagctaaattgcatttttggtagaatcgaatcaagaatagacataaattggtccgaatctgggactaaattccccattatactattttatgactacgtattccatcaagtggattcgaatgggaaaccaataatggatttaactcatgtcctaagatgtttgaacaaattagacgctggtattcaagaaaagttaatgttggtaacgcccgatgagttaaactgtattattatatcctataaggagttgaaggacttgatagaatccacctttcgatccatcacccaataa

SEQ ID NO: 80492 - DNA, 1005 bp, Saccharomyces pastorianus
atggacaaaatcaatcctgattgggcgaaggatattccgtgcagaaatatcactatttatggctactgcaaaaaggagaaagaaggttgccctttcaaacacagcgataacactaccgctactaccataaatgacgttcctcctccaatagatgtgggtgaggctacaactccaaccatgacatcagttcctaagttcaatgctaaagtatccgcaagtttcactccgatgacagtcggtagtgactccttaaccactgtgacgaataccacctccgctgctacaaatgctactggcaatatcgccatggcagctacctctgctactgcttctacagttaatccgatgattaatccgatagttaatagctcgttagtgaataacaataacaataatagtaatataagcatatcaataccaactaccgcttcgagttccaattacgaccccttcaatgcccccattttcactccgtcttcaacctcctcaattcacactaatgcaaatgcacattcttttccatttccctccattgcaaattctggtggcataaatataaacgccactgatgataatagtaacaatatgagtatggctaataatgtgccacctcctatgcaaccgccacccatagagagtagtaatcttaagtacccacgtatttatccgcctcctcacagtcttctacagtatcacctatatgcacctgaacagccatcatcattgaaatcattattaaagcctaatgaaaggtctgcagatcagcttttcattccaaacaatattagagaagatttaaccaagaaaaacttatcgattttgcaggttttcccctcttcaggtaaagttataccaagtattgtacaagattattttaatttggttccattgaacttcaataataacgattttttaaataaaactacgctcttcaaagttttttccaattatgacggtaaagcctacgttttgaagaggcttcctaacatcgataagtcaatgaat

SEQ ID NO: 80493 - DNA, 531 bp, Saccharomyces pastorianus
atgcatattgaaacacatattttaccattcgataataaggaatacctttctgttggtattagcgatggtaatgttcatttctatccttgtgagaagttattcgaaaaagttgaagaaaatgaaaagcaggaagatgatgacgacaaggagggtatcaaccccgccttttctttattgggtcacacaaaccgtattaaagatttcaagttttatacgaatgaatttggtacctacctagtcaccattggttctgatggtaaaattgtcgtatgggatatgtctacaaaagaacaagtagcagtctacgactgtggcgaaaggctaaattgcttaacgctatgcgatgaaagcattgagaaatacaacacaatgaagaagagggatgctgaaacagctgatataggtgaccaaagtgaggtggaaagtgataccgaagaattaaagaagataatgtttggtgagaagaagaaactcaataaaaagaagcggaagcaattgaagaagagtaaagtatcagtagaacttgaataa

SEQ ID NO: 80494 - DNA, 549 bp, Saccharomyces pastorianus
atggtatctgatgtgatgatgtcctacaataagagacaacaagatgacaataagaaagaaattgatatggaaatatactatggagaattgagttgggttttaacaaccatttgtaagggaattaaaacggatgaagattacaagatgttagagaagaaaggtgtatttgagtggttgttaaacttgatcaatatgccatacttgaaagaaagattacgcgaactaatctattttattttttacaaagtccaaagggtagcagatgatggtggtttgaatttaattagcagaaacggtattgtgtcgtttttcgaggttttgaacaataacatcaaatctagactaccacaggacgatatactgtacaacattggtactttacggaacgaaaacagaggtacattaaatactactttgaggttagcccaagaactaaacggaattgaaaaactactattaggctacaacgagcttgtcaaatcacagaaaaggctaatattatggacagaaggtgatagcgacaacgttgttaagaggctacgtaaatga

SEQ ID NO: 80495 - DNA, 3813 bp, Saccharomyces pastorianus
atggaaaccttaataggtaatatagctgccatactctctgataaaattttacgggaagaattagaattacaaatgcaagcttgtagatgcatgtataatctttttgaggtctgccctgaatctatttcaatagctgttgatgaacacgttataccaattttacaaggaaaattggtagagatcagttacattgacctcgcagaacaagttttagaaacggtggaatatatttctagagtacatgggagagacattttaaaaacgggccaattatcaatttacatccaattcttcgattttttaactatacatgcgcagaggaaggctatcgcaattgtttcgaacgcctgtagcagtatccgaacggatgactttaagaccattgttgaagtacttccaacgctgaaaccaattttctcgaatgcgacagaccaaccaatattaaccaggcttgtaaatgccatgtacggtatttgcggggcgttgcatggggttgaaaaatttgagactttgttttcgttggatttaatcgaaagaatagttcagctagtttctattcaggatacccccttggagaataaactgaaatgtttggatattttaaccgtattagcgatgagtagtgatgtactttcaagagaactgagagagaaaactgacattgtcgacatgacaacacgatcattccagcattatagtaaaagtcctaacgcagggttacatgaaacactgatttatgtcccaaacagtttattgattagcatttctagatttatagttgtattgtttcctcccgaggatgaaagaatactgtcagcggataaatataccggaaatagcgaccgtggcgtaatttctaaccaggaaaagtttgattccctagttcaatgtctaattccaattctcgttgaaatttatacaaatgctgctgactttgacgtaagaagatacgtgcttattgctttactgagggttgtatcatgcataaataattccacagcaaaggcaatcaatgatcaacttattaagttaatcggatctatcctggcccaaaaagaaacagcgtctaacgctaatggtacttactcatcagaagctggtacactgttggttggtggtctctcgttgcttgacttaatttgtaaaaagttttccgaactgttctttccttccatcaaaagagagggcatttttgatttggttaaggatttgtctgtggatttcaataacattgatttaaaggaagacgggaatgaaaatatttcactttctgacgaagaaggggatttgcatagcagtattgaggaatgtgatgagggtgatgaagaatatgattacgaatttactgatatggaaattcctgattcagtaaaaccaaagaaaatttcaatacacattttcagaactctatctctagcttatattaaaaacaagggtgtgaacctagttaatagagtactttctcagatgaacgttgagcaagaagcaataacagaggagctccatcaaatcgaaggcgttgtttctattttagaaaatccttccactccggacaaaactgaagaggattggaagggaatttggtctgttttaaaaaaatgtattttccatgaagatttcgacgtgtcaggtttcgaatttacttctacagggctagcttcctccataactaaaagaattacatcctcaacggtatcccatttcattcttgctaaatcatttttagaggtatttgaggatagtattgacagatttttagaaatcctacaatctgctctcacaaggctggagaatttctctatagttgattgcggtttacacgatggtggtggtgtatcttcactggctaaagagataaaaattaagttggtttatgatggcgatgcaagcaaagataatattggtactgatttatcatctactatcgtttcggtccattgcatagcttcttttacctcacttaatgagtttttgagacacagaatggtaagaatgcgttttttgaattcattaatcccaaaccttacatcttccagtaccgaagctgatagggaagaagaagaaaattgcttggatcatatgagaaaaaagaactttgactttttttatgataatgaaaaagttgacatggagtctacagtatttggtgtgatatttaatacattcgtcaggcgaaatcgtgacttaaaaactttatgggatgatacacatacaatcaaattttgcaaaagtttagaaggtaacaatagagagagtgaggcagccgaggaagctaatgaggggaaaaagttaagagatttttataaaaaaagagaattcgcacaggttgatactggatcttcagcggatattctgacattgctggattttctacatagctgcggtgttaaaagcgacagttttatcaactcaaaactaagcgctaagctcgctagacaactagatgaaccattggtagtagcaagtggagctttgccggattggtcactatttttgaccaggagattcccatttttgtttccgtttgataccaggatgcttttcctacaatgtacttcatttggttacggaagattgattcaactttggaagaataagagtaaaggctcgaaagatttaaggaatgacgaagctttacaacaacttgggagaattactaggcgtaagctgcggatttcaagaaaaacaatattcgctaccggtctcaagattttatccaagtacggaagtagccctgacgtactggaaattgaatatcaagaagaagcaggaacaggtttaggaccgactttggaattttactccgtagtttccaagtattttgcaagaaagtcgttaaatatgtggcgttgtaactcttatagttacagaagcgaaatggatgttgatactactgacgattatattaccactttattgttcccagagcccctcaacccgttttccaataatgaaaaagttattgaactttttggatatttggggacatttgttgccagatcgttgcttgataatagaattcttgactttagatttagcaaagtcttttttgagttattgcacagaatgtctacgcccaatgtgacgacagtgccgagcgacgttgaaacctgtctgttaatgatcgaattggtagatccgttactcgcaaaatcccttaaatacatagtagcgaataaggatgaaaatatgaccctagaatcgttgtccttgacatttaccgttcctggaaatgatgacattgagttgattccggggggttgtaataaatccttgaactcttctaatgttgaagaatatatccatggcgttatcgaccaaatattaggtaagggcattgaaaaacagttaaaagcatttattgaaggtttttcaaaggtgttttcctatgagaggatgctaatactttttccggatgaattagtggatattttcggacgagttgaggaagactggtctatggcaactttatacacaaacttgaacgctgaacatggctatacaatggattcttcaatcattcatgattttatatcaataatatccgcgtttggtaagcatgaaagaagattatttttgcaatttttaacgggatctcccaagcttccaattgggggatttaaaagtttgaacccaaagtttacagttgtgttaaagcatgctgaagatggcctaacagcagacgagtatctaccaagtgtaatgacatgtgctaattatttgaaattgccgaagtatactagcaaagatattatgcggtctcgtctttgtcaagccattgaagagggtgcaggagcttttctactttcctaa

SEQ ID NO: 80496 - DNA, 294 bp, Saccharomyces pastorianus
atgtatcatcccttcatgtacatgtactttaaacagaatgataggaaactagaggggttagccaataaattagctacattcagaaacataaaccaagagattggagaccgagcggtctctgacagttctgtcataaaccaaatgacagattcattgggatcgatgtttaccgatatcaaaaattcgtcctcaaggttaacccgatcattaaaggctggtaatagcatatggagaatggtgggtttggcgttattaatattcttcattctatataccctgtttaagttattttag

SEQ ID NO: 80497 - DNA, 1221 bp, Saccharomyces pastorianus
atgcctgcaggtctatccttgactttatcagataaaaatctactgcgaaatctagacgagaaggacttgagagctttgaatggtaccagagtaacagatgagatattagaactggtaccaaagccgaatgttttcagaatcgctttaagagctattaagctatgggcccaaagaagggctgtttatgctaatatttttggttttcctggtggtgtggcttgggccatgctagtggctagaatttgtcaactataccctaacgcctgtagcgcagttatattgaacagatttttcatcattttgtcggaatggaattggccacaacctgttatcttgaaaccaattgaggatggcccgttacaagttcgtgtatggaatccaaagatatatgcccaagacaggtctcatagaatgcccgtcattacaccagcttatccatcaatgtgtgctacccataacatcacggaatctactaaaaaagtcattttacaggaattcgtaagaggcgttcaaattacgaatgatattttttccaataagaagtcctgggccaatttattcgaaaaaaacgattttttctttcgatacaagttctatttagaaattactgcatatacaaggggcagtgacgagcaacatttaaaatggagtggtcttgttgaaagtaaggtaaggcttctagttatgaaactggaggtgttagctggaataaaaattgcacatcctttcaccaaaccctttgaaagtagttattgttgtccaaccgaggatgactatgaaatgattcaagacaaatacggtagtcataaaactgagacagcactgaacgcccttaaactggtaacagatgaaaataaagaggaagaaagtattaaagatgcaccaaaggcatatttaagcaccatgtacataggccttgactttaatattgaaaacaaaaaggaaaaagttgacattcacattccctgcactgaatttgtgaatttatgtcgaagtttcaatgaggattatggtgaccacaaagtattcaatctagccctccgcttcgtaaagggttacgatttgccagatgaagttttcgatgaaaatgaaaagagaccatcaaagaagagtaaaaggaagaatttagatgctagacatgaaaccgtgaagagatctaaatcagatgctgcttcaggtgacaacatcaatggcacaaccgcagctgttgacgtaaactaa

SEQ ID NO: 80498 - DNA, 228 bp, Saccharomyces pastorianus
atgagctctcaaaaggtttttggtattactggacctgtttccaccgtgggcgccacagcagcagaaaataaattaaatgatagtttaatccaagaactgaaaaaggaaggatcgttcgaaacagagcaagaaactgccaatagggtacaagtgttgaaaatattgcaggaattggcacaaagatttgttatgaagtatcgaagaaaaaaatatgtcagacggatggca

SEQ ID NO: 80499 - DNA, 483 bp, Saccharomyces pastorianus
atgtatttaaaggacttaaagcaacctcgttcttcaccaaaagttttccttgatactcataaagagtcaccattgagaccaaaagttcggccattgagcgagcaaggtgaatatgaatccagaaaactgtggaaaaaggttacagatgcgttggccgttcgcaatcatcctgttgcgacagaagaaaaatttcagattgaagatcaccaaagacagttagccaaaaaacgcattgaagatggcgtagaatttcatccaaagttgtttagaagatcaaagcctggcgaagatcttgactattgtatttataaaaatatccctatcgacgaggaccctgagaagcaaatacgaagcatattgcaaatagtacctattttacctggtcaacaatttaccgacaaatttttcatccccgcatttgagaaaataaaatcacaaaagaagatgattgaaaacgaaaagcagaacccagcaaaacaatag

SEQ ID NO: 80500 - DNA, 810 bp, Saccharomyces pastorianus
atgggctccaaaaaactgaccgtaggatctgattcgcaccggttgagcaaatccagtttttcaagtaataagtcgtcacattcagcaacaaaagatcagccaattgataccgacgatattgatgaagacgatgaatctggtcataatattatcttgaacatcatctcacaattgagaccaggctgcgatttgaccaggatcaccttgcctacttttattttagaaaaaaaatcgatgcttgaacgtgtcacaaatcagttacaattccctgagtttttgttacaggcgcattcagaaaaggaccccttgaaaagatttttgtacgtaatgaaatggtatttggcaggctggcatattgctccaaaggctgtaaaaaaaccattgaacccagtccttggtgaatattttacagcttattgggatctaccatacaagcagcaggcatattatatatctgaacagacaagtcaccaccctccagaatgtgcatatttttacatgattcctgaatcttcgattagagtggatggggtcgttattcctaaatctagatttttaggtaattcaagtgcggccatgatggatggatcaacagtcttgcaatttctggacataaaggatggaaacggaaagccggaaaagtatgttcttacacaaccaaatgtatatgtaagaggaattctttttggaaaaatgagaatcgaacttggagatcatatgataattaaatctcctaacttccaagctgatatagagttcaagacaaagggatatgttttggaacttacgatgcaatcgaagggactgtaa

SEQ ID NO: 80501 - DNA, 1257 bp, Saccharomyces pastorianus
atgagttatgacaagttgcagatcgttgttgaacaatttcaattgacaaatggagttttagatgacggagagattttgaaacctagaggcaacaaattttctagtagaaaattgtcttatttcgttggtcaaaacaatactctttttaggaaccctttgcagttcgaaaaaaaccaattaatttctgcactattaacctctttaaccaataatcaaaagactatatcatcagttgacatgttcgaagtggttgacgctaataatgaagttcaatatttgcgcaaaagaacgataagtggtaaaactctgtctccagctactggttatgaagaagaaaacgacggtgactgtagtgtgaaagataagaagtgggaaggtaaaatcgaataccatgagaacaagaaagttagttctgaaaactgtagtaaggataccgatgataaaagtggcagtaaaaaagaacgaaatacgaaggccccattatttcacactgccaccgaaattcatatgacaaggtggagttcttggaggccaaagaaaatttttactcgttacttagtgaatgaataccaaagtcctaaaataataaccacagtgaacaggttttacaggaccaagactgatactgaaacagggacgactttaatcacgtcgacaaaagccaaaagaagatggtttccaagaactaaaatcgtaacaagtaccgcaacttcgacgtttttgagtatcacgactactacgacaacaaatgctatcgcaacgaagtcgttagtagcagtacttaatccggatggattgaataaaaaagcgggaataaattttggtctctttagcgctaatggtgagctcgcttcaccagatgaaggaggtacaccaacagtagtaagaagagataagatttctgatccaggcgctgctaatgagcaggccacactgttctctacaaccttttcgcaagtgccgcacttaccagaactagattctggtgaattcatatcggcggcatctcaattagacaaaaggattttcatattcactgccatcacagtatcaattactacattgatgatgttggggttttcttaccggtcgcgggtatcttttagagatcatagtatcgatgactcagatgatgataacgattggtcagatgacgaagttgaatttgacgaagagtatttctattctcttcctgtaagcataccagaaaaggggatcagcttagataaaatggcgcaacaacttggtgtagaatag

SEQ ID NO: 80502 - DNA, 198 bp, Saccharomyces pastorianus
  modified_base (67)..(67): a, c, g, t, unknown, or other
acgagtcgctatagggatccgcacaggcaactactcaccaaactgcaccaaggactaatacgtttanctctgcttacatcaccggattcagcgaaaatatcaaaggaacagttaaagaagttgcactctaatatactaaatgaaattttcagccagtcccaggtaaacaaaccaggccccttgacggttcccttttaa

SEQ ID NO: 80503 - DNA, 393 bp, Saccharomyces pastorianus
atgggagccgtactcagctgttgtagaaaccattccggcgaagagaatgaagctttgctgagggaacagcaggcaggctatggaagtcaaggaaacacaaatgacgaatacgatgccgaacaaatgcggttgaaggaacacgaacagaaactgctggccagggaacaagagttaagagacattgttgcaaacaccaacgataaactaatagacatatcgatgataaacaatagtggcattgtaattcaagggacagacctgcaagaagctcttgataaaagacaacaggaagaaggtggagattcccgggaagacgaaaggagcgcaggtgatgacaacctcagtgggcactcagtgccttcaagcggatccgcacaggcaactactcaccaa

SEQ ID NO: 80504 - DNA, 342 bp, Saccharomyces pastorianus
atgaattcaactcctggaaaaagaaaaaatggccaagcgataccgtccagtttagaaagaacaccgcagctcaagaaagtcaaggttaccaggtcgcattcttcaccttcttcttcttcttccatgtcacttgaatcttcattggatagctcttcctcagatgattcggatgatgattctgattcgaggaacgtgcaagttaaaaaaattaatttcaagacaagtcatggaccagctggaaattctaatggaaaaccaatgctggatgtggatgacaatgaaataaatacaaagaagtaccaaacacctaaatatgttgaaagtgatgaagacgaccagtaa

SEQ ID NO: 80505 - DNA, 954 bp, Saccharomyces pastorianus
atgagaccttacaaggaacacgaggaaaggaaaaaacggagagaagaagaagccaaggtgaggatgcaaggtgaggaacaggagaacattatgatagagagaaaaaaaatagatagtattgaagttgatgcgtcatcgggattgaaaaatatcataaaaacacctctcgccaatagggttgtcaatacttttaataactgcgctgctgtggtaataggctatgtaacagaagtggataaagtaaaggacgacaatgaagagaagaataacgacagacctaaaattgcaaacgacggaatagctcaaaagtctagaagcgaaagtgaagataatgcaggaacaccgatggacaacgcgtactttcaacccgaaccccaagataatgaccaaaacaacatatcttggaatacgactatgaaagatattgatccaatttacatgagtgaaagatgtgctagagtttggagaaaggagcaacaaatgctaggattggagaaggctcagacatttgagaaaaaatattgtaaagatcagatggttatggacgaaaatcaggtcgaagaacctggtaagcactcggagagacgtacaaaaaatcaggtagtcagacctaggaccaaaatagcatcttccgccagtaaaaatgataatagtaataataaaaatagtaagtcatgtaaaaattgccataaagaggaagcgcacggtctagtgagagaataccttaagattaaactcaacatatcacctcacggagaaaggaatcagcgaacaaaggacaagagaagatgtataatgaaatacaatgcgagcagtaacaagatcaacaaaatgcctggggagagtgaagtacttgggtcaactattttaacagatatccactttaaggatgtcgtaactgtgaaatttagggattttaaagccaaatttagaaaagtcaaaataaacgcttga

SEQ ID NO: 80506 - DNA, 414 bp, Saccharomyces pastorianus
atgcttaaggatctggggagggaatttatgatattcgagaacttgaatgtggaagatttcagagaatctaaaaatatgattcacagattttatactatggttatttctttaagacagattatggaaattgggcccttagtcaggcgtagccctgctgttttagttgtggaattcgattgtccggtagaggattgcctagatgaactggatccgttgcatccattgaacagggcctatatatttattcataaacaatggacctattatcatcaatattatatagttgaaaaggtaaaaaaggtgattcttgatatggccccggtaaaggaagatgattggagcatccttcacaaggttgtttattcagaaggttttgtcgaaagacgatataaaaagaagaaatacctcgggtga

SEQ ID NO: 80507 - DNA, 216 bp, Saccharomyces pastorianus
atgattggagcatccttcacaaggttgtttattcagaaggttttgtcgaaagacgatataaaaagaagaaatacctcgggtgatatttacattccacaaccattaatgaaaagcaataaaatcactactatctcaaatttttcccaacttaccaaatttccaacgtcagagtttacagattcaacgctacagcagcgtgtgatccgcagaacttga

SEQ ID NO: 80508 - DNA, 759 bp, Saccharomyces pastorianus
atgctgttactaaaacgaagcaaagaaaccagacaagagagttggtttataaagcaagtacgtcttctgttgatggaattagtcgctagaatcggctggaacgccttacttcagctaagatctgacgttttcgttatggagagtaaattcaaaatgatagaatcttcggacaagctgtccacagaattacgccagaagaggctctgtcagagatggtttgatgctatgtttctgaacgtttacgaagatttaagtattagcacttcatctcaagaaaataaggctacggcgaaatacagcgggttggaatgggaactacttggcttagctctgcttcgagtgagtgacttacccgatgcagtagcgtgtctacgaactagtattttggcaaggtttgaccctattagttgtcaccatctgttgaacctttatttaaccatggatttcaatgatgagtttatgagaaggtttgacgtcgatatcattttagatctattagtgaaattgatctcctttcggatacgattctatgatagatttcagatattttcccttcaagtactaaggaaactagagggacagctgggctccgaaattattaagaataaaataattaattctccttacgggcaagctggcatcacttcggtgatagattatatgcttgaatgcctctctaaaaatcggaatgacgccagcctagcctatgaacgccctcttccagatcttccttccactatcaaacctctggcagactaa

SEQ ID NO: 80509 - DNA, 1515 bp, Saccharomyces pastorianus
atgagttttttatgggggtctacaaagtccaagaaaggcaagaataaaaaggctgcaggttctcttccgtcaggtgttgttccacagcaacgtgtgaaaccaacacgtaaaaacgttcctatagattatccaagaactttggaaaaagtacatggtgaaagtttaatctttaggacgtcccttttaagtgaattggtgagcactggtaaatctggtattggtcctccagacttgattcattgtacagagttagataaatttcacgatgagaaaataggtgaattcttttacatcacggggatcgacgcctcgagcgtctctatgccaattgcatttttgaagctgataaaatggaatgatggtaagaaactaaaatcagcatctttgaagaacgacgacatcacaacctactgcactttcaatatctttcaaaaattggacattagattaagatatgaatctgaagatgtttatcaagttaatatcgttgactgtttaaatggcaacaatgaaataccgttgagtgatcttatttgggaagaaactttcgttagctgttgcataagaagcgtaattattaattcagattttgaaagaaaaatacctgggctagtggaattaccatttgtttttgagaacagatgcgcgagtgattataaaagggtgatagattcgttatgcaaatttttgccaagatttttagaatgtggttgggattctacaaagagcgtctatgcaacgatactgaataactacctaactgaatcattattagtatttctgtctataactccagaattcataacagactatgcgatccaggttttagacaacttgatgacgaatgacccgtcaaattctagatattacgctattgtaattatttctatcatggagcgaagtaatgaccgcgatgtagaaatgatcaaacggatacacgagatattagacctattactacccgtactgtatggattgccatccgatgaaccttacatttctgatttgatcaattgcatcaccgatgtattaagcatccaagcaaggtttctattgaacaataacgactatgaactttctttatccatttccacattggccacgaatttatcttctgataattttgaatcttggtatctgttatctaaaggctatattttttcacaacagtatgataaggcactgctctcaatcaattcgatgccctgtttagcggaatatgatatcgttaaacaagcccagattaacgcttttaagttttatatgaactactacaaggcaccactatgtcatagcagagaacactgtaccatgacatcacacgagttaaatcacctcatgaatattatgcattatgaaaatgagttggagttgaagacaataatatttggacgcactgtaatgcccaatgaatctaagtatggatgtattgaagagatatggaataaatcctgtcttgaattaggacctatttgtggaccacagagtgacaatctcataaactttgtatcttag

SEQ ID NO: 80510 - DNA, 4305 bp, Saccharomyces pastorianus
atgtctcccttgaaaaatgacgacgacattttggatattaccaatagcaaccataaccatcgtggtaacgacgacgacaatactggcgagaattctgataggagaccctctattccaaggagctccagcattataagcatttcttcgaatgtggcggaatttatgtatagcaggaacgaaaactctttatttagaatacacttggaatatgggattgatgaagacaggctcaaatggtctattataagaagttataaagatatcaaatcactacatcacaaattgaaaatcgtcgcgttccaacaactcactataagcaagctttatagtgataacaacagatatcattcgttacaacttccgcatttcccccattataaagaaatggttaaagaaagaaatgtaatggagaaaaaagcagaaaataaaccatcctctgcagcctcagctcctcatacatcggaaaataacgataacgataatggcagcaacattacatcgttagaaactttatcatcttctgaaatatctgagtttaatatagataacgtcaaaatgaaacatttacaagacttaattgacgaacctgacgatttctcccaaccgatacatttgaggctagaaaggtatttgagactactgaacattgcattatgtttgagacctcatgcaaatagattgtttgaattttacgaattatctcccttaggcaatttattaagtcgtgaaagtgggttccagggcaaacaggggtatttagtaattagatctactgccaaggcccaaggttggagagtttctcattttggtaaacatgcgtttaaagacatgatcgacagacatactaccaaatggttcctggtaagaaattcttacctaacttacgtgtcggatctttcttcgacaactcctttagacgtattcttaatagattggaaatttaaggttcgattttctgggaacaagaataacatacttgataacgaaaacgagatcaactggatcattcatgatccaaatttagaaataaatgacgaactagaagagttcggtattgaaaatgatgccaataatgtcctagacaagaatggaaaatcgaaaacacaccaaaagaagtccaatatatcttcaaaactattattattgaccctagaaaacagtgaaaggaaactgaaaattatttgcaaatcagagagtttgttaaagcaatggatgagttcaattatcaaaatgtctacctcaacaccttggtcgaaaccaaatagatttggtagtttcgcacctgtgagaacaaattcgttttgcaaatttttggtagatgggcgtgattatttttggtcgttaagcgaggccctcttaatggcaaaggatgtcatatatatccatgattggtggctatcccctgaattatacttgcgacgtccggtgaaaggcaaccagggatttagaattgatcgtatgctgaaaagctgtgcagaaaaaggtatcaaaatttttattgtgatttataggaatgtggggaatattgttgggacagatagtctttggaccaagcattctatgctaaatttacatccaaatatacatatcataaggtctcccaatcaatggctacaaaatacatatttttgggcacaccacgagaagtttgtcgttattgatgaaacatttgcatttattggtggtacagatttatgttatggtagatatgatacttttgaacacgttctacgagatgatgcagaatctttattagatcaaaattttcctggtaaggattattcaaatgccagaattgctgattttcatgatttagataaaccattcgaatcaatgtatgatagaaaagtcattccgaggatgccatggcatgatgtgcaaatgatgactttgggtgagccagcaagagacttagcccgacattttgttcaaagatggaattacttattgagagctaagagacctagtaggttaactccattactaaccccgccttcagatttaactgctgaagaattgaagagtttgccgatgttcgaaattctacgcgaaaaatcgacttgtgaaactcaaatacttagaagtgctgggaactggtctcttgggctaaaggaaacggaatgctcaattcaaaatgcttacctgaagttaattgaacaaagtgaacactttatttatattgagaatcaattcttcattacatcaactgtctggaacgggacttgcgttttgaataaaattggtgatgctctcgttgataggatagtcaaagctaatcaggagaaaaaaccttggaaagcctttattcttatcccactaatgccaggattcgattctccagtagatactgcagaagcctcaagtcttcgtttaattatgcaattccaatatcaatcaatttcaagaggtgaacattctatatttagtaaactgaagaaactaaatattgacccagctcaatatattcagttcttttcactaagaaaatggtcgacttttgcgccaaatgaaagattaatcaccgagcagctctacgttcatgctaaaattctgattgctgatgacagaagatgtattatagggtctgctaatattaacgaaagatcacaactgggtaatagagatagtgaggtggcaattcttattagagacaccgacttgataaagaccaaaatgaatggtgacgattactacgcgggaaaatttccttgggaattaaggcagcgattaatgagggaacatttaggttgtgatgtagatcttgttgagtttgttgaaaagaaatttgaaaggtttgaaaagtttgctgcaaagaattatgaaaaacttcataccctaagtaaggagggagatagtggtaacaattggagcgatcgagaaatgatcgattccgctatgattgagctaggttatcgtgaaatatttggttgtaaattcagccctcaatggaagagtagtcatggaaacagtgttgatgatggaagcactcagtgtggcataaatgaaaaagaagtgggaagagaagatgaaaacgtttatgaaaaactcttcaattctgtggactacggtaaatcatcacgtaagagaacgcctctgcccaaacataattttgcatctttagggctaacattcaaccacagggcaggaattgaaaatgtcggtatacgagaccacaaagtcttaagtactgatccaagattaagaaagaatgatgaacataaaaaagaggttgatggctacggtcccgattgttggaaaaaggaatccaacaaaaaattcaaggccgatgcaactgaacagctaaaggagtgggcattgaactcattggcctcgaaagttcttgacgataaagaaatgataaaatcagaaattccagaaggattttcaaattatttgcccaatgagaaagatctagaaatgtatctcacggataaaactgttaccaatagaaacaagtggagtatgctcaaaaggatatgctacttgcaatatttatctcataaactcgacgaaagaaaaacacagaggttgaagaaaatcaaagatatgagaagacatttaagttcaagcacagaaagtaccagaaatgggtctaatagtctgccattgaacgaaaagagcaatgaaggagaaagcactaacgtcgaccaagatatcgaaggcgatgaatatcatagactgcacgaagatattttgaaaaatcaagaactagatgatggttcactggacgatctactttctcagataattcctaagatcactaactttaacagtggtgaaattgatgacgcaaaaaaagaagagttattgaaactcaacttcattgacccgtattccttcgaggatcctcttatttcttcgttttctgaagggctatggttcactatagccttgagaaatacattactctataaattagtgtttcattgtcaacccgataatgctgtacaaaattggaaagaatatggagaatttactgaattagaacaagaatttcaaataaaccaggaaaagttgattgacttagaggctgaaaatattaattctactactacaaatgttgtagataaggatagggaaaaggaaaaaatgagaaaagccgctgaattgagaatgaagttatccggcagtttgctttatggattcaatcaaaaggtttttgacaaacatacggcgcagagaatcttggaaaggatccacggtcatttggtcattttcccaaccgaatggttagctaaagaagttgagagtagaaactggatttttaactcggatagactttctccaatggaaatctacaattaa

SEQ ID NO: 80511 - DNA, 687 bp, Saccharomyces pastorianus
atgtctaacgtgtcaacagcgtctggaactcacttcgctccacctcaggcagatagatcggtgactgaagaaatagatagagtaaattcgagaccagatgagttagaaaaccaagaagtattgcggcaattacctgagaatggcaatctgactagcagtttacaaagagaaaaacgaagaactcccaacggcaaggaggcggagaggaagcatgcattgcccaaatcctttgtagatagaaacctgagtgatgtgtcaccgaaccactcattagaccatataatgcactctaatgaacatgatcctcgtcgaggttctgatgaggaaaatatgcaccggctctacaacaatctccatagcagtaacaataatgttcattctaagcggaattctaaaagagaggaagaaagagcccctcaaaggcgttcttcttctgtagcttacacccaacagcagttcaatggctggaagaaagagtttggccacgcttttaagaaaatctctgctattggtagactgaaatccagcgtaaattctcctacaccggctggaagcggccatcgtcataaccagcaccagcatcaacaagtaaacgaagaagatttgtacacacaaagactagcctctgatttattagattcgttattggcaggatgcccggcctcattgttcgcaagcacacaattt

SEQ ID NO: 80512 - DNA, 420 bp, Saccharomyces pastorianus
atggtgagcgggtccattaagccactgttaaaaccaaaggaaaccgttcccaacacaaaggagtgctccacgcagcggggaaaattttctttggacccctgcgaacctagtgggaaaaactacctctatcagatcaacggttcagatatatacacgtcaaatatagagctgacaaggctgcctaatttgtcaacattattagaaccctcacctttttcagattccgctgtaccagaaatagaactaacttggaagctacataatgaggaggaggtaatcaaattgaagaccaagataagcgaattggagttggtgacagacctatacaaaaagcacatattccaactgaacgaaaaatgcaagcaactggaagtggaactacactccagagcttcagtacaatctcacccacaacattaa

SEQ ID NO: 80513 - DNA, 213 bp, Saccharomyces pastorianus
atggtgcttagtgattcgttgaagctgccctcgcctacactttcagctgctgctggagtggatgattgtgacggagaggaccaccccacgtgccagaattgtttcactgtcaaaacgcccctatggagaagagatgaacacggtactgttctctgtaatgcatgtggcctcttcctgaagttgcacggggaacccaaggcctatccagcttga

SEQ ID NO: 80514 - DNA, 612 bp, Saccharomyces pastorianus
atgaaaagaaatagaaggctgggcagaccaggggaaaaaccgatcatccatgtgcccaaggaagtatatttgaacaaagatcgtcttgatttgaacaataaaaggagaagaaccgccactacaagtggcggtggtttgaacggttttatttttgataccgatcttataggatcctctgtcatttcaaattcaagctcaggtacattcaaagcattatcggccgtgttcaaggatgatccgcaaattcaaaggctcctatatgccttggaaaatggaagcgtgctcatggaagaagaatccaataaccaaagaagaaaaaccatctttgtcgaggacttccctactgatttaattcttaaagttatggccgaagtaacagatttatggccactaacagagttcaagcaggattacgaccaattgtaccataattacgaacaactttcctccaaattgcgcttcatcaagaaagaagttttgcttcaagatgatcgcttaaagactatgtcacagtaccatccttcttcttctcacgacgttgctaagattattcgaaaagaaaaagatgaaattaggcggctagaaatggagatagccaacttgcaagagtag

SEQ ID NO: 80515 - DNA, 126 bp, Saccharomyces pastorianus
atgtatattaatagggcggtggactctatgtccacactctatttcaagccaccaggaatttttcataatgccatcctgcagggagcaagcacaaggcaagcattagaaaagacattactagactaa

SEQ ID NO: 80516 - DNA, 699 bp, Saccharomyces pastorianus
atgttgaggaccggtgagagtgttttccgcaataatcagtttttgaatccagacaacatcacttatatcttcacctctccacgtttgcgtgccaggcaaactgtggatttggttttgaaaccattaagcgacgagcaaagagctaagatccgtgtggtggtagacgacgacttgcgagagtgggagtacggtgactacgagggaatgctgactcgagaaatcattgaattgaggaagtcacgcggtttggacaaggagaggccatggaatatctggagagatgggtgtgagaacggtgagactactcagcaaattgggttgagactttcccgcgttattgccagaatccagaacttgcaccgcaagcaccagagtgagggcagagcatcagacatcatggtctttgcgcacggacatgcattgcgttattttgctgctatttggtttggactgggtgtgcaaaagaaatgtgagacgattgaagaaattcaaaatgtcaaatcttatgatgacgacacagttccatatgtgaagttggaatcttacagacatttggtagacaatccatgtttcttactggacgccggtgggattggtgttttgtcatacgctcaccacaacattgacgaacctgcattggaattagcaggtccatttgtctcaccaccagaggaggaatcccagcatggcgatgtgtaa

SEQ ID NO: 80517 - DNA, 240 bp, Saccharomyces pastorianus
atgtatacatatgtatataaatatatgaatacggttatgaccactcttgcgaagtgcgttgggattatgactgcttgcattcaggagcctgttccggcctgccagcaaaatcgtcttgctcttcggcagattccccgtcgtcatcctccaagccgtgatcatcatcatcttcttcgtcttcgtcctcgtccgcttcttcttcgtcctcctcgaactcgaattccaaggctgcgccggtaa

SEQ ID NO: 80518 - DNA, 90 bp, Saccharomyces pastorianus
atgcgctttaacatatatttcagcttacacacttacatgtatatgcatatatatatatatctatatatgtatgtatacatatgtatataa

SEQ ID NO: 80519 - DNA, 2997 bp, Saccharomyces pastorianus
atgaaaagtattcaagatatcgaacctaccattttagaggcacaacggggtgtaaagaacataaaaaagcaacagttgacagaaatcagatcaatggtcaaccccccctctggtgtgaaaattgttatggaggctgtttgcgccatcttgggctaccaattttccaactggagagatatccaacaatttattagaaaagatgactttattcataatatagtacattatgataccaccttacatatgaagccccaaattcgaaaatatatggaggaagaatttttgtcagatcctaattttacttatgagacaattaacagggccagcaaagcgtgtgggccgctatatcagtgggtcaatgcccaaataaacttcagtaaagttttagaaaacgtagatccgctgagacaagaaatgaaaagaatagagttcgaatcattgaagacgaaggccaatttacttgccgctgaagaaatgacacaggatttagaagcaagtattgaagtttcaaagcgaaaatatagtttgttgattagggatgttgaggccatcaagacagaaatgagtaacgtgcaggctaatcttgataggtctatatctttagttaagagtttaaccttcgaaaaagaaaggtggctgaacactacaaagcaatttagtaagacgagccaagagctgattggaaattgcataatttcatccatatatgaaacatactttggtcatttgaatgaaagggaaagagctgacatgttagtcattttaaagcgcctactaggcatatttgctgttatatatgatgtaaattatcgtttcatcgattatttggtaacactagatgaaaaaatgaagtggcttgaatgtggcttggataagaacgattactttttggaaaatatgagcatagtcatgaattcacaagacgctgttccttttcttttggatccaagctcccacatgataacagttatttcgaattattatggtaataaaactgtacttctcagttttcttgaagaaggttttgttaaaagattagaaaatgcaattagattcggaagtgtagttataattcaggatggagaattctttgatccaattatatcaagactaatctccagagagttcaatcatgccggaaacagagtcacggtggagattggtgatcatgaagtagatgtttcaggcgattttaaattattcattcactcttgcgatcccagtggagatattccaatattcctcagatctagggtaaggttagttcattttgtcacgaataaggaaagtattgagacacgaatttttgacatcactttgacagaagagaatgcagaaatgcaaaggaaaagggaagatttgataaaattgaataccgaatacaagttgaaactgaagaatctagaaaagcgacttttggaggaactaaataactcacaggggaatatgttggaaaatgatgaactgatggtgactttgaacaacctgaagaaagaggccatgaacattgaaaaaaagctaagtgaatctgaagagtttttcccacagtttgataatctggtagaagagtattctattatcggtaagcatagtgtcaaaatattctctatgttggagaagtttggtcagtttcattggttttacggcatttctataggacaatttctatcatgtttcaaacgtgtcttcattaagaaacctagggaaacaagagcagctaggacacgggtagatgaaattctttggctattatatcaagaagtatattgtcaattctccaccgctcttgacaaaaaatttaaaatgattatggctatgacgatgttttgtttgtataaattcgacattgaaagtgaacaatataaagaggcagttctaactatgattggagttctctctgaaagtagcgatggcgtaccaaaactaaccgtagatacaaataatgatttgcggtacttatgggactatgttacaaccaaatcgtatatatctgcgttgaactggttcaaaaatgagttttttgttgatgagtggaatatcgcggatgtggtagccaattccgagaacaactattttacaatggcaagcgagcgagatgttgatggcacattcaaattaatcgaattggcgaaagcctcgaaggaatcgttaaaaatcatcccgctagggtctatagaaaatctaaactatgctcaagaggaaatatcaaaatctaagatagaaggtggttggatattattacaaaacatacaaatgtcgctatcatgggtgaaaacgtatctgcacaagcatgttgaggagacaaaggcggcagaagaacatgagaaattcaaaatgttcatgacatgccatttgactggtgataaactacctgccccattgctacaaagaactgatagatttgtgtatgaggatatcccaggtatactagataccgtcaaagatctatggggttctcaatttttcactggtaaaatttcaggagtatggagcgtgtattgtaccttcctattgtcatggtttcatgccttgatcactgccaggacccgattggttcctcatgggttttccaagaagtattactttaatgattgcgactttcaatttgcctcagtgtatttagagaatgtattagccaccaattctaccaacaacattccttgggcacaagtgcgagatcacatagctacgatcgtatacggaggaaagatcgatgaagagaaagaccttgaagtggtcgctaaactttgtgcgcacgtattctgcggctcggacaatttgcagatcgttcctggggtacgaatcccacagcctcttcttcaacaaagtgaagaagaggaacgggcaaggcttactgccatactgtctaatacgattgagcctgcagattcactcagttcatggcttcaattgccaagggaatctattttggattacgaacgtcttcaggctaaagaggtggctagctcaactgaacaacttcttcaagaaatgtag

SEQ ID NO: 80520 - DNA, 2040 bp, Saccharomyces pastorianus
atgtgcaagaatgaggcaagacttgctaatgagctgatagaatttgttgcagctactgtaacgggtataaagaattctcccaaagagaatgagcaagcattcattgattatctacattgtcaataccttgaacggtttcaattttttttgggattattggatgggagagagttcgacacgttgtttgtcttcctttttgaagagctggatagaacaatagttacaatagacattggtgaagaggctatatatgatgccaacttggcgaataaaaagtattctactctattaattattaaatctagaagtgttattgtggatgcagaaccgattgcaacacaaataagtgccttatacttacctggtccagtaaatgcggggaacctggcctcaattatcacacatggcgtatcgtctgtgtttggccaattgataaaatcagatacaaagacatattctgtcgaaactatagataaaacgaggaggaaacttgacgacatttctaaacaatttcaacagttacatacctcaattgaaacgccagatcttttagcgatggtccctagcattatcaaattggctgtatcaaaaggggctacttcacatgattatgcaaactaccttcctagtaatgatttggaaagtatgagatttttgaacattttacaaagcattgcaaacaaatggtttttggttcttaaacaaacattagccattgacagagatataaaaaatggttcttttttagacgaagttgagttttggtcgaatttctacgaagtactgaagtcgctaattgaacaaacacaaagccaagaatttcaggtgtgtctatccgttctaacaaacgcaaagagatttcataatttaacaaatttattgaatgaaggttcactttcagataaatttaagctagcggataaatataaccaatttctatcgtcaatccctatcgatgaggttcgccaggcaagcaatcttgaggacttgcaggaactatttcctgttttagcatcttctttgaagaagttcagatattcaggttatccagttcaaagatttgttgtgctgatggacaaaatttcacaagaagtcatggatgcaattctaagtaatctttcagatttatttcagctagagtatggttcttttttgggtttatatgaaaaatcagcaggcatgatagaagaatgggatgatattgtccaggatgtcaatcttttaataagagaggatcttaggaaaagagcaccacaggagctacttatacaaaagctaacatttacaagtgcatccgtaaaggctactttggatgaaattttaagcacacgcaagcgatttttttcattggcagaaaccattaagaatatatccccttctacttatcacgaagaaatacagagattgtatcatccatttgagcaaatccatgatatttccgtgaattttcgattgaaattggagcaagctgaaagtgaatttagtaaaaacatgctcgatttggaaaagaagttacaaaatatgttggcaagttttattgactctgatcactgtccaaccgaaaaattaagttatctagtaaaattcaagccattaatggaactttgtcctaggataaaagtaaaagtactagagaatcaacagatactgctacttgaaataaaaaaagatatacggcaactggagactggtttagagctcttgcctaaaattctgcacgtggaagctttaaataacattcctcccatatctgcaagaatttcctactttctgaatgtacaatcccgtattgacaatatagtgcagtatctcgaagcactttttggttctaattggaatgacacacttgaagggcgttcgatatcaacttcgatagtacaactacgtaaggaaacaaatcctcacgatgtgttccttcactggttggggaattttcctgaacaagcaacagcaaatcttttggcgacacctattttaaagcttataagaaataatgaggatgattatgaactaaaaaggtcaacttcgattttgccttag

SEQ ID NO: 80521 - DNA, 1935 bp, Saccharomyces pastorianus
atgatttatgaactaaaagtcaacttcgattttgccttagctgctgcttactcagaattaaggagtttaacctatatggcttttcaagtgcctagccacatagtacgtattgcgagaacttacatgtatttgtatccgagggcaataaacttggttgaactaattcaaacttttttttcacttagtaaatcactttcctatacattttacacgaacatctttctgaagagaaacgtgcaaactgtatggctactattacaacaaattctgataacgccgtgggaatctttacaagaggaaagttccgaaatgtcctgttcggtacacagcctagcaagattggaaaagtcaattgatggaattctttctgattatcaaatattgaaaaactccgagcctcagtttgccaaggaattttctggcctgaaatcttttgacggtactgctgatgatctgcacgaagtggaggaaataataagcaatattcaagctatttttgaaaacctttttatcaagggtcttgctaatgttagtgaccatatttccacgtttaataacttaattatcagcataatcttggagaaagtacgcttaaatttgaaaaaaatgcatttcccaaagcatgtattgaaactcagtttcaatgaaggtagaataacatcatctccatcgttagctgctatgaaacgttctttactgaaggatattgaggctcttttaaacaaagttgttttaattaattttttgcatgaccctgatcatcctctttccactaacctgacttttaattcgctagtcatcaaactaaaagatgatatacaaaattgtatagaacaggttcaaaatttacattgtaagataaattcttacgtcaaagaatggcaaaagatggaatttctctggcaaattacagaggaagcgtttttagaagtagtcgataacagtacacaaagatgctttggaattttaaaaggccttcttgattctcagtcaaaattcgatctaattataagccgaaataacttttcaaagaacttagtgcttcatacagaagatgcgcaacgtcatatccgttcgaaaatggattcttggatcttatatgtcagcaagcatctcttaacaatatatgaacgcgatgctagaaaattgcatgaagatatgaacagggacagagaagctgtcgaggatatggatataaattttacctctttaaagaatataacagtgatcattgaggctgtcaatgtaaataaaaggcatctcactgaacgagatatccaaatcaagctgcttgggtctgttatgagggcgcttacaaagctgaaggtgaggtttccatcgcattttgtctatatagaccagctcgataatgattttagttcgttgaggcaaagtttgagctatgttgaacaagagttgcaaaaacatcgcgttgttatagcaaaaagtctagaagaaggcgttgaaaatatcaataatctctcacaatctttgaacgaaagttggtcagtcagaaaaccaatatctccaacattaactccacctgaagcacttaaaatcctagagtttttcaatgaatcaattactaaattgaagaaaaagatgcactctgtcgcagccgctgcaaaaatgttactgatccccgttgttttgaatgaccagctaacacacgtggttgaagaggtcaaaacgtatgacctagtttggaggagcattaaaaacctttgggaagatgttcaaagaactttcgaaacgccgtggtgtagagtagatgtattgctacttcaatcggatttggcaaactttcttcggagggcggatgaactgccgagagctgtcaaacaatttgagatgtataaatcgctattttcacaggttaacatgcttacctctgtaaataaaatcttggtggagttaaaggatggtgctttaaag

SEQ ID NO: 80522 - DNA, 5130 bp, Saccharomyces pastorianus
atggtcctcaatttaactttaaatgaaatactacttacaaagattatagaaagagcccaaaaggaatttgttatagaaaagtctctgaacagaatcaaaaaattttggaaggaagctcaatatgaagtcatagagcactccagtggactcaagcttgtgagggaatgggatgtactggagcaagcctgtaaagaggatctagaggagctagtttctatgaaagcttcgaattattacaagatttttgaacaagactgtttggatttggaatctaaactgacaaaattatcagaaattcaggtaaattgggttgaagtacagttttactggttggacttgtatggaatccttggtgaaaacttggacattcaaaacttcttaccgctcgaaacttcgaaatttaaaagcttaaccagtgagtataaaatgataaccacaagagcgtttcaactcgacacaacaatcgaagtaatacatattccaaatttcgacacaactctgaaattaacgatagattctttaaagatgataaaatcgtcactatcgacatttttagagagacaaagaagacaattcccaaggttttactttttaggcaacgatgatcttttaaaaatcataggatctggaaaacaccacgaccaagtttcaaagtttatgaagaaaatgttcggaagcattgagtctataatattcttcgaagattccataaccggtgtgcggtcagtggaaggtgaagtcctaaatttgaatgaaaaaatcgagctgaaggactcgattcaagctcaagagtggttaaacattttagacacagaaattaagctaagcgtcttcactcaatttagagactgtttgggccaactgaaagatggaacggacattgaagtagttgtatctaaatatatctttcaagccattcttctctcagctcaagttatgtggacagagctcgttgaaaaatgccttcaaactaatgaattttcaaagtactggaaagaagttgatatgaagattaagggactgctggataagttgaataaatcttccgataacgtgaagaaaaaaatagaggccctactggttgagtatttgcattttaataacgttattggacagcttaaaaattgttccactaaggaagaagctcgactactatgggcgaaagttcaaaagtttgatcaaaagaatgacactttagatgatctcaattccgtttttatttctcagagtggctacctcttggaatataaatttgagtatattggcatcccagaaagattaatatatacaccgttgcttcttgttgggtttgcgacactcacagattctctgcatcaaaaatatggtgggtgcttcttcggtcctgcgggcacaggtaaaacagaaactgtgaaagcatttggtcaaaatctcggtcgcgtggttgtagtttttaattgtgatgattccttcgattatcaggttctttccaggcttctagtaggtatcacacagattggcgcatggggatgcttcgatgaattcaataggctcgatgagaaagttttaagtgcggtgtctgccaatatccaacaaatacaaaatggcctccaggttggtaagtcccatattacacttttagaagaagaaactccattgagccctcacactgcagtgtttattactttgaatcctgggtataatggaaggtcagagttaccggaaaatttgaagaagagttttcgagaattctctatgaaatctccgcaaagtggtactattgcagagatgatattacaaattatggggttcgaagattctaagtctttagcttcgaaaattgttcattttttagaactgttgtcttcaaaatgcagttcaatgaaccattatcattttggtttgagaacgctaaaaggtgtattaagaaattgcagccctttggttagtgaatttggtgaaggggaaaaaacggtagtggaaagtttgaaaagagtgattttaccatcgctcggtgacaccgatgaattggtattcaaagacgaattatcgaaaatatttgattctgctggaacgccgctaaattcgaaggctattgttcaatgtttaaaggacgctggtcaaaggagtggcttttcaatgtctgaggaatttctcaagaaatgtgtgcagttttattacatgcaaaaaacacaacaggctttgatactggtaggtaaggcaggctgtggtaaaacggcaacgtggaaaactgttattgatgccatggccatttttgatggtcacgctaacgtcgtctatgttattgatacaaaagttcttacaaaagaatccttgtatggaagtatggttaaagcaacgctagagtggagagatgggctttttacttcgattctaagaagggttaacgatgatatcacaggaacttttaagaattcgagaatttgggtagtatttgatagtgatttagacccagaatatgtggaagccatgaattctgttcttgatgataataaaattttaacgcttccaaacggtgaaagacttcctattccgccgaactttcacattttatttgaaacggataaccttgaccatactacacctgctactataacaagatgtggtttgctgtggttttctacggatgtgtgttcaatatcctccaagattgaccacctactgaataaaagttatgaagcgcttgataataaactatccatgtttgaattagataagttgaaggaccttatatctgattcttttgatatggcctctttaaccaatatttttacgtgttcaaatgatttagttcacattctcggggttcgaacctttaataagttagaaaccgcggtgcagttggctgttcatttaatatcgagttataggcagtggtttcaaaacttggacgataaaagtttgaaagatgttattactttattgattaagagatccctactatatgcactagctggtgattcaactggtgaatcacaaagagcttttatacaaactataaacacttattttggacatgatagcgaagaactatcagattattctaccatagttattgcgaacgataagttgagttttagttccttttgttccgaaattccctctgtttctttagaagcacatgaggtcatgaggcctgacattgttattcctacaattgatacgattaagcatgaaaaaattttttatgacttgctcaattcaaaaaggggtattatcctttgtgggccacctggatctggtaaaacaatgattatgaataatgcactccggaactcttcgctctatgatgttgttggaataaatttttcgaaagacacgaccacagaacatattttgtcagccttgcataggcatacaaactacgtaactacatcaaaaggccttactttgttaccaaaatcggatttaaaaaatttggtattattttgtgacgagattaatttaccaaaactcgacaagtatggttctcaaaatgtcgtcttattcttaaggcagttgatggaaaagcaaggattttggaaaacgccagaaaataagtgggtgacaatagagaggatacatattgttggtgcctgcaatcctccaaccgacccaggtagaattcctatgtcagaaagatttacacgacatgctgctattctttacctaggttatcccagcggaaaatctctttctcaaatttatgaaatttattacaaagccattttcaagctagtccctgagttcagatcatacacagagcccttcgcccgcgcttccgttcatttatataacgaatgtaaagcaagatacagtactgggcttcaatcacactatcttttttcgccaagagaattaacacgtttggttaggggtgtctacactgcaattaacactggtccaaggcaaacactaagatcactaatacggttatgggcttacgaagcttggagaatatttgcagataggctggttggtgtaaaagaaaaaaacagttttgaacaacttctttatgagacagtcgataaatatttacctaaccaggatttgggtaatataagctcaacttcacttctcttttcgggcttgttgagccttgatttcaaagaggtcaacaaaacagatcttgtaaactttatagaggaaagatttaaaacattctgtgatgaggagctggaagtgccaatggttatacacgagtctatggttgaccatattttgcgtattgatcgtgcgttaaaacaagttcaaggtcatatgatgctaattggtgcaagcagaacaggtaaaactattttaactagatttgtcgcgtggttgaacggtttgaagattgttcaacccaagatccaccgtcattccaatcttagcgactttgatatgattttgaaaaaagctatttcagactgttcacttaaagaatctcatacttgtttaatcattgatgaatccaacattttagagacggcttttttggagagaatgaatacattacttgccaacgctgatataccagatttgtttcaaggagaggagtatgataagctcttgaataacttgcgaaataaaaccaggtctttaggtcttttattggatacagaacaagaactgtatgactggtttgttggagaaattgccaaaaaccttcatgttgtcttcacgatctgcgatcctacaaacaataagtcctcagcaatgataagttctccagcccttttcaatcgttgcataattaattggatgggtgattgggatacgaaaacaatgtcccaagtggccaacaatatggtggacgtggtccctatggaatttaccgattttatagttccagaggtcaataaagagttggtatttacggagccaatccaaactataagagatgctgtggttaatattctgatacattttgatagaaatttttaccaaaaaatgaaggttggggtaaatccaaggtcacctgggtattttattgatggtttacgtgccttagtgaagcttgttacggcgaaatatcaagatttacaggaaaatcaaagatttgttaatgtaggtctcgaaaaactaaacgagtctgtcttgaaggttaacgaactaaacaaaactttgtcaaagaagagtacggaacttactgagaaagaaaaggaagcc

SEQ ID NO: 80523 - DNA, 81 bp, Saccharomyces pastorianus
atgtccattcccaggcacgtgatgtcgagtacttcctcaaagaaacagaaaacggttccgcctaccagattgaaagcataa

SEQ ID NO: 80524 - DNA, 1218 bp, Saccharomyces pastorianus
atgagaagagatgatttaattagggataaatatttcgggaaatcttcaggaagtcaattagagttcttaacttacgacgaccaactagaattgaaaagaaaaacaattatgaatgcctacaagttctttgcaccaaggttagttgctgaaaaacttttacccccatttgacaccaccgtggcttcccctttacaatttggctacaggactaaaattacgcctcatttcgatatgccaaaaagaaaacaaaaggaactaacagtaaggcctcctttaggatttggtcaaaagggtagacctcaatggagaaaagatactttggatatcggcggacatggttcgatattagatatcgatgaatgtgtgcttgcaactgaagttctcaacaaaggattgactaatgaaagaagaaagtttgagcaagagtttaaaaactacaaaaaaggcgcgactattttactgagagagaataccactattttagacccttccaaaccaactttagaacagttaaccgaagaagcctctagggatgaaaatggtgatataagttatgtcgaagtcgaagacaaaaagaacaatgtcaggctggctaaaacttgcgttaccaatcctagacaaattgtcactgaatatgttgatggatatacttttaattttagtgcgggtgagttttttcaaaataataactctatcctgccaatagtgaccaagtatgtccgtgataacttgcaagctcccgctaaaggtgatgataataaaacaaagtttctagtagatgcttattgtggatcaggtcttttcagtatatgcagctccaagggcgtagataaagtgattggtgtagaaatttctgctgacagtgtctcttttgcagaaaaaaatgcaaaggcaaatggtgttgaaaactgtagattcatcgttggaaaggctgagaaactctttgagtctattgatactccaagtgaaaacacttccgttatcttggatccaccacgcaagggctgtgacgaattattcctaaagcaattagccgcatataatccagccaagattatttacatatcgtgtaatgtccattcccaggcacgtgatgtcgagtacttcctcaaagaaacagaaaacggttccgcctaccagattgaaagcataagaggatttgatttctttccacaaacgcaccacgttgagagtgtgtgtataatgaagagaatctaa

SEQ ID NO: 80525 - DNA, 462 bp, Saccharomyces pastorianus
atgcgttgcttttggatcgtacagaagtctatatttaaagctaggtttttcgcttgcagaaactttgtcaagaagcataattataaactaatcagcaccatgactggaagtactgaaatggtaccaccaacaatgaaacataccgttgacaacaaaaggctttcgtctcctttgacagattctggtaaccgccggactaagaagccaaagttgagaaagtacaaggccaaaaaggttgaaacaacttctccgatgggtgtcctagaatttgaagtgaacgatttgttaaaatctcaaaatttgtccagggagcaggttctgaacgatgttacttcaattctaaatgatagtctcaaagatggcctatcgcttacatatcaccagagtaaaatgtcaagtctagaatactcatgcacggtgcgtgacgtatctgtgaagaagagcatgaccacgtggcgcgga

SEQ ID NO: 80526 - DNA, 138 bp, Saccharomyces pastorianus
atgaaacttacagcagaggaaaccaaccaaccgcaacaagaaatgcccaacttcaaatttgactgggaggattctgattatctatccaaagtagagaggtgtttccctgatgatatttttgagtatgcagtagagtaa

SEQ ID NO: 80527 - DNA, 312 bp, Saccharomyces pastorianus
atgagtgtacaatctagaagccgctcttcttctatacattctattggctcgctagcttctaacgccctatcaagagtgaattcaagaggctcgttgaccgatattccaattttttctgatgcaaagcaaggtcaatggaaaagtgaaggtgaaactagtgaggatgaggatgaatttgatgagaaaaatcctgccatagtacaaaccgcacaaagttctgatctaaataaggaaaacagtcgcaacacaaatatatcttcgaagattgcttcgctggtaagacagaaaagagaacacgaaaagaaagaatga

SEQ ID NO: 80528 - DNA, 1764 bp, Saccharomyces pastorianus
atgtctgctcccgctgccgatcataacgctgccaaacctattcctcatgtacctcaagcgtcccgacggtacaaaaattcatacaatggattcgtatacaatatacatacgtggctgtacgatgtgtctgtatttctgtttaatattttgttcactattttcttcagagaaattaaggtacgcggtgcatataacgttcccgaagttggggtgccaaccatccttgtgtgtgcccctcatgcaaatcagttcatcgacccggctttggtaatgtcgcaaacccgtttgctgaagacatcagcgggaaagtcccgatccagaatgccttgttttgttactgctgagtcgagttttaagaaaagattcatctctttctttggtcacgcaatgggcggtatccccgtgcctagaattcaggacaacttgaagccagtggatgagaatcttgagatttacgctccggacttgaagaaccacccggaaatcatcaagggccgctccaagaacccacagactacaccagtgaactttacgaaaaggttttctgccaagtctttgcttggattgcccgactacttaagtaacgctcaaatcaaggaaatcccggatgatgaaacgataatcttgtcctctccattcagaacatcgaaatcaaaagtggtggagctcttgactaatggtactaattttaaatatgcagagaaaatcgacaatacggaaactttccagagtgtttttgatcacttgcatacgaagggctgtgtaggtattttccccgagggtggttctcatgaccgtccttcgttactacccatcaaggcaggtgttgccattatggctctgggcgcagtagccgctgatcctaccatgaaagttgctgttgtaccctgtggtttgcattatttccacagaaataaattcagatctagagctgttttagaatacggcgaacctatagtggtggatgggaaatatggcgaaatgtataagaactccccacgtgagaccgtttccaaactactaaaaaagatcaccaattctttgttttctgttaccgaaaatgctccagattacgatactttgatggtcattcaggctgccagaagactatatcaaccggtaaaagtcaggctacctttgcctgccattgtagaaatcaacagaaggctacttttcggttattccaagtttaaagatgatccaagaattattcacttaaaaaaactggtatatgactacaacaggaaattagattcagtgggtttaaaagaccatcaggtgatgcaattaaaaactaccaaattagaagcattgaggtgctttgtaactttgatcgttcgattgattaaattttctgtctttgctatactatcgttaccgggttctattctcttcactccaattttcattatttgtcgcgtatactcagaaaagaaggccaaagagggtttaaagaaatcattggttaaaattaagggtaccgatttgttggccacatggaaacttatcgtggcgttaatattggcaccaattttatacgttacttactcaatcttgttgattattttggcaagaaaacaacactattgtcgcatctgggttccttccaataacgcattcatacaatttgtctatttttatgcgttattggttttcaccacgtattcctctttaaagaccggtgaaattggtgttgaccttttcaaatctttaagaccactttttgtgacctgcaggcatgcaagctggcactgccgtcgttta

SEQ ID NO: 80529 - DNA, 408 bp, Saccharomyces pastorianus
atgggatataatattgggtgtagacttattgaggatttcttggctaggacggcattgccacgctgtgagaatttagtgaagacaagcgaagtactaagtaagtgtgcattcaaaatatttttaaacatcacacccaacataacgaactggtcgcataacaaggatactttttcattgattttggatgaaaacccattggctgactttgtggagttacccatggacgctatgaaatcgctctggtattccaatatattgtgtggtgttttgaaagggtcacttgaaatggtgcagctggattgtgatgtctggtttgtgtcggatatcttgagaggagactctcagacggagatcaaggttaagttaaatagaattttaaaagacgaaataccgatcggcgaagattag

SEQ ID NO: 80530 - DNA, 312 bp, Saccharomyces pastorianus
atgattactatgattacatgcggtaaatccaaaactaagaagaagaaggcttgtaaagattgcacctgtggtatgaaaggacaggaagaaaaagaaataaacgatataagatcccaacaagataaagttgtcaaatttacagaagacgagttgaccgagattgatttcactatcgatgggaagaaagttggcggctgtggttcttgttctctaggggatgcctttagatgtagtggttgtccctacttgggtcttcctgctttcaagcctggtcaacctatcaatttggacagcatttcagatgacttgtaa

SEQ ID NO: 80531 - DNA, 1302 bp, Saccharomyces pastorianus
atgactgccgtcgcctctactagcgggaagcaagatgctgaccataaccagtctatagagtgtccaaggttttcgcgtggacagaaagagattttgttggaccatgaggatgcgaaggggaaggattcaataatcaactcccccgtgtcagggaggcaatcaataagccctactttgtcgaatgctactaccacgactacgaaatctattatgaatgctaccggcacctccggcgcagtagtaagtaatactccggagcctggtttgaagagagtccccgccgtcactttcagtgatctaaagcaacagcaaaagcaggatagtctgactcagctgaagaacgaatcagaaagggccaagtctccaaatagtaatcctgctcctgtctcaaattccattcctggcaatcatgcagttataccgaaccacaccaacacttcaagaacaacgcaattatctgggtctccactcgtcaacgaaatgaaagattatgatcctaagaaaaaagacagtgctcttaaaatagttgataccatgaagcctgacaaaatcatggccacttcaacgccaataagtagagaaaataataaggtaaccgccaaagcccccaccagtattacacttcgaaaggaagatgcacaagatcaagctaacaatgtttcaggccaaattaatgtgcgttccaccccggaagaaacgccagtgaagcagtccgtcattccttccatcatccccaaaagagagaactccaagaatttggatcccagactgcctcaagatgatggaaaattgcacgtattgtttggcgctacaggttcgttatcggtatttaagatcaagccaatgattaaaaaactagaagaaatatatggacgtgatagaataagcattcaagttatcctcactcaatcagcaacacagtttttcgaacaaagatacaccaagaaaattatcaaatcttcagaaaaactaaataaaatgtcgcagtacgaatccactccggcaactccagtgacaccaacaccaggacaatgcaacatggctcaagtagtcgagttacccccacatattcaactatggaccgaccaagatgaatgggacgcatggaaacaacgaactgatcctgtacttcatatagaactacgtcgctgggcggatatactggtagtagctccactaactgcaaacacattatcaaaaattgctttgggcctgtgcgacaatcttctgacaagtgtcattagagcttggatccgagttatcccattcttttggacctgcaggcatgcagcttgcactgcc

SEQ ID NO: 80532 - DNA, 96 bp, Saccharomyces pastorianus
atgttagtcaaatctggaccgtacaacactgttacatcggtttctttgttccagttgatggacagtggattggatttggagttctgtaaaccatag

SEQ ID NO: 80533 - DNA, 81 bp, Saccharomyces pastorianus
atgaaatcttctatgatttcgttacctatagaaaaagatgatgccacaatggcactacgaaaacttgtctccagagagtag

SEQ ID NO: 80534 - DNA, 819 bp, Saccharomyces pastorianus
atggtatacacaacaccgcaacaacagcagagattcagctccacaccgcaatctagccacactcttatcttctcgccaatcagagccccttcaatgcaaacgccctcctcattggattaccaatcaccttcaattgttgtgtcatcgtcttcaatgaaggttcacggccggtcttccagtttcggtaaattttcactgtctattgggcaaaatggtaaggctacaatactggggcctataaacgtccttcccactgatacatcgaaaatggagaaacctgtaccaaagaaaaagcctgttacttctgaccgtgtcgaaaagactcgtatattatctttgttgaaaaaaatgagaaacaagagcagtactgtcaacaaaaaatatagtaaagtaccattaaagtctacgacaagtttgcaaccagcagctactgcaccttcaccactagtgtccaacatcataaagccgtctcccaaaaagttagcttccccaagaactccgaatgcaaactccaatttaaatctaaactttacttcatttcagattaaaacaggtttcactcccaatctcgatggaattttacttgaaaacttcacgtctcctaacacaaccgctgattcacagggtaattccgccagtaacatcataaataataatcacggtagcgcaaataataccaaccaatttctttttaatctaccacttcaatcatcaccaaggcaattcaggtctcctgcaagattaatagatccccttcccatatcggactggaacaccagtctcttgatgtcacccccagagaacagacgtaattgttga

SEQ ID NO: 80535 - DNA, 1599 bp, Saccharomyces pastorianus
atggccacaccgtccacaagatcgaaatttcaaacagatctggccattgataataggctattggaaaaagatccaaagtacaaaaaacttttcactgaaaaaagaagacgtcgaagaccagaaagctgtattaacctcatgactaaaggtaagggcactggacaaaaagataacattaatgatcaaattttcagcctaagaatattaccaggctccgatttaaactctttaaaggattctttatggataataaagatctctacccagccagatgttgaaaaaacaatcgcaagagctttttctgatttctattggttatatcatcaattacaaaataaccactggggaaaaacgattcctccgcctacaaggtccaacattcttgtagagaaggacgaatttgccataaatcatctttttatgatacgtaataatgagaagtatgatccaatttttaatttcaaaccggaatatatcatatcattgcaattgatggcaatgattaagcacatattcaatgacaaggttttacgtttggattcaaatttcatagattttattagttgggatgacgatcttcctgaaagtttgcaaatagtagtcgatgacagtaccttcacaggggataaaatactaatgacatcttctcaatttcgagaattaaaagagtttcataaacaatcaaaaaaagtggaatcaataacaaattcacatgcttcgttaatacccgtaacagaacttaccgaaatatatataagcccgaccaaattattctctagaaaagactaccaaaggctttttcaacctcaaagcacagacaacacctttaataacaatgacccgttgattcaagagtggataccaaaaagcaaaacattattcactagtttatcctttggttcaagtgcacctacttatcaagaagcgtcaactgagatacaggcatgccatgactgggtaagcatatccaaggagcaatggaaacagttactctaccatgtattacagtacattgtagacgaggcagtgaaggtgaattctgtgataaacgaatttactgagtgtcttaagcaaatttctttggacgaagtcattagagcaaactctgaactatttttaaaattttccaaactgaatgaatccttcctgaaaaaattcaaaggtgcatcgaggcaagacattttgaaactaatcatattatttgatgaaaatgtaagattttgcgaatcatttgaatccatcttaaatcaaagatcgaagcttggtaaaattctaagcatcatagaagtggatctagacaagaagaaaaactttcttgacaaactatctccgggaaacaacaacagtaacaatgaagaccttaagatacgcacggcagaggatgaataccgcattgtattaaaaagatataaccgtgttaagcagagctgggagaaaattatggaagatatcttaaatgaacggaaagaatttgaggagagagaagccgccgaggttaatagttgtttaaaatcaataagagatttgaacatggatgaaaagaaacactatttacaattatggcaagactttgtaccagatgagcacataagccaatga

SEQ ID NO: 80536 - DNA, 558 bp, Saccharomyces pastorianus
atgtatgaggatttatcgatagaatattttcaaacttgcagagctatacattgtgactgggcatattcgaactcaattaccttccgaatggacgaaaacaatgagcataatacattcaaggtttcatattcaggcgatacaagacctaacatcgagaaattttccctcgaaataggctataattcagatctattaattcacgaagctacactggaaaatcagctactggaggatgccgtgaagaaaaaacactgcactattaatgaagcaattggtgtttcgaacaaaatgaatgctaggaagttgatcttaacacacttttcccagagatatcccaaattgccccaattagacaataatattgatgtgatggcgagagaattttgttttgctttcgacagtatgatcgttgattatgagaaaattggtgaacagcagcgtatttttccactgctgaataaggcatttgttgaagaaaaggaagaagaagaagatgttgatgacgttgaaagcgtacaagatttggaagtcaaacttaagaaacacaagaaaaattag

SEQ ID NO: 80537 - DNA, 1869 bp, Saccharomyces pastorianus
atgttcacatttatacccatcacccatcctacatcggatacaaagcacccattgctgctagtccagtctgcacatggggaaaagtatttcttcggtaaaattggtgaaggatcccaaaggagtctgactgaaaataagatcaggatatccaaattgaaggatattttccttactggtgaattaaactggtcagatataggtggattacctggaatgattttgactatcgctgatcaagggaaaagtaatcttgttttgcattacggcaatgacattttgaattacatagtttccacttggagatacttcgtctttagattcggaatagacttgaacgatcacattatgaaagacaaggaagtatataaagataaggtaatagctgttaaatcctttaatgttctgaaaaatgggggggaagacaggttaggcgtcttcgatagttttcaaaaaggtgtattacgttccatagtagcaaaaatgttccccaaacatgcacccaccgataggtacgatccttctagtgatccgcacttgaatgtagagttgcctgacttagacgccaaagtggaagtttctacgaattacgagatttcattcagtccagtgaggggtaaatttaaagtggaggaagctattaaactaggtgttccgaagggtcccttatttgcaaagttaaccaagggccaaacaattactttggataacggtattgttgtaactccggaacaggtattggagaatgaacgtcattttgccaaagtattgatcctggatatcccagatgacctatatttgaacgctttcgtagaaaaattcaaggattatgattgtgctgagcttggcatggtgtattattttcttggtgatgaggttaccattaatgataatctattcgcgttcattgacatatttgagaaaaacaattatggtaaagtaaatcatatgatatcccacaataaaatttctccaaacacgatatcatttttcggttctgcattgaccacattgaaattaaaggcactacaagtaaataattacaatttaccaaaaacagatcgtgtgttttccaaggacttctacgacagattcgataaaccactcagcagaggtacatctatgtgtaaatcccaggaagagcctttgaatacaataatagagaaggataacattcatattttttcacaaaacaagacagtaactttcgaaccatttcggatgaacgaagaaccgatgaaatgcaacatcaacggtgaagtggcggatttctcgtggcaagaaattttcgaagaacatgtaaaaccattagaatttcccttagctgatgtcgatacagttatcaataatcaactacacgtggataactttaacaattcagcagaaaagaagaaacacgttgaaattatcaccttaggaaccggtagtgcattgccttctaaatatagaaatgttgtctccacacttgttaaagttccttttactgacgccgatggaaataccataaatagaaacattatgctagatgctggtgaaaatactttaggtaccatacacaggatgttttctcagctagcagtcaagtcaatatttcaggatttgaaaatgatatatctgagtcacttgcatgcagaccaccatttgggaataatcagcgtgctaaatgaatggtacaaatataacaaggatgatgaaacgagttatatatatgtggttactccatggcaatatcacaaatttgttaatgaatggttagttctagaaaataaagagattttgaagagaatcaaatacataagttgtgagcatttcatcaatgattcgtttgtaagaatgcagacacaatctgttcctttggcacgagttcaatga

SEQ ID NO: 80538 - DNA, 1518 bp, Saccharomyces pastorianus
atgtgtgttggtttgttcccatcacaaaatcaaaatgtcaaactaaatgttaccgatttaatcaacttatgcttttatgatggaattctggaagaaggtgaaaaaactataaggtatgaacttttggagttagacccgatggaggttgatacatccaagctatcatggttcatagattttgattacttaaactgtatcaatcaatgcttttttgattttacatttgcgtgtgaggaggaaggaagtctggattcttataaagagggcttgttaaagattgtgaaaattttatattatcagttcaaccaatttaaaatatggatcaacacgcaacccgttaaatctgtgaacgccaatgataattttataaatatcaacaatctttatgatgataaccacctggattggaaccacgtcctttgtaaggtaaatctaaaagaacagtgtattcaaatagcagaattttacaaagatttatcgggattggtgcaaacattacaaactttagatcaaaatgactcaacaaccgtatcgctatacgaaacattcttcaacgaattccctaaagagtttagctttacattatttgaatatttaatcaagcataaaaaattgaacgacctcatcttcaggttcccacaacaacacgatgttttaatacagtttttccaagagtccgctccaaagtacggtcatgtagcatggatccaacagattctggatgggtcatacgcaggtgccatgaatactttaaaaaacattactgttgatgattcaaagaagggcgaaagcttgagcgaatgtgaattgcacttgaatgttgcaaaattaagctcgttgctagttgaaaaggataatttggacattaatactttgagaaagatccaatataatttagatacaattgatgctgagaaaaatatttcaaacaaattgaaaaagggcgaagttcagatatgtaaacgcttcaagaatggctctatcagggaagttttcaacatattagtggaagagcttaaatcaacaacagtagtcaatctatcggatctcgttgagttgtattctatgctcgacgatgaagagagcttattcataccgttaaggcttctttctgttgatggaaacttactgaattttgaagttaaaaagttcttgaatgctttggtatggagaagaatcgttctactaaatgatagtaatgaaggagataaactgcttcggcatatagtcaaacgtgtttttgatgaagaactacccaaaaataatgatttccccttgcccagtgtggatcttttatgtgacaaatcgttactgacgccagaatacataagcgaaacatatggcaggtttcctattgatcagaatgccatacgtgaagagatatatgaagaaatatctcaagtggaaacgttgaactcagacaactcactcgagataaagttgcactcgactattggttctgtagcgaaagaaaaaaactataccatcaactatgaaaccaacactgtagaatactaa

SEQ ID NO: 80539 - DNA, 1212 bp, Saccharomyces pastorianus
atgggtaagtcatccttcaaatttgcatggattatggatcagacaaatgaagagcgcgaacgtggtgtaacagtgtcaatttgtacatcgcatttctctacccatagggcaaattttactattgtggatgcgccaggccatagagattttgttccaaacgctataatggggatatcacaagcagatatggctatactttgtgtagactgtagcaccaatgctttcgaatcaggatttgacttggatgggcaaacaaaggagcatatgctactggcatctagtcttggaattcacaatctgattattgctatgaataagatggataatgttgactggtcccaacaaaggtttgaagagattaaatcgaaattgttgccatatctggttgatattgggttttttgaggataatattaattgggtacctatcagtggcttttccggagaaggtgtttataaaattgaatatacagatgaagtgagacaatggtacaatggtcctaacttaatgtctactttggaaaatgcggcgttcaagatttcaaaggagaatgaaggaattaacaaagatgatccgtttttgttttctgtgttggagatcatcccatcgaaaaaaacaagtaacgatttagcactagtttcaggaaaattggaatcaggttctattcaacctggtgaatctttgacaatatatccgtcggaacagagttgtattgtggataaaattcaggttggttctcaacagggccaatcaacgaatcacgaagagacagatgttgccattaagggtgattttgtcactttgaaattgcgcaaagcctatccagaagatattcaaaatggtgatttggcagcatcagttgattattcgtccattcattcagcacagtgttttgttctggaattgaccacctttgacatgaaccgacctttgctgccaggaacaccgtttattcttttcatcggagtcaaggagcaacctgctcgaatcaaaagattgatttcatttatagacaagggcaatactgcaagcaagaaaaagattagacatctaggctctaaacaacgagcatttgtagaaatagaactaattgaagtaaagaggtggattcctttattaactgcccatgaaaatgaccgtttgggaagagttgtttttagaaaggacggtagaaccattgcggcaggtaaaatatccgaaataactcagtag

SEQ ID NO: 80540 - DNA, 621 bp, Saccharomyces pastorianus
atggcttacagtgactacagcgatggagcagacgacatgccggactttcacgacgaaggtgaatttgatgattatttgaatgacgatgaatatgatctaatgaacgaggtatttcctactctaaaggcgcagttacaggattaccaagggtgggataatctttcacttaagctagctttgtttgacaacaatttcgatttggaaagcacgctggcggaattgaagaaaactttgaagaagaagaagacaccaaagaagccaattgctgttgctaatgggagtgcgaatgttactcaaaaactggcaaacatctcaatttcgcaacaaaggccaaatgatcggcttccagactggcttgacgaggaagaaagtgagggtgaacgcaatggtgaggaagccaatgatgaaaagacagttcaaagatactataagactacggtgccaacgaaaccaaagaaacctcatgatatttctgcatttgttaaatctgccttacctcacttaagttttgttgttcttggtcatgttgatgcgggaaaatcaactctaatgggcagactactttatgatctgaacattgtcacaccaatcccaactgagaaagctacaaagagagagtga

SEQ ID NO: 80541 - DNA, 741 bp, Saccharomyces pastorianus
atgtttcttaagacacctaattgggaaacggtaaatgagactcccaaatcgagagtattaacgataaacgaattgatctctcccaacctggatactgaatctaagagccttctggcgacgccggcaaggaaatatttcaaaacttcaataagtgaagcgcaagattctcctacatctgccccttcgcccgatggcaatgaggatcccacatatcaatacaacgtacaatttcactttccaggaccaataacacctacaacacccaggtctaagaatgcagaaatgtttccatcccccacgcccccattggtttctcccacagcggttatcgaggaagagaatgacgattccgtacgggagttttcacgcacgctaaaatcaagactcaactgcgcaatggttaaactatcaaaggaacatgagcaagtagctttgattcctccacctccgacggaaaagatacgaaagggctcttatagtaataaatttgccgctaagcataggcgctgtcactcgttagatgaatccaaaaagtttctgagttctctggaagattcatccgctcatgcagcgttcttgaaggcaatttcgtccaaacatgctaaaaggaataaggtagacaacgttaacgtttcgccgttacgttggtcatctcatagaagaacgcaaagtacacaggagaattctttacaagaagttgttgctatcgatacattattgaagatgtcctcatcggactga

SEQ ID NO: 80542 - DNA, 207 bp, Saccharomyces pastorianus
atgcctgcaggtcttaatttcgaagcttgggagttgacagacaacacctacaaaggcgcggctggaacatggggtgaaaaggcaaatgaaaaattaggtagagtaagaggtaaagatttcacgaagaacaaaaataaaatgaagagaggttcttacagaggtggatccattacattagaaagtggttcatacaaattccaagattaa

SEQ ID NO: 80543 - DNA, 99 bp, Saccharomyces pastorianus
atgtttaatttgaataatgagctagatttgcagaaaaaagggatggaaaaagaaaaagctgactctaagaaaagggatatcaattttacagaacaataa

SEQ ID NO: 80544 - DNA, 1833 bp, Saccharomyces pastorianus
atgttgagacaaaaaatttctttgatggatgttgaattacaagatgctcgtactaagctagataattcaagagttgaaaaggaaaatcattcttccattattcaacagcatgacgacattatggagaaattaaatcaattaaatctattaagagaaagtaacataacattgcggaatgagctggaaaacaacaataacaagaagaaggaactgcaatctgaattagataaattgaagcaaaatgttgcgcctatcgagtccgaattgactgccttgaaatattctatgcaagaaaaagagcaagagctcaaattagctaaagaagaggttcatcgttggaaaaagcgctcacaagacatattggagaaacatgaacaattgagctcaagcgattatgagaagctagaaagcgagatagaaaatttgaaggaggaactagaaaataaggagcgtcaaggagcggaagccgaggaaaaatttaacaggctgagaagacaagcgcaggagagattaaaaacatcaaaactctcacaggactcattgactgaacaagtaaatagtctaagggatgcaaagaacgtgttggaaaattccttgagtgaggcaaacgcgagaatcgaagagttacaaaatgcaaaagtagcacaaggtaacaaccagttagaagcaataagaaaattacaagaagacgcagaaaaggcttcaagagagcttcaagccaagttagaagaaagtacgacttcttacgaatctacgataaacggcttaaatgaagaaattacaacattaaaagaagaaattgaaaaacaaaggcaaatccagcaacagttacaagctacatctgcaaatgaacaaaatgacttatctaacatagttgaatctatgaaaaagtcttttgaagaagataaaatcaaattcatcaaagaaaaaacccaagaagttaatgaaaaaatacttgaggcccaagaaaggctaaatcaaccttccaatatcaatatggaggagattaaaaaaaaatgggaatctgagcacgaacaggaagtatctcaaaagattcgcgaagctgaggaagccctcaaaaagcgaatcagattacccactgaggagaaaatcaataagataatcgaacgaaagaaggaggaattggaaaaagagtttgaagaaaaggttgaggagagaataaaatcaatggaacaatctggagaaatagacgtggtgcttcgaaaacagctagaagctaaggttcaagagaaacaaaaggaattggaaaacgagtataacaaaaaattacaagaagaactcaaagatgtaccacactcccctcatatctcaggtgatgagagggacaagttacgggcagaaatcgaaagcaggttgagggaggagttcaacaatgaactgcaagccataaagaagaaatccttcgacgaaggaaagcaacaagcaatgatgaaaactacccttttggaaagaaaacttgccaagatggaatctcaattgtcagaaacaaaacaaagtgccgagactcctccgaaatctgttaacaatgtacaaaatccattactaggattacctaggaaaatcgaagagaattcaaattcaccatttaatccgttactttccggtgaaaaactcttaaagctaaattctaagtcttcatcaggtggatttaacccttttacctcgccatcccctaataagcacttacaaaatgataatgacaaaagggagtcgttggctaacaagacagatccaccaactcatttggaacccagcttctacattcccgcctcaaggggtctaatatcttcatcttccactttgtcaacgtga

SEQ ID NO: 80545 - DNA, 108 bp, Saccharomyces pastorianus
atgctagtccagttcagaagcattgatgatagggtgcttcgagtgggagttagcagtatcatagacagtatcaaaaccattgtggaagccatggacgttctatcataa

SEQ ID NO: 80546 - DNA, 231 bp, Saccharomyces pastorianus
atggtcagttcgtgggcaaaagtcagcctgtatgacgttgatttcaatctagggcttgggaagcccaagagtgtacgtcggccgcgcttcattcctcttgagagcctaatatatttcatgcctagatcctctagaggtgaaatggtggttgctctttgccttagagataaagattgggagtgcctgaatgcggataaagaatggacaaattatgctacacatataggatga

SEQ ID NO: 80547 - DNA, 1245 bp, Saccharomyces pastorianus
atgtttagagtcaagatcatctctcagaaacgtacacaaagtgtacagatgctagaaaacgatcaacttgatattttgggacaacaaccttcgctatacaaactatacactcaaatatgctctatctaccgtgtaccagatccttctgctcatgaccatatcgtaaataccttaacaagaggacttgaaacattggctaaaaatttccagtggctagcaggaaatgtcgtgaatgaaggtgctgacgaaggtaacactggtacctacagaattgtcccgtcagacaaaattccacttatcgtccaagatcttcgagaagatctgtctgccccaacaatggattcgcttgaaaaagctgactttcctatctacatgttagacgaaaagacttttgcgccttgcatgactatcaatccacctggaaacaccataggtatggccgccaagagtgggcctgtatttgcagttcaagcaaactttatctccggcggcctcgtcttaactattgtcgggcagcacaatattatggatataacaggacaggaaagtatcatcaatttgctcaataaatcttgccaccaaaaacctttctctgatgaagaactgctcattggaaatatagataaaagcaaatctattcctttgtttgatgaaacttgggaacccgacaccacgctagttcatgaaatagtggaaacctctagaaatacaagtggagaggaaaaggaacagtcttgttcttcgaactctacttgggcttatgttgaattttctgctatctcattgcagaatctgaggattttggcaatgcagacatgtacttctggcacaaaatttgtctccactgatgatatcgtcactgctttcatctggaaatcagtttctcgagcccgtttatctcgacttaaaccagaaacgaaatcaactgtagggcgtgctgtggatgttagaaaacggctaggactccccgcaacgtatccagggttattagtcaacatgacctttaatacaggttccctgaaaagcttggatcataaaagtttgggcgttcttgcatcacagattcgcaggaagctagaccctaagtcttcgatttggcctataatacatgcgcacttgctacgctccttagccgatgcccggacaagactaaggtttctatacctcaaccaattgatactgtatctggaattatggtcagttcgtgggcaaaagtcagcctgtatgacgttgatttcaatctag

SEQ ID NO: 80548 - DNA, 660 bp, Saccharomyces pastorianus
atgaaacaaaaaatgataatatatgacacacccgcagggccttatccggcccgagtccgcattgccttggctgagaagaacatgctatcaagtgtgcaatttgtcaggatcaacctctggaagggagagcacaagaagcctgaatttcttgccaagaactattcaggcacagtgccagtgcttgaacttgatgacgggactttaatcgctgaatgcacagccattactgaatacattgatgcacttgatggtacacccactcttaccggcaaaacaccgctggaaaaaggcgtaatccacatgatgaacaaacgcgcagagttggaactgctcgaccctgttagtgtttattttcaccatgctacacctggattggggcctgaagtcgagttctaccaaaacaaagagtgggggcttcgccagcgcgacaaagccctacatggaatgcattattttgatacagttctcagagaacgcccatatgttgctggtgattcattctcaatggctgacatcacagtaatagctggtctaatatttgctgcgattgtcaaactacaagtgccggaagagtgcgaggcgcttcgagcttggtataagagaatgcaacagcgccccagcgtgaagaaactgctagaaatccgttcaaaatcctcgtaa

SEQ ID NO: 80549 - DNA, 186 bp, Saccharomyces pastorianus
atgtctaacgaatctaacgaccttgaaaaaaacatttcgcacttggacccaaccggtgttgacaatgcttatattccacctgaacagccggaaacaaagcattcgcgttttaatattaacagagataccttaagaaaccactttatcgctgctgtgggtgagttttgcggtactttcatgttttaa

SEQ ID NO: 80550 - DNA, 2169 bp, Saccharomyces pastorianus
atgaagcatgacgaccatagctcgttgaatatgcatagaacgcttctgtttttaacgtggctgatatctttaacaaaggcttttaatataaaattaccacacactgaaaaaaaagaccatttggaatccaacgctgtgctggcatgcgcatcctatataaatactctgaagtggtcatttgatagctccgtcgtaccgggtttctattctaccatatgctcttattcaccagcgtttgatacttggtcactttgtatcttcaattcgcttacagaccagattattcccatggacaacacaagtttcgaagaaagcttgggtaacgtacgaaaaacgtgctcgtttgtcgataaaaagtttagcaatatttcactggagcaatactactcatctttaaataatgcttcttctcacgctttggaagactatggttctattgaaagtttatcgacatccattcgagtcgatcgtgagacaagatctagatggatacgagcttttcatgcgcatgcctataatttagatatcagcagtgtttatggtgcatatttaacttactacttcgtcatagtgggtattatcgccgtcttcttccatatgagtcactataacggcctgaatcgagcgctatttgcaagccggttcgtcaattatattcggggccattttgtgttgcctacgtttttagtagataagcacgctaatcacttcaagtttctaaacgtggaagtctttacgggactgatgccgaattccttggaggcctggatcatttttggatacacattggcgaacatcatatttttgtccataagttacatcatagacccatataacctcattttcaacagtcacctgtcgcagtttacaagactgttggctgatagatctgggatactggcgtttactcagttccctctcattatcatttttacggcaaggaatagttttctcgaatttttaacaggagtcaagttcaattcctttattagtttccataaatggatcggtagaatcatggtcttaaacgcaacgatacattcgctttcttattcattattcgcaattatcaaccatgccttcaaaataagcaacaaacagctctattggaagtttggtattgcatccataacagtgctttgcgttctactagttctatcgctaggaatagtaaggaaaagacattacgaatttttcctgtacacccacatcatactagcccttttgttcttttactgttgttggcaacacgtcaaaattttcaacggttggaaagagtggatagtggtatccttgctcatttgggggctggaaaagcttttcagaatatggaacattttgcagtttagatttccgaaagcaacactaatcaatttgaacaccagcaacaacccgcacgatgaaatgtttaaagtaatcatacccaaatataaccggagatggcattcgaaaccgggtcaatattgtttcatttattttttacatccattggtattttggcaatgccatccatttaccattatcgacgaaggtgaaaagtgtgttttagtgatcaaacctaaaaatggtctcactagattcatttataaccatattttgcaatctttaaatggtaaattacaactccgagtggccattgagggaccttatgggcccagtaatcttcacctcgataaattcgaccatttgctgttactaagtggaggaacaggcttgcctggtccattagatcatgccataaagctgtcacgaaaccctgataaacccaagagtatagatttgatcatggcgatcaagaatccttcttttcttaacggctataaatccgagatactagagctaaaaaatagccgatcccacgtcaacgtgcaggtttaccttacacagaaaacagctgttacaaaggcagcaaacgcacgagaccaattaatacattttgatgatataatgaccgaactgacaagcttcgcccacatcggcaatgcaagacctgattttagcaatgtaattgaaaacgcaataaaaagtacgccgcctggagattcattagcggtcgtgtgctgcggccctcctgttctggtggacgatgttagaaacaccgtttctcaaaaactcctcggttaccctgagagaattatagagtatttcgaggaatatcagtgttggtaa

SEQ ID NO: 80551 - DNA, 471 bp, Saccharomyces pastorianus
atgtggggggaaaaattcataagaagccaggaaaatgtgaagtttctgtgtagtgttgctgttgctgatgaatcccttaccgctttcaatgacttgaagttgggtaaaaaatacaaatttattttattcggattgaacgatgctaaaaccgaaattgttgtcaaggaaacctctactgacccatcttacgatgccttcttagagaaattgccagaaaacgactgtctttacgccatttacgattttgaatacgaaattaatggtaatgaaggtaagagatccaagattgttttcttcacttggtctccagacactgctccagtcagatcgaagatggtctatgcatcctccaaggatgccttaaggagagccttaaacggtgtctctaccgatgttcaaggtactgatttttccgaagtttcttacgattctgttttggaaagagtcagcagaggcgctggttctcattaa

SEQ ID NO: 80552 - DNA, 162 bp, Saccharomyces pastorianus
atggatgcaggtgaggtaaaagagtatgatcacccatattctttgttacttaacaaacaaagtgccttttatagcatgtgtgagcatagtggagaattggatatcctaattgaattggctaaaaaagcctttgtggaaaaattgaactctaaaaaggactag

SEQ ID NO: 80553 - DNA, 903 bp, Saccharomyces pastorianus
atggcaggttctcgtgaattgaaaagatttgaatctatttctagatcaccgatctatcaacatttttccgagactcttgtcggtgttaccaccattcgtgcgtttggtgatgaagggaggtttatgcaagagaatttacacaaaattgatgaaaataataaaccattcttctacttgtgggttgctaatcgttggctggcctttaggatagatatgattggatccttggtcatttttggagctggtttgttcattctattcaatattaataatctggattcgggtatggctggtatatctttgacgtatgctatttccttcactgaaggggcattgtggttggtaagattgtactccgaagtggagatgaatatgaattctgttgaaagagtcaaagaatatatggaaattgagcaagagccatacaacgaacacaaagaaataccgccaccacaatggccacaagacggtaaaatcgaggttaatgatttatcattacggtatgctccaaacctacctagagtaattaaaaatgtttcattttctgtcgacgctcagtctaagatcggtattgttggtagaaccggtgccggtaaatcaactattattaccgccttgttcaggtttttggaacctgagacaggccatatcaaaattgataatatcgatatttccggtgttgatttacaaagactgcgtcgttctataactattattccacaagatccaacactattctcagggacgattaaaacaaacctagacccatatgatgaatttagtgacagacagatctttgaagctttgaaacgtgtaaatctaattagtgaagaacaattacacaaggcgccacaagagaaacagcatgaggttcgtcgactactccgaaatgttataaatctg

SEQ ID NO: 80554 - DNA, 255 bp, Saccharomyces pastorianus
atgggtgttccatacgccattatcaagggtaaggctagattgggtactttggttaaccaaaagacttctgctgttgccgctttgaccgaagtcagagccgaagacgaagctgctttggctaagttggtttccaccattgacgctaacttcactgacaaatacgatgaagtcaagaagcactggggtggtggtatccttggtaacaaggctcaagctaagatggacaagagagctaagacttccgactccgcttaa

SEQ ID NO: 80555 - DNA, 108 bp, Saccharomyces pastorianus
  modified_base (89)..(89): a, c, g, t, unknown, or other
gacagaaacaccgctgctgaaaccttcaagttgttcaacaagtacagaccagaaaccgctgctgaaaagaaggaaagattgaccaaggnaagctgccgctatcgctga

SEQ ID NO: 80556 - DNA, 4011 bp, Saccharomyces pastorianus
atgattccaataacattccacctatcaaaagggcattctgaaatggatcctgctttctcttttgatattgtaactcaaagaatcgcggaaattacactttctgctaggtcaatcgctatgctttctcacatcccggcgtctctaaccgaagagctgcccttagcttccagggtatctcagaagccatatcaactggtaaacgatacagaattagattttgacgtctggatacaggataaaacgactgaagacaacaaaaacgaagttgtgctcttaaaagcaaacacttctcttccttgggaatttgaagattggagaagtattagagagaaattggatattgataagtcgaaaaacattttgggtgtttgtgtttctgggcaaaattataaaaccattatgaatattgatgccacaacagaaggtgaaaacttgcatgttttgagcccaccaagaaataatgtgcataatagaattgtttgtgaggccagatgtgatgagaataacgtgaagattattacgtttaggtcaactttagttatcgaaaacacaacttcaactgagattgagcttttggttgactccaaagatccaaataagccatctttaaaatatgctattaaaccacatcaaagtaaatctgttcctgtagaatatgcctacgattctgatattaggataagacccgcatcagaggatatatacgattggtctcaacagacgttatcttggaaaagcttgttgagcaaccaaatgtctatattctgttcttcaaaagaagattccaatcaaagatttcatttcgaaattggtgcaaagtatgatgaaagagaaccattggcaaagatctttcctcatatgaaaatcgtggtttcggcatctatgactattgaaaatttacttccagcagatattaacttctctatttttgacaaaagagaggagaagagaacagatttcttgaagactggagaaagtatggaagttcatcatatttctttggatagtttcctgctaatgtctgttcaaccattacaagatgaggcttctgcttcaaagccctccatcgttaatacaccacataaaagtcctttaaacccagaagattcgttgtctttgaccctatctggaggtcagaatttgttgttgaaactagattataaaaacatcgatggtacaaggtccaaagttattcggatatactccccttatattattatgaactctaccgatagagaactctacattcaaagtagtctcttaaatattgcacaatccaagattttgcttgaaaacgaaaaaagatatactattccaaaaatgttttcatttgataaagaagatgataaaagtaacagagctcgtattaggttcaaggaatcagagtggagttccaaattatcatttgacgctattggccaatcatttgatgcatctgttagcataaaaaataaggaacaagaatcaaatttaggcatcaacattagcgaaggtaaaggcaagtacttgctaagtaaagttattgagattgcacctaggtatattataagcaatactttagatatccctattgaagtttgcgagacagggtctatggatgtccagcaaatagaatcgaacatcactaagcctttatacaggatgagaaacatcgtcgacaagcaattagtgctgaaattcttaggcggagactccaattggtcacaaccattctttatcaaaaatgtcggtgtaacatatttgaaagttttgaaaaattcacgccataagcttttaaagattgaaattcttttggacaaagcaacaatatttataagaatcaaggacggtggtgacagatggccattttccataagaaatttcagcgaccatgactttatattttaccaaagagatcctcgtaaagttagtgatccatacaaggatgaccagtctaacgagtcctcaagccgtagtttcaaacctatcttttacaggattccctcgaaaagtattatgccatacgcatgggattttcctacagctaaggagaaatatctggtgttagaatcaggtacacgtacaagggaagttcggttggctgagattggcgaattgccaccgttacgcctggataaaaggtcaaaggataaaccagcccccattgttggattacatgttgttgctgacgacgatatgcaggccttagttattgttaactataaggccaatgttgggttatacaaattgaaaactgcctctgcaactaccacgtcttcagtttcagtaaatagttcagtgactgatggctttgtacaaaaggatgaggatgagaaggttaatacacagatagttgtttcgttcaaaggagttggtatctcattaatcaatggtcgtttacaggaacttctatatattaacatgagagggatcgaattaagatacaatgaatctaaagcataccagactttcagttggaaaatgaaatggatgcaaatagataatcaattattttcaggaaactactcaaatattctatatccaacagaaatcccctacacagaaaaggaaattgaaaatcatccagtgatatcaggttctatttctaaagtcaacgattccttacaggctgtcccatactttaaacatgttacgttattaatccaggaattttccatacaattagatgaagacatgctgtatgctatgatggatttcataaaattcccaggatctccatggatcatggattcaagagattataagtacgatgaagaaatccagttacctgatgtttctgaattaaaaacggcgggtgatatatatttcgagatcttccatattcagcccactgtcttacatctgtcctttatacgctccgatgaaattagtccaggattggctgaagagaccgaggagtcattttcgtcatcattgtactatgtccatatgtttgctatgacattaggtaatataaatgaggcgccggttaaagttaattctttgttcatggataatgtaagagtcccattgcccattctgatggaccatattgagagacactatacgacccagttcgtgtatcagatccacaaaattttaggatcagcagattgttttggtaatcctgtaggtcttttcaacacaattagctccggtgtctgggacttattctatgaaccatatcaaggttacatgatgaatgatagacctcaagaaattggtatacatctggctaaaggtggactaagttttgcaaagaaaacagtctttggcctctctgatagtatgtccaagtttacggggtcgatggccaagggcctgtcagttacacaagatctggaattccaaagggtcaggagattacaacaaagaataaataaaaacaacaggaatgccttggcaaactcagcgcaatcctttgccagcacactgggaagcgggttgagcggaattgcactggacccatacaaggccatgcaaaaggaaggcgctgctggtttcctcaaaggccttggtaaaggtatcgttgggctgccaactaagacagccattggattcttagatcttacaagtaacttaagtcaaggcgtgaaaagtaccaccactgtgcttgacatgcaaaagggttgcagagtgcgtctaccaaggtacgtggaccatgatcaaatcatcaagccttatgatctacgtgaggcccaaggacaatactggctcaagaccgtgaatggaggagtatttatgaatgatgaatacctgtcgcacgttatattgccaggcaaagaactagcagtaattgtgtccatgcagcacattgctgaggtgcaaatggccacccaagagcttatgtggagcacaggatatccttccatccagggaattacattggaaagatccggtcttcatattaaactcaagtctcaatccgaatacttcattcccatcagcgatcctgaagaacgtcggtccttgtacaggaacatcgccattgctgttagggaatacaataagtactgcgaagctatcctatga

SEQ ID NO: 80557 - DNA, 93 bp, Saccharomyces pastorianus
atgccaatattggacatgaatgtaaatgaaatcactgcttcagctaaggattggtctacgactgttgaagctcgtgcttctctagatacggga

SEQ ID NO: 80558 - DNA, 249 bp, Saccharomyces pastorianus
atggagaggaggaggagagcacagacaaaatacgattttctcatgaattttgaaaggaaattagcggtgttggatccaagcattttaggtgagcgcagcagggctagccagagctcagattccgaatcaattgtagtgcctacttcaattttgaaaaacgaaacattcaatgctgacttaggcggactgagatttattttaattggtgacgtccaggtaaatgccaatattggacatgaatgtaaatga

SEQ ID NO: 80559 - DNA, 4368 bp, Saccharomyces pastorianus
atgattgcatcgaaaaattccactgcccccaagcatcaatacattttgaaaccggttagcgggctagggaagcttagtatcaacaagctgggttccacggaggaacaacctcacattgacttgcaaatgttttatgatgaatttggtttagaattagatgatacagaatataatgatatcttgtatgtcctctccagtatacagttaagacaaattaccaaaaagtttaagaaagcaagaccatccgtcgcagttagtgaaaacccgacagaatggtttaaatacattgctgcttgtgttattaatgaaattcatgaaaaaaacaaaatgtggacttgggaaagcatgaaggagaaatgtgaacaacggaggttgtacacaaaattatgggttgaaaagttaaagttaaaaaatttagaagctccgctacgtgaccccattcaggaggctcaattatctgaattgcataaagatttaacgtatgatgaaattattctcttcagatctgtcgctaagagacagtacgcgcaatacaagttgggcatgtcggaagactcacccacaccaacagctagctcaaatattgaaccacaaacttccaacaagtccgcaactaaaaataatggaagctggctctcttcttggtggaacggtaaacctacagaagaagtagacgaagatttaataatgactgaagaacagcgtcaggagctttatgatgctattgaatttgacgagaatgaagataaaggtcctgtactgcaagttcctagagaaagggttgaacttcgtgtaacgagtttgttaaaaaagggttcattcactatacgaaagaagaagcaaaatctaaatttgggttccataatttttgaaaattgtaaagttgattttgctcaaagacctgattcatttttatcgagtttccaattgaacaaattcagtctcgaagatggctcacccaacgcgttatacaaacatatcattagtgtcagaaacttatctaaagatcaatcttcaattgacaaccacgctaccggggaggaagaagaagaggatgaacctttattacgtgcttcatttgaattgaatccactagatggattagcagattcgaacttaaacattaagttattgggaatgactgtgttttaccacgttcatttcattacagaggtccacaagttttttaaggcgtcaaatcaacacatggaaacaatcggcaatatcgtaaacgccgcagaggcaactgtagaaggttggacaacacaaacaagaatgggtattgagtctttgttggaagaccacaagaccgtaaatgtatctttagatttacaagcaccattaatcatattaccgttagacccacatgattgggataccccttgtgcgatcattgatgccggtcatatgtctatactcagtgatttagtgccaaaggagaagataaaggaaataaaagagttatcgccggaagaatatgacaagattgacggtaacgaaatcaataggttaatgtttgataggttccaaattttatctcaggatactcagatatttgttggtcctgatattcagtccactataggtaagatcaataccgcctcttccacgaatgattttagaatcttggataaaatgaaattagagttaactgtagatctatcaatccttcctaaagcatataaattacccacgataagagtttttggtcatttgcctcgcttaagtctttccataaatgacattcaatacaagactattatgaatttgattgctaattctataccttctatgattgatgatgaagaaaacaacggcgattacgttaattactcttctggttccgaaaaagaaatgaagaagcaaattcaattgcagttgaagaatactttgaaagcgttagaaaatatgcagccgcttcaaattgaacagaaattcttagagctccattttgatatcgatcaggcgaaaatagcattctttcaatgtatcaaaaatgattccagaaacagcgaaaaattggttgatatattgtgtcaaaggctaaatttcaattttgataagagagtcaaagaaatgaatttagatctaagagtacattcattagatgttgaagattacatcgagctgactgataacaaggaattcaaaaacttgatatcatccggcgttgaaaaagtgacaagatctcaaaaagatttgtttacgctaaaatacaagagagtgcagagaattgtgcctcataacgatactttgattgaattattcgatcaagatattgttatgcatatgagtgaattgcaattggtattaacacctagatctgtattaactttaatgaattatgcaatgcttacttttacggatcctaacgctccagaaatgccggctgatgtgttgagacataataaagaagatagggacgatgcgccacaaaaaatcaatatgaaaattaaaatggaggccgtcaatgttatttttaatgatgattctataaagctggcaacgttagttctatcggctggtgaattcacaatggttttactaccggaaagatacaacattaacttaaaattaggcgggttggagttgactgatgaaacaaatgaatcgttttccagggattcggtatttagaaaaataattcaaatgaaaggtcaagaactagtcgaattgagctatgaatcattcgatccggctacaaataccaaagattatgattcgtttttaaaatattctacgggctctatgcatgttaattttatcgaaagtgctgttaacagaatggttaacttttttgctaaatttcaaaaatctaaagtatcctttgatagagctcgtcttgcagcgtacaaccaagccccttccattgacgccgtaaataacatgaaaatggacatagtaatcaaggcacctattatccagtttcctaaattagtaggcacacaagagaacaattacgatacaatgcggttttatttgggtgagttctttattgaaaacaaattttcggtaatagacgaatctcataaaataaaccatatcaaacttggtgtccgcgagggccaattatcctcgaacttaaacttcgatggttccagtcaacaattgtatctagttgaaaatataggtttacttttcaatatagacagagatccccttccgcaagatgacactccagaacttaaagtaacgagtaattttgaatcatttgcgttggatttgactgagaaccagctgacttacttattagaaatttccaataaagtatcctctgcattcaatatcacagacgaaaactctggtgaatcaggaggaaaaggcgagatcaaaagtccctctcctgaccctgcttctttaagtagcgaaagcgaacgcacagctactcctcagtctctacagggatcgaataaaagcaatataaaaaatccagaacaaaaatacttggatttttcttttaaagctccaaagattgcccttactttatataacaagacaaagggcgtcacttctttgaatgactgtggtctgacaagaattatgtttcaagacattgggtgcagccttggtttaaagaatgatgggaccgtcgatggtcaagcacatgttgctgctttccggatagaagatgttcgtaatataaaagataataagcatacagaactaataccaaagagtaagaataaagaatatcaatttgtggctaatatttccagaaagaacttagaggtcggacggctattgaacatttcgatgacaatggacagtccgaaaatgattttggcaatggactatttggtttctctcaaagaattttttgatgcaattatgtccaaaagccacgaaaacaatttatactatcctgaaaacacaaaccaaaagcctgaaaacaaggctattgttgaaagcgttcaagaaggtggtgatgtgactaaaatccaatactctgttaatatcatcgaaacggctctgatcttacttgctgatccttgcgacatgaatagtgaggctatttctttcaagataggacaatttttagtaaccgatcagaatattatgacagttgcagccaataatgttggtatcttcctattcaaaatgaattcgtctgaagaaaaattgagattattggacgacttttcatcctccttgacaattgataaaagaaactcaacttctcagaccctaatgacgaatatacagctttccgttcagcccctgttgatgcgtatttcacttagagatattcgtctggcgatgttaatattcaaacgagttaccacattgctaaataagatgacggaaaaagaggataatggagaggaggaggagagcacagacaaaatacgattttctcatgaattttga

SEQ ID NO: 80560 - DNA, 678 bp, Saccharomyces pastorianus
atgttagagtctttagctgctaatttgctaaaccgattgctaggctcatatgtggaaaatttcgaccctaatcaattaaatgtcggcatatggagtggtgatgtgaagttaaaaaacttaaaactaagaaaagactgtttggactcattaaatttacccatagatgtgaaatcagggatactgggtgatttggtcttaacggtcccatggtcaagtttaaagaataagcccgtgaaaatcattatcgaggactgttatttattatgctcaccacgttcagaagatcacgaaaatgatgaggagatgataaagagagcttttcggttgaagatgaggaaggtaagtgaatgggaactgacaaatcaggctcgcatactgagtacccaatcagagaacaaaacctcttcttcttcttcagaaaaaaataacgccgggtttatgcagtctttgactacaaagatcatagacaatttacaagttaccataaaaaatatccatttaaggtacgaggacatggacggaatcttcactacaggcccatcttccgttggattaactttgaacgagctatcagctgtatctacagattccaactgggctccaagtttcattgatattacacagaatatcacgcataaactattgactttaaattcactctgtttgtattggaataca

SEQ ID NO: 80561 - DNA, 462 bp, Saccharomyces pastorianus
atgcaaattttcgtcaaaactctaacagggaagactataaccctagaggttgaatcttccgacactattgacaacgtcaaaagtaaaattcaagacaaggaaggtattcctccagatcaacaaagattgatttttgccggtaagcaactggaagacggtagaacgctgtctgattataacattcagaaagagtctacgttgcatttggtgttgagattgagaggtggtatgcaaattttcgtcaaaactctaacagggaagactataaccctagaggttgaatcttccgacactattgacaacgttaagtcgaaaattcaagacaaggaaggtattcctccagaccagcaaagattgatttttgccggtaagcaactagaagatggtagaacgctgtcggactacaatattcaaaaggagtccactcttcaccttgtcttgaggtcgaggggtggtaactga

SEQ ID NO: 80562 - DNA, 492 bp, Saccharomyces pastorianus
atgcagattttcgtcaagactttgaccggtaaaaccataacattggaagttgaatcttccgataccatcgacaacgttaagtcgaaaattcaagacaaggaaggtatccctccagatcaacaaagattgatctttgccggtaagcagttagaagacggtagaaccttgtctgactacaacatccaaaaggaatctactcttcacttggtgttgagattgagaggtggtatgcagatctttgttaagactttgaccggtaaaaccataacattggaagttgaatcttccgataccatcgacaacgttaagtcgaaaattcaagacaaggaaggtatccctccagatcaacaaagattgatctttgccggtaagcagctagaagacggtagaacgctgtctgattacaacattcagaaggaatctactcttcacttggtgttgagattgagaggtggtatgcaaattttcgtcaaaactctaacagggaagact

SEQ ID NO: 80563 - DNA, 246 bp, Saccharomyces pastorianus
atgaacatttatgtgccaccttgccatacccagattttagataaacaacctgaggatgctcaatggataatagtaagaaataagacggaaactcctttttgtgactttcttccatccccccgcacaattacatgggatgataatatacaaataccgttcgcaacttttgaaagaaggaaaaaattggaacatgtgtggaaagttcgtaagaacgtcatgagacgtggccaattcatgaaaagataa

SEQ ID NO: 80564 - DNA, 1611 bp, Saccharomyces pastorianus
atggtgatagattccaaacaggatctacctcaatataccaaagattcaggttcagaatcggactcagactcaagtaataatttcattgtgggatctccgtcaattccatcttcaaaaagtgcaaccgtagttctcaatagtgaagagtatgaggacgacgaaggtgatgacttgaacgggctggatgctgaattgatcgataatataacgtatgaaggagatgaagatgaaactatgtttgtggggttgaaagaaaaacagaagttacatttatctggtgttttccggctgcaagtggtgaaaggaggtattgtctacaacaatgtacactataacgcttcgagagaaattttaaccttctggcacccgttatcacagtccatacctactatagatttttcgcactttgcaggctggcaagacactatttttatgccgagaaacaacaggtttaaaattagagatgaagaattcaaatcatttccatgtgttcttcgcgtttttaattctaatcatacgggcttgttagaagcaggtcatttatatcgggatgttaattatctatggaaacctaaagaaccttactttccattaaacgagagaacaacgtatcatttattacatgagtcagaccgaattcaatctttatccgtaccgggatattggtcaactccgttagagaagttatatttgagtcacaagaacgctgcgtatgatacaagaatcatggtgattggtggtaaaaactctgggaagtctacattcttgaggcttttattggaaaaatttacgcaagatatacgagattctactacgagccaggaagaattggtatacctggatttagatcctggtcaacctgaatactcactacctgattcaatatccctgaataagattctttccagccctatttctctcggacaacatctctgccaaggttcaaatttccaaactttgttacagttctacgctggctcctcttccccgcaggacgagcccacatcatacctgaactgcgctgataaacttatagaccatttggaagagcaagccttcttcggaacgtcattgcttaatctacctgggtggataaaaggattcgggatgcagattttaaatcatataataaggaaatataagcccactcacttattgtttttggaaacagctaattcgaaaagacacctggatgaactaacaattccacagagtttttccacatcactacgagatgcatatgcacctgaagttgttcgcgttccagcccatagtctgaaccacaccttatcttctaggttccatgcatcacaactgagaacattcaaaatactggcactgtttcataaaataactcaatttgattatgattttgcgcctcttttaaaatctgcacctttgcaaatttcatatggcaaaggtaaaagcggtattaaaggcattcaatttcctatggaattccagaatctgaatcctcaagatatcaagtccgcattggaaggtactgtcattgggatatatacatattctggagaagactcactagaggtgaaatccttgaatacctttcccatcctacaatcgtgtacttcttcttctaaaaattcataa

SEQ ID NO: 80565 - DNA, 141 bp, Saccharomyces pastorianus
atggtttggaaaatcttctgcccaaggtttatctttgcttctttaagtttaatagtcactcaactggtcgttacttttggtacaattgcatttgctagtgggagattgattaagcacataaatgacattttttggaaatga

SEQ ID NO: 80566 - DNA, 1005 bp, Saccharomyces pastorianus
atggcagtcgtccccgccgcatttgccgacatgtgtgatactaatgttagaggtaaagccattgcgctattttctctaggtgtttttgtaggccccattttatcgcctgtcatgggttcttatatcgcacaaagaactacctggagatggttagaatatgttgtcggttgtttcgcttccgcagttttcgttgccatcgtattgttctttgaagaaacacatcaccctaccattttggttaacaaggccaaacagatgagaaagcaaagtaataactggggtattcatgctgctcatgaagacgtggagctatccatcaaagacattgtccaaaaaactgtgacgaggcctatcatcatgcttttcgtggaaccattgctactattcgtgactatttacaactcttttgtctacggtatcttgtatttgttactggaagcctacccacttgtctttgtggagggttatgggtttactgaaaacggtgagttgccatacatcgccttgattatcggtatgatggtgtgtgctgctttcatttggtatatggacaacgattatttgaaaagatgtagagccaaggggaaattagtgcccgaggccagattatacgcaatggtcattgcaggtaccgttttccctattggtatcttatggttctgttggacgggctactatcctcacaagattcattggatggtccccacagtaggaggggccttcatcgggttcggtttaatgggtattttcttgccatgtttaaactatatcattgaatcgtatctattgttggcagcttctgccgtcgcagcaaacactttcatgaggtctgcatttggtgcatgcttcccattgtttgcaggatatatgttccgtggcatgggtatcggttgggctggtttgttattaggtctatttgccgctgcgatgattcccgtgcctttactattcttaaaatatggtgaatctatcagaaagaaatccaagtatgcttacgccgcttaa

SEQ ID NO: 80567 - DNA, 1122 bp, Saccharomyces pastorianus
atgatccaaaatgtggtcgattcagacaccatttctgaaacagctgcaagattgactggtatccctgttaagaagttgtcagaatctgaaaatgaaaaattgattcatatggaacgtgacttatcatctgaagtcgtgggccaaatggatgccattaaagctgtttccaatgccgttagattgtctagatcaggtttagctaatccaaggcaaccagcatccttcttatttttaggtttgtccggttccggtaaaactgaattggctaaaaaagttgctggatttttgtttaatgatgaggacatgatgatcagggtcgattgttctgaattaagcgagaagtatgcggtctctaagttgttgggtaccacggcaggttatgtcgggtacgatgaaggtgggtttttaactaaccaactgcaatacaaaccatactccgttttgttattcgatgaagtagaaaaggcacatcctgatgttttgactgtcatgctacaaatgttggatgacggtagaattacttctggtcaaggtaagacgatcgactgttccaattgtattgtcatcatgacttccaatctaggtgctgaatttatcaattctcaacaaggatcaaagatccaagaatctaccaagaatttggtcatgggtgctgttaggcaacatttcagaccagaatttttgaacagaatttctagtatagtcattttcaacaagctatctagaaaagctattcataagatcgtggatattcgtttgaaggaaattgaagagagattcgagcaaaatgataaacattacaagttgaatttaactcaagaggccaaggacttcttggccaaatatggttattccgatgatatgggtgcacgtccactgaacaggttaattcaaaacgaaattttgaacaaactggcactaaggatcttaaagaatgaaatcaaggataaggaaactgtcaatgtcgtcttgaagaagggtaaatctcgtgatgaaaatgttcctgaggaagctgaagaatgtctggaagttctaccaaatcacgaagctactataggggctgacacgttaggtgatgacgataatgaggacagtatggaaattgatgatgacctagattaa

SEQ ID NO: 80568 - DNA, 735 bp, Saccharomyces pastorianus
atgaacgaccaaacgcaatttacagaaagggctctaacgattttgacgttggctcaaaaattggcttcggatcatcaacacccacaattacaacctatacatattctagctgccttcattgaaacgccagaagatggatcagtcccttacctacagaatctaattgagaagggccgttacgactatgatcttttcaagaaagtggttaatagaaatctagtaagaattcctcaacagcaacctgcacctgcggagataactccaagttacgctttggggaaagtccttcaagacgctgctaagattcaaaaacaacagaaggactcatttatagcgcaagaccatatattgtttgctctattcaatgattcgtctattcagcaaatatttaaggaagctcaagtagatattgaggccatcaagcaacaagctcttgaacttcgtggtaacactagaattgactctcgtggcgctgatacgaacacacctttggaatatttatcaaagtatgccattgatatgactgagcaggctcgtcaaggtaaacttgaccctgtcatcggccgtgaagaagaaataagaagcactattagagttttagcaagaagaattaagtccaacccatgtttaattggtgagccaggtatcggtaagaccgctattattgaaggtgttgctcaaagaatcattgacgatgacgttcccactatcttacaggcgctaaatgttcgggat

SEQ ID NO: 80569 - DNA, 201 bp, Saccharomyces pastorianus
atgacaattttgtgccaattaactggcgatggaatactagcgaaggaaaagagcgatcaagattatgctgacaaaaacttcaaacagcggttggcagggattgcgtttgatgttgccaaatgtacaaaggagctggtaaaaactgtagaagaggcaagtttgaaggacgaaataaattatttgaattcgaagttgaagtaa

SEQ ID NO: 80570 - DNA, 360 bp, Saccharomyces pastorianus
atgaaacatgaagaacaagaacaagaacaaaacagaagtgaggaagaggaaagtgaagatgacgatgaagaggaagaagacagtgattttgatgtggatacatttgacattgaaaatccggataatacactatcagagttactattgtatttagaacatcaaacaatggacgtcatatccacgattcaatcgcttttgacatcgatcaagaaaccacaggtgacgaagggtaatttgaggggagaatcgaatgcaatcaaccaagtcataggtcaaatggtggacgctactagcatatcaatggagcaaagcagaaatgccaatttgaagaaacacggtgattgggtggtgcaagtctaa

SEQ ID NO: 80571 - DNA, 150 bp, Saccharomyces pastorianus
atgacagtgaaaatggaatccccaaatttaaagggaaatactgtgtctgaacctcaagaaataaggagagacattgtctcctcagagccgatagagaatgttgaccccccaaaagtactaaaaaagattgtctttccaaagggctgttaa

SEQ ID NO: 80572 - DNA, 1434 bp, Saccharomyces pastorianus
atgacgccgactttcccctcgacttctggaataaatatgaagaaggggtttataaacccaagaaaaccagcatctttcttgaatgatgtggaggaagaagaatctccagtcaagccattgaaaattacacaaaaggcaattaacagtccgatcataagaccgtcatcgtctaatggagttccaacaacctcaagaaaaccttcaggaacggggctatttagtttaatgattgattcatcaattgctaagaatagctcccataaagaggataatgataaatatgtctcgcccataaaggcagtaacatcggcctccaattctgcaagtagcaatatttccgaaattcctaaactaacactacctccacaagccaaaatcggtactgttattccaccgtcagagaatcaagttcccaatattaaaatcgagaatacagaagaggataataaaaggagtgacataacaaatgaaatctctgttaaaccaacttctagcattgctgataaactgaaacaatttgagcaaagttccgaaaagaaatcatcaccaaaggaaaatcctatagcaaaagaagaaatggattcaaaaccaaaactatccaataaatttatcacttcaatgaatgatgtgtccacagatgattcaagctctgatggtaacgaaaatgacgatgcagacgatgatgatgattttacctatatggcattgaaacaaacaatgaagagagaaggttcaaaaattgaaaaaaataatgatagcaaactacctgcaaatatagtggaacttgatttacatgagtcatcggagtccgtgaagattgaatctcctgaatcgataaaggaaatcacgtcatctgaaatgtcttcagaaatgccaagtagttcgctgcctaagagattagtagaggatgttgagccttcagaaatgtcagagaagggcgcatctgtagaatcagtcaggaagaaaaattttcaagaaccacttggtgatgtcgaatctccggatatgacgcagaaaatcaagtctttgggtatgacaggaaaggctgtaggcccagagtcagctagcagggttgaatctccgggtatgacaggacagatcaagtctttagatatgacaggaaaagctgtagacccagaatcagatagtagggtcgaatctccgggcatgaaagagcagatcaagtctttgggtatgacaggaaaggctgtaggcccagaatcagatagtagggtcgaatctccgggcatgaaagagcagattaagtctttgggtatgacaggaaaaattgcagctcaagaatcaatcaagtccccggaagcggctaggaagttggcgtcatcaggagaagttgacagaattgaatctccaagaatggtaagggaaagcgagtccttggaggtagtaggcaatactatcccgctcaaaccatga

SEQ ID NO: 80573 - DNA, 357 bp, Saccharomyces pastorianus
atgaaaagggtcttgcagtcatgtgatcgcttagatatttacatctcaaaggtcttgcaacaggattacggcgatagcttaagcatcaattggaatctaccgccggagaaaaactggtctttgataaattcgaaattggcatggaaaagacaaacacattcctcttcttcctcaactactgatgaactcgataaggaaactttcttgttttggtactggttcatcgatctactcaggaaaatgtttgagttcgacccaacaaaaaggattaccgcaaaggacgctctggaccatgaatggtttaatctgggcatactggatgatggtattgcaacttataataatacccaaggatag

SEQ ID NO: 80574 - DNA, 1668 bp, Saccharomyces pastorianus
atgtttgctcggcaaaattcttttctaacagacaatctgaggaacagtctagacctgaatcaagcagacaatccgctccgtcctcggcaacaccaacaccagttgttcttggacaatgaaaatgccatagaactagacgaggagccgcgtatcattaacaccacaatcaataacagtaataatcataacagtagtcgagtggacgaggatgctgacgatgacatcatttttatcaaagagcagccaattcagttttcgtcacctttgattctgcctagtagcagcagtatcaataacaacaataatattgttacttcaaataatccagggtgcggtaccgcagttacaagcaatagtacgtatatcacgacaccaaagaaattcaagaagcaaagaaccatctcactgcctcagttgcctctatcgaagctgagctaccaatcgaactattttaatgttcctgatcaaaccaacgctatcgtgccaagagtaacgcaaactgaaaatgagctgttgcatctaacggggtcgtgtgcaaagactctggagggcaacaaggcagtgaatctcacgattgctcacagcacttctcccttttacaacccaccagcacaaatagcttccctgcctcaatccaacctcaagaaacaaattggttcttcactacggaaatttacatcaaacggctcttcagaaagcgcatcatccaataaatcaaatttcaaaacggacaaagacggtcactacgtttaccaggaaaacgacatatttggcagtggcggccgctttgttgtgaaggacctattgggccaaggcacgtttggtaaagtacttaaatgcatcgataacaagtatgaacctaattacgtggctgtaaaagtgataagggctgtagatagatatagagaagccgccaaaacagaactaagaattctacagactatcctgaataatgaccctcaaggtcagttccagtgcctcttgctaagggagtgcttcgattacaaaaatcacatttgtttggtgacagatctatacggcaggtccatttacgattttatgtgctccaacggcattgccaggttccccggctctcatattcaggccattgccagacagctaatcagatctgtctgcttcttgcacgatttgggcataatacacacggatttgaaaccagaaaatatcctgatttgtgacgaaacccatattgctcaaaaattgcctttgaaaaccgtacagtcgctaagcaagagacgccgtgaagccagtaaggggaagcgcaaaatcttgaaaaatccagaaatcaaaatcattgatttcggtagcgcaattttccattacgaatatcatcctcctgtaatatccactcgtcactatagagccccggaaattgtccttggcttgggctggtcgttcccctgcgacatttggtccatcgcgtgtgtcctagtagaactggttattggcgaatctctttaccccattcatgaaaatctagaacatatggctatgatgcaacgaatcaatggaacccctttccccacagacattattgacaagatgttttacaaatctaaacataaattgggcaactctccatcagacctaaactcaacggtgataaagcatttcgacagaaaaactttaagcttactatggccgtga

SEQ ID NO: 80575 - DNA, 1782 bp, Saccharomyces pastorianus
atggctgcagataaagtaatagttttatatataggtatatgtactgcacaattcacacgatgggtgtttctgcggtgcttgaaaagagctaggaatttactagcaacgttcatagtctgctgttttatggcagtagtgcttgttctggcgctggcacaccattttataaatgagcacagagacactaggagttcatcgacccaaatcgaagttgatgacgaaagtaaaagaaacgtacaccatgaccatgttctcactagaaccaatgcatacgcgacgccatacctcgatctggaacatgacaagaaaaacggtatcgtctacgatcatacaagaacggttgtccgtaaaaagaaccacgaagtggggtcctcgccactgcataaaaacctttttcacaaatttttgacaaagcttatttttaggtttatcgagaaggaaaaagttaccgaaggcgtaacgcaaggaaagttcaataatagtagcaatgaaattgccaatcatgaaccggtttttgaaaaaattcctgtacagtgcgacgatccattacagaatctaatcttatcggaagacttgacattagttgcggatcttaattattattttaaccagtacaatattcaaatagaggaatttagattggagaccgaagatgggtttgttatagatttgtggcacttgataccaaaatatagaacgacagattctgacaagaagaagaggccacccattttgatgctacatggccttttgcaaagcagtggttcgttcgcatccaatggtagaaaatctctggcatattttctgtatcaatccggttacgacatatggttagggaataacagatgcgggtttaggccggaatggaacgaagcgaaagtaccgacactagcttccaggtgggactgggaccttcgcgagatggttaagtacgatctgacccttttgattgataccgtgttagctaagacgcagtttgaaaagcttactttgatctcgcattctcagggcactacacaggggtttatgggcttggtcaacgaagataagtttttccctcccggttcgggatctaaagaatcttttttcacttctaagatcgcaaactatattgccttggcccccgcagtgtatcctggtcccttacttaacgagaaattgtttgttaagcttatgacaaaggaaatcgaaaatccctggttctttggtgaaacgagcttttttgagataatgatgattgtaagaaacttgtgcgttggtgagagcttgttctcctttgtttgttacaccatcttcaattacctgtttgattggaacgataccctttgggataccgcattaagagatcgccatttcctgttttcgccagtccatgtttcagtgaagttgatgcaatggtggctgtcacccgaccccaacaaggtaagttttaaatttggttcccataagatgttccccgataatgttaagtggttttcagacgcatcaaaggccccaaatatctacttgtttgttccaaagcaagatagattagtggacggagaaagactaatcaatcatttcgtcaatgtggagtcgaatgtcaactacaagatctggtacattgatgagtatgcccatattgatgtcctatgggcacatgatgtcatagagagaattggtaaaccaattttacagaatttgaacaactattactccaagaagccatccagcgcctttgaaagtgattgttcggacacagaggtagaaacggagctggagatggttgctgagaaggcttga

SEQ ID NO: 80576 - DNA, 1689 bp, Saccharomyces pastorianus
atgacgttagaaaaaggcggcaaagatgacgaaatagatgaagaagacgattctgaagaggcaaaagccgatttctatgcgcctgaaactgagggagatgaagctaaaaagcaaatgtacgaaaatttcaacagtttgtctttatctcgtccggttcttaagggccttgcaagtttgggttacgtcaagccttcccctattcaaagcgccacaatccccattgccttattgggtaaagacatcattgccggtgctgtgactggttccggtaagactgctgcgtttatgattcccataatcgagcgtttgttgtataaaccagccaaaatcgcttccaccagagttattgttctattgcccactcgtgagttagctatccaagtcgctgacgttggtaaacaaattgcacgtttcgtctccggtataacctttggtctggccgttggtggtttgaacttgagacaacaagaacaaatgttgaaatctcgtccggacatcgtcattgctaccccaggtagattcattgatcatatcaggaactcagcaagttttaatgtggactcagtagagattctggttatggatgaagccgatagaatgttagaagaaggttttcaagatgaactgaacgaaattatgggcctattaccaagcaatagacagaacctattgttttctgctacaatgaactccaaaattaaaagtttagttagtctttctctaaaaaaaccagtaaggattatgattgatcctccaaagaaagctgctactaagttgacacaagaattcgttcgtattcgtaaaagagaccatttgaagcctgctttgttatttaatttgattaggaaattggatccaacgggtcaaaagaggattgtcgtttttgtggctagaaaagaaactgctcataggttaaggattatcatgggtcttttaggtatgagtgtgggtgaattacacggttctttaacccaagaacagcgtttagattccgttaataaattcaaaaatttggaagttcctgtacttatctgtacggatttggcctccagaggtcttgatatccccaagattgaggttgttatcaactacgatatgcccaagagttatgagatctacctgcatagagttggtcgtaccgccagagctggtagggaaggtcgttccgtcaccttcgtcggtgaatcatctcaagatagaagtattgtacgtgctgctataaagagtgtagaagaaaataagtccctaactcaaggtaaagcacttggtagaaacgtagactgggttcaaatcgaagaaacaaacaaacttgttgaatccatgaacgatacgattgaagatattctggtggaagaaaaggaggagaaggaaatattaagagctgaaatgcaattaagaaagggtgaaaatatgttgaagcataaaaaggaaatccaggcaagaccaagaaggacatggttccaaagcgaatcagataagaaaaattccaaagtattaggtgctttatcaaggaacaagaaagtcactaacagcaaaaagagaaagcgtgaagaagctaaggcagatggcaatggtgcacgttcttatagaaaaaccaaaaccgaccgtattgcagatcaagaaagaacttttaaaaagcagaagagtacaaattcaaataagaagaagggcttcaaaagccgtaggtaa

SEQ ID NO: 80577 - DNA, 216 bp, Saccharomyces pastorianus
atgccgttatctgaggttactttaatctattttcctactgatgacacaattgagtcaatccaacgtggaacgggttgcccttgtatacatttcagtttacttcttttcatgtatttccttaatagtttatttttcactttctgcctatccgtttcaattccgaagaaccgtcaacatccaataaagatcatctacaacaataagtgcccctcataa

SEQ ID NO: 80578 - DNA, 144 bp, Saccharomyces pastorianus
atgacacaattgagtcaatccaacgtggaacgggttgcccttgtatacatttcagtttacttcttttcatgtatttccttaatagtttatttttcactttctgcctatccgtttcaattccgaagaaccgtcaacatccaataa

SEQ ID NO: 80579 - DNA, 1062 bp, Saccharomyces pastorianus
atgcaaagcgtgttgcatccttcttcgttaggatcgttagcaacgtcctccaaattttctggatggtcgtttgctcaagggttttttgtaggacagctaagcatagtgttgttgttcatctttttcctaaagttctttatattcagtgatgagccatctaaaagtaagaatccgaaacctgcagcctcccgtcacagatcaaaatttaaagaatatccctttatatctcgcgaattcctgacttctcttgttaggaagggtgctaaacaacactacgagctcaatgaagaggcagaaaatgaacatcttcaagaactagctcttattttagagaaaacctattataatgtcgacgtgcaccctgcagagtcattggactggttcaacgttttagttgcccaaataatacagcaattccgcagtgaggcttggcacagggacaatatccttcattccttgaatgattttattggaagaaaatcacccgatctgcctgaatatttggataccataaaaataactgaactggatacaggtgatgatttccccattttctcgaattgcagaatacaatattcgccaaattcaggaaataaaaagctagaggctaaaattgatatagatttaaatgaccacttaactttaggagtagaaacaaaactattacttaactatccaaagcctggtattgccgcactccccataaatctagtagtgtcaattgtgaggtttcaggcgtgtttgaccgtatctttaactaatgcagaggagtttgcttctacttcgaacggtagcagtagtgaaaacggtatggagggcaattcaggatactttttgatgttttctttttctcctgaatatagaatggaatttgaaatcaagtcgctaattggctcacggtctaaacttgaaaatattcccaagatcggcagtgtcattgaataccaaataaaaaaatggttcgttgaacgatgcgttgaaccaagattccaatttgtcaggttaccaagtatgtggccacgtagtaaaaatacgagagaagaaaagcctacagagttataa

SEQ ID NO: 80580 - DNA, 249 bp, Saccharomyces pastorianus
  modified_base (237)..(237): a, c, g, t, unknown, or other
  modified_base (241)..(241): a, c, g, t, unknown, or other
atgactgatagtgagaatgaatccaccgaaacggattcgttaatgacgtttgacgattatataagcaaagagctacctgaacatttacagagactaatcatggagaatttgaagggttctactactaatgacttaaagcaaacttcaaacaactcagagtttaatgtcagtaaaaacgggagcttcaaaggtctcgatgatgcaattcaagctttgcaaatgcaaagcgtgttgcancttnttgggtag

SEQ ID NO: 80581 - DNA, 132 bp, Saccharomyces pastorianus
atgcctgcaggtcattttggtagaatacccgctgtaccttttagcctaagcgccaattctcctaaaatcgatcaagatatggattatataagagagcatgataaatccccgttaagtcgtaaacgtcaatag

SEQ ID NO: 80582 - DNA, 129 bp, Saccharomyces pastorianus
atgggcaaattcggcacgacaaataaatcaacggagaatcttctgcgtgataaattcgtacccgagacatctccaactaatattcccactgatgtactcatcaagccaagggcaaataacggattccac

SEQ ID NO: 80583 - DNA, 741 bp, Saccharomyces pastorianus
atggccaacgatgaagctgaaagttttaggaatacttggctactatttcgctcgttccaacaatggataactttaacacaaactcttaaggagcagtcaaggttagcagatcaggcctttttgaataagatgtttaggaaaattttaaaggcacaagagcattggaaacacttagaaactgttaacactgacaacattaagaagatatttttacgaacaacatttcatatatggaagctaagacataaagaaataaactaccacgggttggaaagaaggattttcgaaagaataaaacagaaagttataaactatgaatacaataagagcattgcagaaaaagtgaggtcgttttctctacaaagaaaatatctgaataaatgggaaaagaaaaacattgaaaacgaagataaacttggggcactttatgagctggagaataaattcatcaaacaaaagttttttcgcaaattaaaccggtcatttcaacatagtcaacaagaggcaattgcaaagagtaaactaaatcagacacttttgaggtgcgtttttgagaagatgtggctgaaaagattcgaagaccatctgcatttgtattcaattgtaagtctaaaagaggctaacctcgtgaagcgtatttttcattcatggaaaaacttctatatattgacctcaaagcaagcgattattcgaggactaatttgctcaagtcatcattgcgaagttggaaacttgaagtaa

SEQ ID NO: 80584 - DNA, 1248 bp, Saccharomyces pastorianus
atggaaaaacttctatatattgacctcaaagcaagcgattattcgaggactaatttgctcaagtcatcattgcgaagttggaaacttgaagtaaagttaaaaatatttgagcagaaatgtaaaaagagtattcaagcaagcgcgtatcgtacatggaggaaaagaatacagtatgggaaaatatcgagcgaacatgttaaaacggcatttcgtgcaaaatatcatgatgtgtggaaaaggaggatgctacaaatgaattctatgaatgacgaagcatccaaattttacgaagagggtctcgtaaatgagtgtctagctatatggaaagaacgcctgattaaaactaaggaattggaggatagatacaatttcttatgtaagacacatgcaattttgactgtaaaacggacgctaatgcatattgataatgttcatttgctatatacgaaactggcgccctctatggatagaataaagctttctaaggcctttttaaagtggcggaaagccacaaggttcaaagtcaggcataagttaaacgatattttacacgtttatgaaaagagtaaagagcgcgaacttcaaagccaactgttcaacgcttggcgaaatagattttgcttctacacagaagaatgtaacattcaggctatttcaaagagaaactaccagcttgaaaaaatggtgctgaagaaatttagagaaagacttttagagatagtaaaatcagaagaattagcagacgaagttcgcgaagaatttgtgttagtcaagacgttttatatttggaaaactcatctagacgaaatattttatatgaatacattattggaacaatcggaagctaataaacaattcataattacatccaaattcttgaaaatgtggagtcttcgattcctaaaaattaagcgtaatgatgagacagtcgaggtttttcgtcatcggtgggacagggccactgtaaggggattgttattattatggaaaaatcgttcagacagttctccaaagagaaggaaggacttcaatcttaaacatgaactaaaaactcccataagatcagactctcaaaacgcctcaaccataccaggctcagaaagaataaagcagcacagaatggaagcgatgaagtcgcattatagcagggcaagaagagctataccaagtccggtgaaatcttctagtgttcttgattctacagctaaaaaacagatcaaccttgaaagtacgacaggcttaaaagga

SEQ ID NO: 80585 - DNA, 1191 bp, Saccharomyces pastorianus
atgaaagcagagctagcttgttctcaactaatgaataagttttctacaaacttcatttcatccatagatggtacatcctccgacattaatacgaaggaactctgtggtggtgcccgtatttattacatttacaataatgtttttgggaattctttgaagtcgattgatccaacttctaatttatccgttcttgatgttagaacagcgattagaaattctactggtccccgtcctacattatttgtacctgagttggcttttgacctattggttaaacctcaaattaaacttttactagaaccatctcaacgttgcgtcgagttagtttacgaggagctgatgaaaatatgccataaatgtggctccgctgagctagctagatatcctaaattgaagagtatgttaatagaagttataagcgaactacttagagaaaggttacaacctactcgctcttacgttgaaagcttgattgacatacatcgagcctacatcaatactaatcatcctaattttttaagtgcaacagaagcaatggatgacatcatgaaaacgcgtagaaaacggaatcaagagttattgaaaagtaagttgtctcaacaggagaatggacaaaccaacggtattaatggtacttcatctatatcttcgaatatagatcaagattctgctaaaaacagtgactacgatgatgatggtatcgacgcagaatcgaagcaaacgaaggacaaatttttaaattatttctttggcaaggataaaaagggtcaacctgtgttcgatgcatcagacaagaaaagatccattgccggtgatggaaatattgaagattttagaaatttacaaatatcagatttttcactgggcgatatagatgaccttgaaaacgctgaacctccactaaccgagagagaagaattagagtgcgaattaattaaacgtctgattgtttcatactttgatattataagagaaatgattgaagatcaagtaccaaaggcagttatgtgtttactcgtcaattattgtaaggattctgttcaaaacagattggtaaccaaactctacaaagaaacactgtttgaagaacttttagttgaggatcaaactttagctcaagatagagaactatgtgtgaaatcactcggagtttataaaaaggccgcaacccttattagtaatattctgtaa

SEQ ID NO: 80586 - DNA, 441 bp, Saccharomyces pastorianus
atggctagtttagaagatcttattcctactgtcaacaagctgcaggatgttatgtacgactccgggatcgatacactcgatttgcccattttagctgttgttgggtcacaatcctccgggaaatcctcgatattggaaacgttggttggaagagattttttacctaggggtactggtattgtcacaagaagaccgttagttcttcaacttaataacatatctccaaattctcctctaatagaggaagatgataactcagttaatccacatgatgaagttacaaaaatatcaggattcgaagctggtacgaagcccttggagtataggggcaaggaaagaaatcatgcagatgagtggggggagttcctgcatataccaggaaaacggttttatgatttcgacgatatcaaagagaaatcgaaaacgaaacagcgaggatag

SEQ ID NO: 80587 - DNA, 189 bp, Saccharomyces pastorianus
atgcagaaaattatagaagctactgacttgcttttccaaggtaaggaaaagttagatatcattcttgatgcaagttatttagatcctaaggataatactatattatcattcgagaatgcagccgtcctctgccaagtcttgaaaacctttttgaataaaaaaagctccgtgaaaatactgttatattaa

SEQ ID NO: 80588 - DNA, 366 bp, Saccharomyces pastorianus
atgtctaatccagatgatttagatgatggactcgcctatgattttgatgccgaacatgaagtaatttttgacgccaaggatggtagtcccccaaccaaaaaggtacaaaagaggtctatagaacaagatgacgttgatgatatagatgggaaaaaagaggagagaaattcagaagatgattcgaatagacctatttcgaaaagacagaaaaagctacagaaaaaatcaaagctaattgagaaaaagaaagaggaaagccagtatatcgtctcacaacgaaaagcacttccagcaagttcaccagaaaaaattattgagtacctaacaactttgatacgagaaaaaaatcctgacttgagtgtatag

SEQ ID NO: 80589 - DNA, 1182 bp, Saccharomyces pastorianus
atggaacctgtggtcacttacttaattcaaaaattccccatttccaaaatcctaggtacttttattaccgtctggggtatcgtgttggcttgccatgctgcttgtaagacgtacgcctcgttgatggtcgttcgtactctcctaggtctctttgaatcctcgagtgcagttggttgtatcgctattagtggtatgtactatactaaatctgaacagagtgcaagaattggattctgggccacacaggctggtacaggttatattgtgggcgggttaatttcttttggctttttacattatcatggtaccgctttcacctcttggcaaataatgtttttggtcattggtctggttacagttgcgtttggtgttctaacattcttataccttccagataacgtcaccaatgcttggttcctaaacaaagaggaaaaaattcaagttgttgagcatatcagagctaaccaaactggcctggaaacaaagaagtttaagaagcagcaagttaaagaactattccttcatgataagtttacttggccgatgcttttattaactgcatgttctcaaatttctactggtgccattggtacattttcagtgaccatcactggtacttttggtttcgacaagtacgaaacagcattactgcagttgcctattggtgccattacggctatgattattcttataacaactcaaatgttgtcccgctggggtcatatcacactcataaccacatctatgtatattccagctattataggttgtatcgttcttatcagtttacccttatcccataagatcggtaacttattttctctgtacttgctttacagtggttcctgtgtcattaccaatatttacatctggaattcatgcaacacctccggttacaccaaaagagtttttagaaatgctattacaatgattgtatacaatgtctcctgtattattgctccacagatgtttagggcatactcagctccacgttacataccagcaaagattgccttattggtcactcagtgtgtttgtgttcccctacaattatacattggctacatttgcaagaaggagaacgaaaagcgtgataaggaacaagaaggtcaagaaaggaagaagtaccaatttttggacttgactgatatcgaaaacagaaatttcaggtacatttactaa

SEQ ID NO: 80590 - DNA, 90 bp, Saccharomyces pastorianus
atgaaaaacatgtcacaacgatccatggacgtggagaagaaggcagctaacgctgatagttgttccgtaagtacctcgagcttaatgtag

SEQ ID NO: 80591 - DNA, 483 bp, Saccharomyces pastorianus
atggatttacagctgcctgtcttgtcttttatagaagctgccaagcagattagggacttcgaaaaacaaaatggcattggcattcaaaaaagtctcaataactcacactccaatcttgaaaaaggtacttcaaagagattctctcaggcgcccgtgattattgtagcattgaccgcatctaactctcagatggataaaagaaaagcacttctttctggttgtaacgactacctgactaaaccagtgaatttacactggcttagtaagaaaattacagagtggggatgtatgcaagccttgattgattttgacagctggaagcagggagaaagccggatgaccgacagtgttttggttaaatctccacagaaacctattgcaccttccaaccctcactcattcaaacaagcgacatctatgacccctacacacagcccagtaagaaaaaattcaaacctctcgcccactcaaatagaattgtga

SEQ ID NO: 80592 - DNA, 300 bp, Saccharomyces pastorianus
atgaagactgtctattacaaagaaatcacctaccagcagtatcttcaactgcaacctgaacaacaggaaaaatacctggctttatgtcaaaaagattttgaacaagagactgaaagaattgcatttgatcgtcaaggaggtgtgcctggtattgctaggaaatttgcacaagaagaagttgcttggttcgatcgcgttacaacatggtcatatatgaatgcttatattccgagctacagaagaagaagaaaccttttaaagattgatatgttaaagatgtccaatgctgaagaatattga

SEQ ID NO: 80593 - DNA, 1377 bp, Saccharomyces pastorianus
atggtaatctattcaataatgagacctaatgtccccggtgtttggtatactatgggttctgtactaagactaacggttgacctaggactacattcggaaaaaattaataaaaattatgacgcctttaccagagaaatacgcaggcgtctattttggtgcgtttactccttagatcggcaaatttgctcgtattttggtcgaccttttggtatacctgaagaaagcatcaccaccaggtatcctagccttttggacgattccttcatcacattaactaaccgagaaattgacgactactcagacttaccaagcccaaatccgtcttcaaaagttatcgcattggccatgtataaaatcagaagaatccaagctagtatagtgagaatactctacgcgcccggtgcagaattgccgaggaggtttatggatctcgagagctggcggattgaaacctacaatgagcttgagcgttggttccaagtggacgttcccaaaaactttgagatgatgaattgcaaatttaacagcatctggtttgatctgaactatcattactcgaagagcattctttatggactttctccaaaattccctactttgaatgataccgcttttaaaattgtcctggacagtacgaagggcaccatagacgtattttacaatctttgtgtcaataaaaaaattggttacacgtgggtagcagttcataacatgttcatgacaggtatgacttacctttacgtaaatttttactcaaaaaacaacataaatgattgtcaagaaaaagtgtcagagtacactgaaaaagtgttgatagtactgaagaatctgataggtttttgcgaatctgcgaaaacctgttacacgagttacaaaattttatcatcagttgtaataaagttaaaatttatgcaaataaatgatgccaaagggatattttcggattcaaatcccctaacctctcaggcaaaccgcatgtcaagttatgataaaaaaacgaacgtacttggttttgacgacggtacttttgataacaaggtttttaatagaaccaattttgaagaaaaagcaccttttgatatacctctagatgaattttttaccgaactggaaaaacacagcaatgtttcccagtttaatactttagatgtaagcgaaggtaatcaagtgataaatgaaagtgcttctacaaatacgtcttctgcattgaattgccagtcgtataccaataatcaagatatcatggatatccttttccaggttacttcgggatctgtatgggatgagttttttgtcaggtctggtaacggaaacgaaggcgagtcttcttacgatatcagtaaaggaaagaactctgaatccggtggaatattttag

SEQ ID NO: 80594 - DNA, 975 bp, Saccharomyces pastorianus
atgatgcgtgtgttgaaagaatatggagtagatcccacgaaaatacgaggaaatatacctgctacaagcgatgatgaaccttttgatttgaaaaagtacagttcagtttcatctttgggagaagagggaatattgccacataatggcttattggcggattatttggttcagaaagggaattctatggcatcctcagctataacgagcaagtctatggcaagcccacagactataaatgtacaacgcaaggaatttctggtaaactcaaaaaaacaagatggtagcgctttattacccgagacaggcagccctatgacttcagatgcaagagcggaagagctacgccgatgtaataaggagatcagtgcgctgggcacgatgagagaaagtagttttaactcttttttaggagattcatcgggtatttcctttgcgaaattagtcttcacggcaactaattttcgtcaagattccggagatgacgttctggatgaagatattaaacaaagggaacagaaatacaatggatatgcagaggctgaaaacaatccacactttgatccattggaactaccacctcgacatgccgctgaagttatgatatccaggttttttgtagatactaattcccagttacctttgctgcatagagaacttttcctgaaaaaatactttgaacctatttatggtccctggaatcccaatattgcattggcatctgatcagacaggcataaatagcgcgttcgaaattccaattaccagtgcttttagtgcgcatactgaaccaaaaagggagaacgttactgagaagattgacgtatgctcttccgaggatgttccatggtatgacacttgggagacatctcaaaaagtcaacatgcgtccgatagttgaactaccgacaaaatttcacataccttattttttttttaaacattatatttgctattggccatgctacgcaggtacttaa

SEQ ID NO: 80595 - DNA, 960 bp, Saccharomyces pastorianus
atgcaggagaatgggaatagcggcaatggaaaactagcacctttatcaagggatcactccaacaactcgtacgatgaggagaaagaatatgaagattataatgaaggagacgtagaaatgacggaggttaacaatgccggagaagaagaagaagaagaagacgacgaagcaaaagaaaagcaagaccatgtcgttcatgaatataacgttgacgcagatagaaattccagtattaatgacgaggcgccactacaacagggtctgtatcaggtggatcaagaagatatgaatccacaatatgtcgccagcagtcctgataatgatttaaacttgatacctacaacggaggaggacttctctgacctgacgcatttgcaaccagaccagtaccatgcccccggatacgacactctgctaccacccaagttgcaagaatttcaacagaaaaaatgtctgatattggatctagacgaaactttggtacattcttcctttaaatatatgcattcagctgatttcgttttgcccgtcgaaatcgatgatcaagttcacaatgtctatgttattaagaggccaggcgtcgatgagttcttgaacagggtgagtcaactatacgaagttgttgtgttcacggcaagtgtttcgaggtatgcaaacccccttttagatacgttggaccctaatggaaccatccatcatcgattattcagagaagcttgttataactacgaaggtaactacatcaagaacttatcgcagatcggaagaccattgtccgaaacaatcatcttagataattcgccggcctcttacatctttcatccgcaacatgctgttccgatatcttcttggttctctgatactcatgataatgagttactagatattatcccacttttggaggacctttcatcaggaaacgtgttggatgtggggagcgtgttggatgtgacgatatag

SEQ ID NO: 80596 - DNA, 1314 bp, Saccharomyces pastorianus
atgactagtaatacctctttatcagagaacggtgatggaaatgctaatattaaaatggaaacgaatgtgaaccaagccccatatgctgcagagaatcccttccaaaacattgcgcttgcggaggataccaagctggtacctgacttaaagtactattataaagagtatggtattgatattgaagaatttgaggtggagacagacgacggttttatcattgatttgtggcacttcaagtccaggttaaacgatggcgtagaggaagtgaaacgtgaacccattttgctattacacggtcttttgcaaagttgcggggccttcgcatcttcaggtagaaaatctctggcatacttcctttatgaatctggatttgatgtttggttggggaataacagatgtggcttaaatgccaagtggaacatgaaaaaattaggtaatgatcattccaaaaaatgggattgggatatgcaccagatggttcaatacgatttaaaagcacttataaattatgtacttgatagtaccggatatgctaaactatcgctcgtggcgcattcacaaggtacaacacaagggtttatggggcttgtcaacggtgagaaactatacgcaagtgattttaaattagtcgataagctggaaaactttgttgctttggcacctgcagtgtaccctggacctttattggatgaaaaagcatttgtgaggctaatggcaaaaggtattgattctccgtggtactttggtagaagatcgtttatacctcttatgatgacaatgagaaaactaatggttgggaccaagattttttcgttcctctcatacatcatgtttaactacctatttgattggaacgatgtcttatgggatagagttttaagggaccgaaatttcttattttcaccagtccatatttccgtcaaactaatgcaatggtggttgtcacctcttcctaataagctaagttttaagaagggtgcagagaaaatttttccagataaaaagacatggtttcctattgccaagaatgatgatgacagtggcaataatttggataacaacaaactacacttaaatccgaaaagacaaaatagtgaagaatttccacacattataatgtttattccaaagcaagatagattagtagatggtgaacgattaattaatcacttcattaatcatgaagcaaatgcagtgtacaaaatctggtatattgatgagtattcccatctggacgttttatgggcgcatgatgttatagatagaattggtaagccaatgatagaaaatttgaggtttcctaatgcaaggtga

SEQ ID NO: 80597 - DNA, 414 bp, Saccharomyces pastorianus
atgagggctatgcaggaaggtgctaaggcaatgaaaactattcacagtggccttgacatagataaagtggatgaaactatggacgagataagggagcaagtcgaattaggagatgaaataagcgacgctatatccaggcctttaattactggggcaaacgaggtggatgaagatgagctggacgaggaattggacatgctggctcaagaaaatgctaaccaagaaacgtccaagatcgttaataataatgttaatgcggcgcctatctcagagaacaaagtctcactacctagtgttccaagtaataaaattaaacaaagtgagaactctgtgaaggacggggaagaggaagaggatgaagaagatgaagatgaaaaagcattaagagaactacaagcagaaatggggctttga

SEQ ID NO: 80598 - DNA, 249 bp, Saccharomyces pastorianus
atgtggtcatcactttttggttggacatcaagtaatgccaagaataaagagtcaccaacaaaggccatagtgcggttgagggagcatatcaaccttctatccaaaaagcaatcgcatttacgtactcaaattacaaatcaagagaatgaagctagaatctttttgacgaagggcaataaagtaatggcgaagaatgcacttaaaaagaagaagacaatcgaacgacctgcaggcatgcaagcttggcac

SEQ ID NO: 80599 - DNA, 81 bp, Saccharomyces pastorianus
atggacaaagttgtcttccaagcggcggattcatttgatatcgtctacgtggagaacccaattcgtttattccaccactaa

SEQ ID NO: 80600 - DNA, 1149 bp, Saccharomyces pastorianus
atgggcaaatataccaagactgcgatcctgtcagtttatgataagacaggtttattagacttagccaagggattggtagagaacaatgttcgtatcctagcatccggtggtacggccaacatggtcagagaagctggttttccggtcgacgatgtttcttcaattacgcatgcaccagaaatgctagggggtagagtcaagactcttcaccctgctgtgcatgcaggtattcttgccagaaatttagagggcgatgaaaaagatttaaaagagcagcacattgataaggtggattttgttgtatgtaatctatatccgttcaaagaaactgtggctaaaattggtgttacagttcaagaagctgtagaggagatcgacattggcggtgtgactttgttaagagcagccgcaaagaaccattccagagtgactattctttcagaccctaatgactattctatctttctgcaagacctgtctaaggacggtgaaatttctcaggatttaagaaatagatttgcacttaaggcgtttgaacatacggccgattatgatgcggccatttctgactttttcaggaaacagtactccgaagggaaagcccaattaccgctaagatatggttgtaatccccaccaaagacctgcacaagcttatatcactcagcaggaggagttgcccttcaaagtgctctgcggtacaccaggatatataaatcttctggatgccttgaactcatggcccttagtgaaagagttatctgcatcattgaacttgcctgcggcagcatcgttcaagcacgtttctccagcaggtgctgctgtgggacttccattatccgatgtggaaaaacaagtttattttgtgaatgatatggaggatttatcaccattggcatgcgcatacgctagggcccgtggtgcagataggatgtcatcctttggtgatttcattgcattgtccaacattgtagatgtggccactgcaaaaatcatctctaaagaagtttccgatggtgttattgctccaggttatgaaccagaggcattgaatatactatctaagaagaaaaacggaaaatactgtattttacaaatcgatccaaactatgttcctggccaaatggatcccgagaggtttttggcgtaa

SEQ ID NO: 80601 - DNA, 90 bp, Saccharomyces pastorianus
atgtgtttccaattaatacgcttactcaaggaattagacagagaaaacaacacacaattggttcaaaaggcactcgagagattcaaataa

SEQ ID NO: 80602 - DNA, 2733 bp, Saccharomyces pastorianus
  modified_base (1294)..(1294): a, c, g, t, unknown, or other
atgttcatcaaacagtctgaaaaaaatacacctaaatgcctctacaaaaaaaaaggtaaggtaagagtgttattgaccggaagctgtaagaaactgaacacgtggaaaatgcacttatggccagtcagtccgccccaattgcttagaattccaccccgcaacgccgaattaggtgagggtactaaaatagatgattgcaatattcttcaatcaatgacactaccccaggccaatgttcttatcatgctaaccccaacaagagtgctcatttacaacttcaaaccaatggcactagtagctagccatgaacgaacaatggcttctcttaaggaatttggcgataacagatcaatgaaacgatcagctccatataatgatatcatcgaagggcttatttcaaaaaaggactcgcaatacttattgtggcaccagggaaagctgatattttacgtaatgactgataaaaacttccttttaacataccaaattttaaaaaactgcacaaatgaaataattttcaaagaatacggcatacccgtcatagagcctcttttaatgagtgaagaagaagcgaacagtgctgaatatgactataacaacgatgatgatactctcacggtatttgataaaaatagttcttcaagaattatacagaatggatttggcataactaaggaaaaagggtttttacactttctttctaatcaagaaaacattgatgaactccccgtgaaaaaactagaacttcgtttaaaagtagttcttaaatttgactatgaaatcatagacatgattggcatcaagacattttccaaagtcggggatgggcgttatgaagaagttttgatagttttattccctcatggattacaaatacttacaatatcggattttaaagttagcaagagctcgttggttgaagtgaagaagggatccaagacaattgtgtgtaataaacaattaatggttttatctcatgattccgtcgaaaagcagactattgtaagcattatagacattgaaaagcaagctgttgaagcaataccgttaacggacacaccagatgaacttttgacttgcctagaagttaatggatacctggtggtcgtttacaaagaaaaaataatctgctttgatacaagaattaaaaaagtaagccattcttggaaaccaccatttgtgataaaactttgcgataaaattaatgataaaatattacttttggtttctgaggatagtgttaacattcatttttacacagaatttgggaatctgtatttcgctacatatttgnacgaagatgattataatggtgataacaataatgacaacagcaaggataaaaatgagaaaaaggcggctgaatataaaatttctgattttgtatgcttggataaatcactgataacagtgtctcattccggaaaatatcaagtttggaaattatgggaagaaataaaacaaacacaatttgatttcagaaacccaaaatgttacgtattaaccaatacgaacaatgatgtaatcatatattcacctgtgacaagttcttcaatcaataatgataatttacaagtcataaaacttcctacaaagactttcaataatcatattgcttttgtaaaaattaattcttccttgaggttatttgctacttatgtgtcgaacaaaaacatactgcttatccacaatctagagaccaatatgtggtctagttttgctgaccaaaacgtgttggatttacattggctaggtgataattatttggtttgtcatatgaagaatgatgacggctcaacaaatctgaaatgtctgcagattccactgcaagaagcgaatccggacgtggaactatcagattatgtcatttgggaatacaatgttccagagaatacgattgttttcagtttacatgttaatactttatcccggtataagttgttgaaaatgaaatccaagaatcacaatgcttctgaaaaacaacctgatgcattgcttaaaactgccgagattattttagttactgatacacagacgattgtcttcgatgtaatttctactgtacatccatgtggattaaacatcatcaaaaaattctaccagtatctcaaaattaacattccaattgatgttttacccaacaaaattgagtggataactaacatgaaggagggcttgttattttttgccgataggaaatttataaagcttggcaaagtggatggagggggctggcaaaccttaactttgttggataacatagaaaaaataatcgatgttatcagggacgaaatatttgtagttcaaggccataattacgtcgtatactctttggaagatttatgggatgataaaaagccactagtttccattccaatcgaagaagatttgtatccaatatcaaccaccccagaaacagctacaacacatacacttcactgcatttttaacgcgcgattttccaaattggtggtgaaacaccaaatatacctcgaccaattaatcttagcgaaattagaagacaacacagatttggaggatatttcacacaattatcgttttttaaagccttacaaatttgcactcgaaaagattctgtctactaaaatactgcgaagcgactctttggatgatatcctgaaattaattaagatgtatgacaacaccgatcctgagcataatatttcaccaccaacccacagtggtatgttagaaattattataattgtttaa

SEQ ID NO: 80603 - DNA, 177 bp, Saccharomyces pastorianus
atgacaccaagagatttattagcactctgtatcgaagaaaatgaggctaaaatgcttggcgtacttctgttagtgtttttaaattacgatgagaaagatttgggagatgatctacattttaagaaatcagatttacggagtgaggaaagcaaagctctaaatgattactttacataa

SEQ ID NO: 80604 - DNA, 921 bp, Saccharomyces pastorianus
atggagaataaatttctgctgaaaaaaagttctgtacttccctccaagagagtggcatcttcaccgttgagaaatgataacaaaagtaaagtgaacccaatagggtcagtagcctccgcatcaaaaccatcaatggtagctgctaacaataaatcgaggatcctgttgacgtctaagtctttggcaacgccaaaaaacgtagtagctaatagcactgacaagaatgaaaagttgattgaagaatacaagtacagactgcaaaaactacaaaatgatgagatgatatggaccaaagaaagacaaagcctattggaaaagatgaataatacagaaaattataagatcgaaatgattaaagaaaacgaaatgctaagagagcaactaaaggaagcgcagtctaaattgaacgaaaagaacattcaattaagatccaaggagattgatgtcaataagctgtctgatagagtactgtcactagaaaacgagcttagaaacatggagatcgaattggatagaaataagaaaagaaatgatacaaacttgcaatcgatgggtacgatttcatcatactccataccttcttccaccgtgtcaagcaactatggagtaaaatctttatcttccgctttgccatttaaggaggaggaagatgtcagaaggaaagaggacgtcaactatgaaagaagatcaagcgagtccatcggcgacctgccgcaccgcgtaaactctcttaacatacggccgtacagaaaaaacggcactggagtgagcagtgtctccgacgatttggatatcgatttcaacgatagttttgcctcagaagaaagttataaacgtgccgctgcagtgacatctaccctaaaggccagaattgaaaaaatgaaggccaaatcaaggcgggaagggacaaccaggacgtaa

SEQ ID NO: 80605 - DNA, 921 bp, Saccharomyces pastorianus
atgactgattatgaaggtttttatgcatacaatcctcacaaaggtgcagcgattgcatttgtcgttctgtttggcattttaatcctttctgccttggtgcagatcataatggcaacacacacgagcaagagacgtattcatcgctgggaaaacaatgagttgttagaggaaaattccacaataatatactttcctgcccgcggtttgatgtggacacattttcctttcgttttagggatttgtttagagttcgtaggttatgtgttgaaaatagtctttatcaatagcccctcgatttcgactttcattgctcaatcggtgcttctattgatagcaccttcactttacgcccttagtatttttatgttgttcagcaaaatggcacgtctaattcttatggaggcatatatgttaattcctgcgaaatttagtacagtttctttcgtagtggcagacatgattgggcgtgtcctacaggctgtaggaggtgggttgttatcctcatggaacagcaggaatactgggcgtatcctaattattgtgggtctttttattcagatattttgttatacctttttaacgttcagtcaactttttcttcactataaaatgaaggcagcacctagtaaaattgtgcaggatagtaatgaatggttccagtacaattttatacttttagctgggatattgctggttaatggtagaaccattgtcagagtagtacaatttttaatgggcttacaaagctatataggtcagcacgaatggtgcctctacgttttcgatacagttctaatgtttttactacctttgattttcctagcaacctttcgcgcaagaaatttgttcaagctgcaggataaatctgtcaatattcaattagacaaattattagacaaggaatctgtgtctgaagattaa

SEQ ID NO: 80606 - DNA, 1620 bp, Saccharomyces pastorianus
atgttacctctccacaaatggatttccagaattgttgtgcttgaatctattctacacacgtggttctatctctattacatgtacattaatgatacgttatacgtgaaaatgagaaaactacccaacatttatggggttattgccctcggccttttcctactgattgccatcacttctgtgagatatgccagacgatggagctacagagttttttactatgttcactatgtaagcacatggcttattttggtgtttctacattatcacgctcgcccaggaatttcatattataccactttaaatgtgctcatattaacgggacaaatcgtctataggctctatatcaccaatgttacgagagttacgatagtacccatttcttcatcattgtctcttttggagttcccattaaccgatttacccaaaaagcccatcctaccaggagggcatctaaggatcaacatttaccatagaaattttttaaggaggtttttctcccatttgatacccttccaacatccttttactattgctagtattccaagtgataatttggtcaggttaattattagaaacgggcattttccattacgtacaaatgaaaagtattacattacaggggcttttgaacctgagttgagtttcatttctaaacctactgttccttttaatattaccacgaaatcttccaagaatccatttcgaaacaattcttctgcactaataaattcgcctttaaattttctaattaaagcgcaaagagtgtttatgtgtgttggaggttcaggaatttcctttggtttaccattacttcgtattctaaacttcaacggtgtaaacgttaggctcctttgggtttctagagattataaggatctggaagtattgaaccacttcaaaaacaattttgaaggtatggagatatatattagtggtaccgaaggcaacgaacaggacatagaaattgattatattgactatcatgactgcgctgctgatattaatgatgaagtcaggagtatttcttcgagcggccgagtttcagaactgggagataattccatgttatctgatggaaatccccaacctacggagcccaatgagaacacagcccttctaagtaagaaatctaccttgagaaaccatcacccaccaaaaacaagtgatatacctgacatcaatgctgatgacgagatagattttacatatgcttttagcagatccaaatcaaggaaaaatactgcacaaggaactctaactacacattcttcgtttaacggatcgagcgttttcagacaaccaaagatcattgagccacctgcccaagatccttgtttagaggcggcgcctaaaaagatcaggattcccgcaggtgttaaagtgttctttggcaggcctacacttggagataaggattatgaatggtgtctgcaaaccgaatgtgatgcagagacggattctattcaatgttgcaggtgggcgaatcaaggcagagaccatgctgaatatttgtcacaagtatgggttctcgctgcaggccctagaggcttaattgaaagcaccaaaagatgggcgacagatggtggtttacactttcacggagaaagttttgcattataa

SEQ ID NO: 80607 - DNA, 141 bp, Saccharomyces pastorianus
  modified_base (129)..(129): a, c, g, t, unknown, or other
atgtcaccatttaaagcatcatgtttcaacagaagatcatgggttcacaaaacacgtatgtatcacaaacagtcactacaactatgtttaatatgctttgttttcacctccgttttttgttatacaagngcgctaacggag

SEQ ID NO: 80608 - DNA, 282 bp, Saccharomyces pastorianus
atgaatttaaagtccatcgttagctggttcaaggaacatcttcccagttttgatgtcgacgtggacaagcattttagaactttaagagtccgcaaatattctcagatatgtcttttaatttctttcattataatatgtgttattatacccttaatgaattatttgttgctaactgacaaattcttcaaaatatgtcaccatttaaagcatcatgtttcaacagaagatcatgggttcacaaaacacgtatgtatcacaaacagtcactacaactatgtttaa

SEQ ID NO: 80609 - DNA, 255 bp, Saccharomyces pastorianus
atgacgctttgtccaggacattttagagcacctgggagtccagagaggtttcaatggtccatattgaagcaggatgattttatatatcgtaatgacaggaaggaaagaaagtcgactattttggaaacactcatgggtgatgaagcttctaataagtatttcaagcgtaaatacaacgaatttcaggagaaatctacgagcggtaggaaggcacattacaagaaaatgaaagagatgagaaagaagcggaggtga

SEQ ID NO: 80610 - DNA, 480 bp, Saccharomyces pastorianus
atggatcaaagtgtggaagacttatttggagcactaagagatgctagtgccagtctagaagtaaaaaattcagcgaaggaacaagtttctcttcaacaagaggatgttttgcagataggcaataatgatgatgaagtagaaattgaaagtaaatttcaagagatcgaaactaaccttaagaagcttcctaagttagaaaccggatttgatgctttagcaaacaagaagaagaagaagaacgtcttgcctagtgtggagacagaagataaaagaaaacccaacaagagcgacaaaaacgataatgactggtttaccttaccaaagccagatgataacatgcgtcgtgaagttcaacgagatttattgctgattaaacatagagctgctcttgatccaaagagacattataagaagcaacgttgggaggtgccagagaggtttgccattggtaccataattgaagacaaggggatcctctag

SEQ ID NO: 80611 - DNA, 657 bp, Saccharomyces pastorianus
atggatgtcgatgttgaccgctccatggtttgttatggaattgacggccattctaaactatacatgaagattgattatgaaaaccacggtgtaaggaagctcattatcgagtacttcactttcatctttttcactgattgcggtgtgtatttagcgcacagatggttgcattggccaagggtctaccgtgctctgcacaagcctcatcacaagtggctggtctgcacacctttcgcatctcattctttccatcctgtagacgggtttttgcaatccatctcgtaccacatctacccattgattctgccattacacaaggtttcttatttgattctgttcacttttgttaacttttggactgttatgattcatgacggtcaatacctatcaaacaatcctgccgtcaacggtactgcctgccacacggttcaccatctatatttcaactacaactacggtcaattcaccactctgtgggacagactagggggttcttaccgtagaccagatgactcattgtttgatcctaagttaagagatgctaaggagacctgggacgctcaagttaaggaagttgaacatttcatcaaggaggtcgaaggtgatgataatgatagaatctatgaaaacgacccaaataccaagaagaacaactga

SEQ ID NO: 80612 - DNA, 507 bp, Saccharomyces pastorianus
atggatttggtcttagaagtcgctgaccattatgtcttagacgacttgtacgctaaagttctgcccgcttcgttggcagctaatattcctgtcaagtggcagaaattgctagggttaaacagtgggttcagcaattctacgattttgcaggagactttgaactccaagaatgccgtcaaagaatgtagaaggttctacgggcaggtgccattcctgtttgatatgtcgacgacgtcttttgcatcgctattgcctcgttccagcatcttgagagaattcctctcactatgggttattgttacgatctttggtttactactttacttattcacggctagtctcagctacgtgtttgtgtttgacaagtcgattttcaaccatcctcgttacttgaaaaaccaaatggcaatggaaatcaagttggcagtcagtgctatcccatggatgtcgatgttgaccgctccatggtttgttatggaattgacggccattctaaactatacatga

SEQ ID NO: 80613 - DNA, 342 bp, Saccharomyces pastorianus
atgaaaattaaatttgatctaaatacagatctcactcccctattcaattggaatacaaagcaagtttttgtctatctaactgctgagtataacagtactgaaaaaataacaagtgaggtaacattttgggataagatcataaaaagcaaggatgatgctgtgattgatgtgaacgatctaagatccaagtattctatctgggatattgaagatggaaaattcgaaggcaaggatttggttttcaagttacactggaatgttcaaccatgggtaggtttgctaacttacggtgaaactgtaggcaactatacactgaccgtggaaaataaaaacaaagtttag

SEQ ID NO: 80614 - DNA, 156 bp, Saccharomyces pastorianus
atgttctcctttgtccaaagattccagaatgtatcgaaccaggccttttcaatgggaattgtaatggttgtattcatcatggcatcctcatactatcaattaatcaataataacgcgttctcagtacctagtaatatcgataacgtcaaactttaa

SEQ ID NO: 80615 - DNA, 246 bp, Saccharomyces pastorianus
atgggacaagaggaaatacaatttcccatctcgatcattccaacaaaagaactgacattccaaggctgtttccgatactgtcaaggtgattatagtgactccatcgagctagtctctagcagaaaactctcgcttaaaccattgattacacatcgctatagctttaaggatgctgtcgaggcattcgaagaaacaagccaccacccgttaaataatatcaagacgatcattgagggcccggaatga

SEQ ID NO: 80616 - DNA, 219 bp, Saccharomyces pastorianus
atgtatcgtgaagtttggaagagcagatacaagtcccggtcaacgaagattatttgtctagaagtggggttcaccaacttggacagaccagaatacttgaagaagagagaagctggtgaagtcaaggacgacggtgctttcgttaagttcttgtccaagaagggttctttggaaaacaacatcagagaattcccagaatactttgctgctcaagcttaa

SEQ ID NO: 80617 - DNA, 396 bp, Saccharomyces pastorianus
atggactccgataacccctttagtacatcagagaccatcatgaataaaaggaacgttggtggtgcgagtgcaaatggtaaagagggctctagcaacggtgggggactaccgttgtaccaagggctacaaaaggaacagtctgttttcgaaaggggtaacgctcaattagattacattctagaaatgggccaacaatcattcgaaaatatagtggaacaaaacaaaattttatccaaggtacaagatagaatgtcaaatggcctaagaacattgggtgtttcggaacaaactatcacctctatcaataaacgggtgttcaaagatacactagtcttttggatcgcgttaattctcttgatcataggtatttattatgtgttgaaatggttaagatag

SEQ ID NO: 80618 - DNA, 423 bp, Saccharomyces pastorianus
atgccattttctgataaggaagaaagtataacgagtaacgagcttttcgaaaagatgaacaagttggaggggaaaatcatggcaaatgatatcgatccattactccgcaagatgaacaagattgtggagaatgaacgtgaactgattcaacgtttaagaccactgttagatctgaagaaaacagccataagtgacgatagtttccaagattttctttcgatgaacgcaaacctggacagattgataaaagaacaagaaaaaattcgacaagatgccaagctgtatggcaagcagaccaaaggtcatgatgagatattttccaaaataagtgtatggttggcactgctgattttcattatgatcacattggcgtactacatgtttagaattaaccaagacatcaagaaggtcaaacttctgtaa

SEQ ID NO: 80619 - DNA, 852 bp, Saccharomyces pastorianus
atgactacaagaaagacagcttcctctcttcagcttttagggaaaatcacaggaacaaaagctggaactgagcaaaagaagatgaatttcattaatggactgatatggttatatatgtgtgtgtggatggtgcacggaaaagtgacgcagaaggatgaattgaaatggaataaaggatactcgctaccaaatttgctagaagtgacagatcagcaaaaagaactttcacaatggactttgggtgacaaagtaaaacttgaagaagggaggtttgttttaactcctggaaagaatacaaagggttcactttggttgaaacctgaatattcaataaaggatgcaatgacaatagagtggacgtttagaagtttcgggttcagaggcagcacaaaggggggtcttgcattttggctgaagcaaggaaatgagggagatagtaccgagttatttggtggaagttcgaagaagtttaatggtttgatgatattgttacgattagacgataagttgggagagagcgtgacagcgtatttgaatgacggaacaaaagatcttgacattggatcctcaccgtattttgcgtcatgtctgttccaataccaggattccatggtaccatcaacattaagattgacttacaatccactagataatcacttgttaaagttgcaaatggacaacagagtgtgtttccagacgaggaaagttaaatttatgggcagcagcccatttaggattggaacaagtgctatcaacgatgcatccaaagaatcgtttgaaatcttgaaaatgaagctttatgacggagttatagaggattcgctaattcctaacgtgaatcctatgggataa

SEQ ID NO: 80620 - DNA, 1107 bp, Saccharomyces pastorianus
atggaggaagagaaattggaagtaacaaatgtgaatgcgtcctcttcaaaaaaagtacataaaagcaaaaagagcacttcaaaatatgaccaaaagaatgtatttagaaactcaatgacaggaattgcacaaatactgccaacaaaacctgtgaaaattatagagcagaatattgattttgccaatccgaagagcttcgacctcctgcaatctacacatactatttgctttaataaaagaattaacactactaataccaagttgaatgtggaaactcatacttctagtgatattgacaacgacatattgcacgttggagcccccacagacttggggggaaacagtaatgacgaagcggaaacaaggcaactaaggaagtttcgatggtccaataataaagaaaaaagtctttgtgaaaagttaacagtcatatattgggccctcttgctccacacaacaaagagagcaagtaaaaggagacctatattatgtcatcaaatgatagctgagttttttaacagagtttataaggagaaatcaagagtacctataacttcaagatatattagagataacctcgtcgcttgggtcactcaaggaaaggaattgcatgaaaaaggttgggtaggggatgccaaaactggcgatttgcaagaacagttcaatatagccactgtcaaattatatgaaagcgcagaagacgggcgtctttccattggtaaagacaaaccctttcgagaggaaaacaccggcagtgatagtttggttcgagcggaagaggactctaccgctgtcactaatgaaaatggacatatttcttcagaaaaaaacttgaaaaaagatcgtagagagtctataaggaaccaaatcctgactttagacctaaatgacgaagattttttccaaaatgtaatgaaagttttatcagccattgatgaaccagaactgagacaatatgtaatcgtaatctcagaattagttagcatggaaatggatgatggtaaaacggtacgagaaaagctccgagacgttgaattgaatattaataggttgcaggttgatataaaagaaataaaggaaatgcttgttacactgataaacaaatga

SEQ ID NO: 80621 - DNA, 456 bp, Saccharomyces pastorianus
atggctggctctcatatcatatcaatgaccctaaaagaaatgtaccaaatgattactatgggtggaaatgctgaattagaacttgtggatagtctagatcctttttctgaaggagttacgtttagtgttatgcctcctaaaaagagttggagaaatataacaaacctttcaggtggtgagaaaacactaagctccttggctttggtttttgctttacataagtataaaccaacccccctttatgtcatggatgaaatagatgccgctctggatttcagaaatgtctcaatcgtagctaactatatcaaagaaagaaccaagaatgcacagtttattgttatttcgctgagaaataacatgttcgaattagcgcaacagttagttggtgtttataaaagagataatagaaccaaaagtaccacgattaaaaacatagatatcttaaacagaacttag

SEQ ID NO: 80622 - DNA, 3639 bp, Saccharomyces pastorianus
atgtctgatagtccattgagcaaaagacaaaagcggaaggccgcccaagaaccagaattatctcttgatcaaggtgatgccgaagaagaatcgcaggtagaaaaccgagttaacctaagcgagaatacaccagagccggatcttcctgcgttggaagcatcttattccaaatcttatactcccagaaagcttgttttgagttctggggaaaatcggtatgccttttctcaacctacaaactcaacaaccacgtcattacatgtaccgaacttgcaaccaccaaaaacctcttctaggggtcgcgaccataagtcctactctcaatcaccaccaaggtctccaggaagatcgccaactagaagattagaattgctccagctttcgccagtgaaaaatagcagggttgaactacaaaaaatttatgatagccaccagtcgtcgagcaagcaacagagcagactatttattaacgaattggtcttagagaacttcaagtcctacgctggtaaacaagtagtaggtccctttcatactagcttctcggccgtggtaggccccaatggttcaggtaaatcaaatgtcatcgattccatgttatttgtatttggatttagagcgaacaagatgagacaggacagattgtcggatttaattcataaatcagaagctttcccaagtttgcaatcatgttccgtagctgtgcattttcagtacgttattgatgaatcttcgggtacttcccgaatcgatgaagaaaaacctggattgatcattacaaggaaagcctttaaaaacaactcatcgaaatattacataaacgaaaaagaaagtagctacacagaggtgacaaagcttttaaaaaatgagggtattgatttagaccataaacgatttttaattctacaaggtgaagtagagaatattgctcaaatgaagcctaaagcagaaaaagagagtgacgacggactactggaatatctggaggacataattggaactgcaaactataagccgttaattgaagagcgaatgggacagattgagaatctaaatgaagtttgcctggaaaaggaaaatagatttgaaattgttgatagagaaaaaaactctttagaatcagggaaagaaacggcgttagagtttttagagaaggaaaagcagctgacgcttttaagatcaaaattatttcaatttaaattgttgcaaagcaactctaaacttgccagcaccttggaaaagatctcctcttcgaataaagacctcgaagatgagaagatgaaatttcaagaatctttgaaaaaagtggatgaaattaaagcacaacgtaaggaaataaaagatcgaatatcatcttgtagctcgaaagaaaagaccctggttttagaaagaagagaattagaaggcaccagggtgtctctagaagagagaacaaaaaatttggtaagtaaaatggaaaaagcagaaaagactttgaaatccaccaaacattcaatatcagaggccgagaatatgcttgaagagcttcgtggacaacaaaccgaacacgagacggagatcaaagacttgactcaattgctggaaaaggaacgaagtatacttgatgatattaaactatctttgaaagataaaacgaaggatatatctgcagagattattcggcatgaaaaggaactggagccttgggacctccaacttcaggaaaaagaatcacagatacaattggctgaatccgaactatctttgttggaggaaactcaagctaaactgaaaaaaaacattgaaactttagaagaaaaaattcttgccaagaaaacacacaagcaggagctacaagatcttatcctcgatctgaaaaagaagctgaactcacttaaagatgaaaggtcgcaaggtgaaaagaattttacttctgctcatctaaagttaaaagaaatgcaaaaggttttgaacgcgcatcgccagcgtgcaatggaagctagatcctctttatcaaaagctcaaaataaaagtaaggttttaacagctttatcgagactgcaaaagtcaggacgtataaatggtttccatggacgtttgggcgatttgggcgttatcgacgatagttttgacgttgctatttctactgcttgtccgagactggatgatgtcgtggttgatactgtagaatgtgcgcaacactgcatcgactacttgagaaaaaacaaacttggttatgcaaggtttattctcttggataggttacgccaattcaatttacaacctatcagtataccagaaaatgtaccgagactatttgatttagttaaacctaaaaacccaaaattctcaaatgcattttacagtgttcttagagacactttggttgctcagaatttaaaacaagccaataatgtagcatatgggaagaaaagatttagagttgtcactgtggatgggaaattaattgatatttctggtacaatgagtggtggtggcaaccatgtagcaaaaggtctaatgaaattaggtacgaatcagtcagacaaggttgatgattacacccccgaggaagtagataaaattgagcgtgagctatctgaaagagaaaataacttccgcgtggcaagcgatacggtccacgagatggaggaagaactgaaaaaattgagggaccacgaaccagacttggaatcacaaatatcaaaggcagaaatggaagctgattccttggcgagtgaattgacactggcagaacaacaagtgaaagaggcagaaatggcgtacgtcaaggcagttagtgacaaagcgcaactaaacgtggtgatgaagaatttggaacgcttgagaggcgaatacaatgatttgcaatccgaaacaaaaactaaaaaggaaaagatcaaaggcttgcaagacgaaatcatgaaaattggtggtatcaaattgcaaatgcaaaattcaaaagttgaatcagtttgtcagaaattggatattctagtggccaaacttaaaaaagtcaaatctgcctcaaagaagtcaggaggagatgtcgtaaagtttcaaaaactgctccaaaattctgaaagagacgtagaactatcatcaaatgagttaaaagtcatcgaagaacaactaaaacatacaaaactggctttggcagaaaatgacacaaatatgaatgagacgctcaacttgaaagttgaattaaaagaacagagcgaacaactgaaggaacaaatggaggacatggaggaaagcatcaatgaatttaaatctatagaaatcgaaatgaagaacaagctggaaaaattgaactcactgttgacgtacatcaaaagtgagataacgcagcaagaaaaaggattaaacgaactatcaattagggatgtaacccacaccctgggaatgttagacgataataaaatggactcagtgaacgaggatgttaaaaacaatcaagaacttgatcaggaataccggtcctgtgaaactcaagatgagagtgaaataaaggacgatgagacttcttgtgacaattatcatcctatgaacgttgatgagacttcagatgaggtatccagagggataccaagactttctgaggacgaattaagggagttggacgtagaactgattgaaagtaaaataaatgattgtcatata

SEQ ID NO: 80623 - DNA, 1671 bp, Saccharomyces pastorianus
atgccttcacaagcgtatagttactttagagaatctgaatggaacattttgaggggctatcgatctcaaattaaagaaatggtaaacatgacttctatggaaagaaacaatttgatgggttcttggttacaagaatttggtactaagactgctatttacgaaaatgaacaatatggagaaacattgtacggtgtaatgcacgctcctagaggtgatggaacagaagcgatggtgcttgccgttccatggtttaattcagatgatgaattcaatattggcggcgcagctttgggtgtatctttagcaagatttttctcacgttggccagtatggtccaagaatataatcgttgtcttcagcgaaaatcctcgtgcagcattaagatcatgggttgaggcataccatacttccttagatttgactggtggttccattgaagctgctgttgtgttggattattcgagtacggaagatttcttcgagtatgtagaaatctcatacgacggtctgaatggtgagctgcccaatttggatcttgtcaacatcgctatatccattacggaacatgaaggtatgaaagtttctttgcacggtctacccagtgatcagttaactaataataatttctggtcaagattaaaaatattatgcctgggaataagggattgggcgttgtccggtgttaaaaagccgcatggtaacgaggcatttagcggctggaggattcaatctgtaacattgaaagcacatggaaacagtggtcatgatattactacatttggacgtatacccgaagcaatgtttcgctctattaataaccttttggaaaaatttcatcaatcgttcttcttttatttgttattagcaccacgtcagttcgtatccattagtagttatttgccaagcgctgtggctttatctatagcattcgccataagttcattaaatgcatttataaacaatgcttatgcaaatatatccttattttccgagtataatttggtagcgttgttggtttggttcgtgtcattggtgatatcatttgttgtttcacaagcgtttcttctaataccttcatcgggattattgatgacaattagcattgcatcttgttttttacctttgatactttccagaaaaattcacatctcagaaccactatcatacaggttgaaaaatgttgcttttttatatttcagtttggtttcaacatctttgctaatgataaactttgcaatggctttactgatcggtacattggcatttcctatgacatttgtgaagaccattgttgaaagttctagcgaacatgaggtgacaactcgatcctctatcccaataaaaactgagccgaaagatgagatagagctcgtcgagaatcacatggatacaacgccagcaaccccccaacaacagaaacaaaaactaaaaaatttagtactattaattttgacaaatccatttatttcaataaccttattcggactattttttgatgatgaatttcatggatttgatataataaacaaactggtttcagcatggttggatttgaaatgttggagttggtttgtactttgtataggttggcttccatgttggctattgatattagcgtcatcgtttgaatctaaatctgtcgtagtaaggtcgaaagaaaagcaaagttag

SEQ ID NO: 80624 - DNA, 159 bp, Saccharomyces pastorianus
atggccttattggagaagttgcatcgaaggattgttgatatggggcttgtcccgcgtataatcgccttattaccagttatttccatgctatgcgctctatttggtttatttctatcgctattctgcctatggacctcaggcatgcagctggcactgccg

SEQ ID NO: 80625 - DNA, 213 bp, Saccharomyces pastorianus
gttcaagaagctcgccacttagagttaactccggatgaattttattgtaagaagttgttagaatctactggcatttgcactgttcccggttctgggtttggccaagaacctggtacttaccatctaagaacaacatttttggcacctggtctggaatggattaagaaatgggaaagtttccataaagaattttttgaccaataccgtgactga

SEQ ID NO: 80626 - DNA, 948 bp, Saccharomyces pastorianus
atgagagctgaagaattgaaagctcaactggagaaggatcctcaatctctgccatttgataggattatcaacgccaatattggtaatcctcagcaactacaacagaaacctctgacttactacagacaggtcttgtctctcttacaatacccagaactattaaaccaaaacgaacagcagctagttgattcgaaattgtttaaactagatgccattaaacgtgcaaagagtttaatggaagatatcggtggttctgttggtgcttactcttcttctcaaggtgtagaaggtataaggaaaagtgtcgctgaatttataacgaagagggacgaaggcgagatatcatacccagaggatattttcctaactgctggtgcatccgcagctgtcaattacttgttatcaattttctgtagagggccagaaacgggtgtcttgattccaattcctcaatatccattatataccgctactctagctttgaacaattctcaagctttaccatactatttagatgagaattcaggttggtcaactaatccagaagaaattgaaactgtcgtcaaagaggctatacagaacgaaatcaaacctacagttctagtggttatcaatccaggtaatcctacaggagctgtcctatcacctgagtctatagctcagatttttgaagtcgcagccaagtacggtacagtagtgatagctgacgaagtttatcaagaaaatatcttcccgggcactaagttccattctatgaagaaaattttgagacatttacagagggaacatccaggtaaattcgataatgttcagctagcttctttgcattcgacttctaagggtgttcctggtgcatgtggtcaaaggggtggctacatggaactcactggattcagccatgagatgagacaagttatctcgaaactagcctcgattccatcgtgtccc

SEQ ID NO: 80627 - DNA, 333 bp, Saccharomyces pastorianus
atgttatcactgtctgccaaaaatcacttcacagtgagtaattctataactcacgttattaagtcatatcatataaggactctcacttcaagcgcagaaaaaatgccacatatcactactcctttttctacctcagccagtagtacaaagttaaaagctttcaggaaagttagacccgtcctacagagacatagctcttcctggattgttgctcaaaatcatagacgttcattatctggtcaatcttcgctaaacgacctgcgtcatttgaatcgctttccacaccacacgttgaaacttcgaataacgagttttatcccgccgaacaattga

SEQ ID NO: 80628 - DNA, 408 bp, Saccharomyces pastorianus
atggaaaacgcgcccagcacctcagtcgatgttgaaagagatgacaggccattgctgaaaatactatgcttagacttctcacaagtggcacagacagacgctacggctcttcaatcattggttgatttgagaaaggccataaatcaatatgcagataggcaagttgaattccactttgtgggtatcatttcaccatgggtgaagagaggtttaattagcagaggatttggtactctgaacgaagaatacagtgatgaatccattgttgccggtcatacaagttatcacgtagccagagtacctcaaggcgaagaaaatcctgaaaaatatagcgtttataccgcttcaggaacaaatctacctttcttccatatcgatatcccagattttgctaagtgggatatctag

SEQ ID NO: 80629 - DNA, 1695 bp, Saccharomyces pastorianus
atgtccagggaaggttatccaaacttagaagaggtagaaattcctgactttcagggaactaacaacaccgttccagatcttgatgatttagagttagagtacgaccaatataaaaataatgaaaataatgacacgtttaatgataaggacttagagagcaattctatagcaaagcacaacgcagtgaacagctcaaagggcgtaaaaggctcgaagattgactactttaatccttcagatgtctcgttgtatgacaattccgtttcccaatttgaagaaacaacggtatcgctaaaagagtactatgaccacagtatacgatctcatctcacggtgaaaggagcatgtagttatcttaagagtgtttttcccatcatcaactggctaccacattacaattttagctggtttactgcggatcttattgcaggaattaccattggctgtgttctcgtgccgcaatccatgtcgtatgcacaagtcgccacgctaccagcgcagtatgggttgtactcctcgtttattggtgcttactcctactcttttttcgctacatcaaaagatgtttgtattgggcccgtggctgtcatgtctttgcagaccgccaaagtcattgcggatgtcacggccaaatatcctgatggagattctgccataactggtcccgttattgcaacgactctagcgttactatgtggtatcatttcggcagcagttggcttcttgcgtctagggtttcttgtcgaactgatttccttaaatgcagtcgctggatttatgactggatccgcgtttaatatcttatggggtcaagttccagcactaatgggttacaatagtttggttaacacgagagctgccacctataaagtggtcatagagaccttgaaacatttaccagatactaaactggacgcagtttttggactaatcccgcttttccttctttatgtttggaaatggtggtgcggaacatatggaccaaggttgaacgatagatacaactccaaaaacccaaggttacacaaaattatcaaatggacatatttttacgctcaggcttccagaaatggtatcattattattgtattcacttgtattggttgggcaatcacaaggggcaaatctaaatcggagaggcccatcagcatcctaggctcagttccatccggtttgaaagaagtcggggttttccatgttccaccaggattaatgtctaagcttggtccaaatttgcctgcatccattattgtgttattgttggagcatatcgctatttcgaagtcttttggtagaatcaacgactataaagtcgtccccgaccaagaattgattgctattggtgtctcgaaccttttaggtactttcttcaatgcttacccagcgactggttccttttcaaggtctgctttgaaggctaaatgtaatgtccgtacgccgttatctggtttgttttcgggttcatgtgttcttttagcattatattgtttgaccggcgcattcttttacattccaaaggctaccttatctgcagttatcattcacgctgtatctgatcttttggcctcttattcaactacctggaatttctggaagatgaatccattggacttcatctgtttcattgtcaccgtcctaataacggtatttgcctctattgaagatggtatttactttgccatgtgctggtcatgt

SEQ ID NO: 80630 - DNA, 219 bp, Saccharomyces pastorianus
atgaacgataacatcgacaagttcttggagagacaagaaagagtttctttattggtggataaaacttcccaactaaatagcagcagtaataaatttaggcgcaaagcggtcaatataaaagaaataatgtggtggcagaaggtccaaaatattacgttattaactttcactattatactatttgtaagtgctgctttcatgtttttctatctgtggtaa

SEQ ID NO: 80631 - DNA, 1290 bp, Saccharomyces pastorianus
atgccaaattctgttgatgtaaaacagaaacccgctaaaaacactaccatagcacctcctataaggtcagtatcacaaaagcaaaacagtgatcttccagctttacctcagaacgccgaactaattgttcaaaaacaacggcaaaaactattacaggaaaatctcgacaaattacaaattaatgataatgataacaacaatgtgaacgctgtagtcgatggtatcaataatgataatagtgaccattatctctccgttccgaagggtcgtaagttacatcctagtgcaagggctaaatcggtggggcatgctcgtcgtgaatctttgaaatttactaggccgcctatattagcagcccttccgccatcagatatgacaaacgataacggctttttgggagaggcaaacaaggagagatacaatcctgttagcagtaacttttcgaccgttcctgaagattctaccacatacagtaacgatactaacaatggactgacttcggtgtattctcaggagcttactgagaagcaaattttggaggaagcttcaaaagcaccccccgggtctatgccatcaattgattatccaaagtcaatgtttttgaagggttttttctctgtacaaacaacctcctctaaaccattgcctattgttcgtcacaatatcatatctgttttaacaagaatgaatattgatttcaaagaagtgaaaggcgggttcatatgtgtccaacaaaggccatctattgagactgcagctgtccctgttataaccactactggcgtgggtttggattccggaaaggcgatggatctgcaaaatagtttagacagtcaattatcatccagttaccatagtacagcgtcctcagcatcaagaaatagttcgataaaacgccaaggttcttataagaggggccagaataatataccactaacacctttagcgaccaatacacatcaaagagattcatctatcccaatgtctccaaactacggaaaccaaagtaatggtacatcaggggaactatcttccatgtcattagattatgttcaacaacaggatgatattttaacaacatcaagagcccaaaatataaataacgtaaatggtcaaacagagcaaaccaatacttctggtataaaagaaaggcctcctattaaatttgagattcacattgtaaaggttcgtatcgtcggcctagcaggtgtacatttcaaaaaggtttctggtaatacgtggctatataaagaattggcatcgtatattttaaaagaattaaacctatag

SEQ ID NO: 80632 - DNA, 1833 bp, Saccharomyces pastorianus
  modified_base (1721)..(1721): a, c, g, t, unknown, or other
atgcctaatccgaatacagcagattacttggtgaatccaaatttcaggaccagtaagggcggatctttatcgccgacgccagaagctttcaacgacacgcgagttgctgcaccagccactcttcgcatgatgggcaagcaatctggaccaagaaatgaccagcaacaagcaccactgatgcctcctgcagatatcaaacagggcaaggaacaggcagctcagagacaaaatgatgcatcgaggcctaatggcgccgtggaattaaggcaatttcatagaagatctttgggagattgggagttccttgaaacggttggcgcaggctctatgggtaaagttaaattggtcaagcatcgtcaaacaaaggaaatttgtgtaataaagattgttaatagggcttccaaggcttatctccataaacagcactctttaccttccccaaagaatgagagtgagatattagaaagacaaaagcggttagaaaaagaaattgcgagggataaaaggactgttagggaagcctctttgggccaaatcctttaccatcctcatatctgtcgtttatttgaaatgtgcactatgtcaaaccatttttatatgctttttgaatacgtttccggtggacagctgttagattatattattcagcatggctcattaaaggaacaccatgcgaggaaatttgccagaggtatagctagtgcgctgcaatacttacatgccaataatattgttcatcgagatctgaaaattgagaatataatgatatctagttcaggtgaaattaagatcattgattttggtctttccaacatttttgattataggaaacaattacatacgttttgtggttccttgtactttgcagcaccagaactattaaaagcgcagccatacacaggacctgaggtagatatttggtcgtttggtattgttctttatgtcttggtctgcggtaaagtaccatttgatgatgagaactcaagcattttacatgaaaaaataaaaaaaggtaaagtagactatccttcacacttatccattgaagttatatctttattaaccaggatgattgttgtcgacccattaagaagagcaacattaaagaatgtcgttgagcatccatggatgaacagaggatacgattttaaggctccatcatatgttcctaatcgtgttccattaacccctgaaatgatagatagccaagttctgaaggaaatgtatcgcctagaatttattgacgatattgaagatacaagaagatcattgatccgattagtaactgaaaaggaatacatccaactttcccaagaatactgggacaaattatccaacgccaaggggttgagttcaagtttaaataataactacctaaattcaacggcacaacaaaccttaatacaaaatcatattacaagtaatccatcgcaaagtggttataatgaaccagatagtaattttgaagatcctactttagcatatcatccattactatcaatatatcacttggtttcagaaatggttgcacggaaattagcgaagttgcaaagaaggcaagcattggccctgcaagcgcaggctcagcaaaggcaacaacagcaacaagtagcacttggcactaaggtcgccttaaataataactccccggatattatgaccaaaatgaggagccctcagaaagaagtagtacctaatcctggtatctttcaagtgccggncattggaacatcgggaacctcaaacaacactaataacctcaacaaacctccactgcatgtaatggttcctcctaaactaacataccggaacagcgcatactttcaaatctag

SEQ ID NO: 80633 - DNA, 948 bp, Saccharomyces pastorianus
atgtcagatgctataaacttctatcgaagtgcattgaaaatccatgataatgtggaatcactgtacagaaaaaaaatacttgatgagtggatgctgcacaaaaaactatcgggattatcaatgactactgatgctccagatgaacaaaatgaaaccggtaaagatgacttatctgttgaagaaaatgctgaacttcaaccctgctggattctggaaatcttgcctgacgacattttactgagaattattaaaaaagttatattaatgtctggtgaatcttgggtgaatttgtcgatgacttgttccacctttagcaagctttgcttccacgattctgtgccatttaaaactttcgcgaagtacatatattctaagcaaatatacgacaaaatggcaatggatcttaacggaatcaccgatataaatacctttgaaaaggaaatatggcggggtgatgattatcgtatgttaagggaaaggccatatattaaattcgaaggtgtttacatcagtgtagtaaattatgtaagatacggttccaatgcagaaagttcgttatctcttttaaagccagttcacatgatcacctattacaggtatttcagattttatgagaacggccaatgtttgagattactttctacagatgaacctagcgctgtcgtgaagcacttctccaaagagaacaaacccaggcatagtcatatgtgttattggagcctcggatttgattatgattttggtcatttaaagataacaaggtcagatgaaaagtatacgtttatcgaagaattccaaatcaagaatcaaggcaataagagatatcaacggttgaaatggctaagttcaattgtagtggataaggaagggaatgcatctaactgttcgttgagaaatgagaaatcttttttcttctccagagtgaaatctttcaaggatcctggatga

SEQ ID NO: 80634 - DNA, 135 bp, Saccharomyces pastorianus
atggcgtttccaccaataactgcagaaacggatgctaaagtgagaatagataattttggaaggtccataattgaaatacgtcgtgaagatctttcaccattcctggagaagctgaccttgagtggattgttataa

SEQ ID NO: 80635 - DNA, 105 bp, Saccharomyces pastorianus
atgtggaagctaggtacaaataatggaagaatcattctcgttgctgtaaaagccgaaaccttctctgggacgaaggaatattgcaaaatgattgattttctgtga

SEQ ID NO: 80636 - DNA, 1377 bp, Saccharomyces pastorianus
atgtctggccgaaagggcgagatcgtggtttatacaaaagagttagaaactacccccgagcttttaccaaaccatgaagttttcaagattaggattggccaaaagctatttgagatctcaggtgctacattgaattcggatgcgcccaattttttcacccgattcttcaatgcgcacgataaaaatacgattctatttgttgatagatcggaagacgtgttcatcataatatacagacatttacaaggttattttcccgatattaaggacgaagtacaatttacctgtcttttcgcggacgcattatattttcagttacccaagttagttaaactcataaaagaatacgactaccacttcactaatattggaggtgttccctttaaggtaccaaaatcattattccatgaagaagggaaccggttgaactattttgaaacgatttctcgcacatcttatgaggaaattgagaagtgggagtcaaataagaagccgggctccccacctttattaccaccctcatatattgcaaggtccccagaatttttccgagatatattatctttactgggcggttccgaattagaactgtctgaggaaagaaccgcatctctgataaaagagtgtcgttattaccgtctcaacaggttggagcaggaattagtgcgggcaaaaattatatataatcccttaactaattgtcaagaagtttgcatagctcttgatagcgtctccaagaagggtgtaaccattgaaaggttaacatcacttcataccggaaaccaatctttagcggtaagcagttgtctcaatggaactgagggtgaaaaaaccgctactggatttcataaaaccgagactgattcaggcaacaatgacgaatctgaacctccaacaaaaaaggtaaaacattgtattgaaagacactggagcatgttaaaataccaaaggccttatatcgatacagtttcgcacgatcttattttccaattacactctaaccagtgcaaaataatattcaacaaaaagaataagactgttcatgtagacctatccagagaggctgcaatgttgtttgaaaacaagttctcggatgttttattggaaaacccagattttaaaattgatctgtccgaatataaggtcaaacttcgtgacagtcaaatgcaagttgaatcccacttaattattcctgcatgtgtctccatttgtgacttgacggtaaatggcgcaaaatgctgtaatattttctcattagttaacgactccaaatgtaaagagagggtcttggattgcaccaatttgaaagttttgaattgcgttcatggtttgaaactacactttatcgaaatccatgtggaagctaggtacaaataa

SEQ ID NO: 80637 - DNA, 1185 bp, Saccharomyces pastorianus
atgagaaatcaagacattttagtggaaaacgtcaatggagtaccaccgattgatcatattatggggggtgacgaagatgatgatgaagaggaagaaaacgacaatttgttgaatttactcaaggataactctgagaaatcagcagcgaaaaaaaatacggaagttcctgtagacattataattcaaccaagtgccgcttcaaaacataaaatgttcccatttaaccccgctaaaatcaagaaagatgattatggtactgttgtagattttacgatgtttttacctgatgattctgacaatgttaatcaaaatagcaggaaaagacctctcaaagacggtgctaaaaccacgagccctgtaaacgaagaagataacaaaaatgaagaagaagatggttataatatgagtgatccaattagcaaaaggagcaaacaccgtgcttctcgttactcgggattttctggaaccggagaagcagaaaattttgataaccttgactatttaaagatagacaaaacgctctccaaaagaacaatctcaactgtaaatgtccaattgaaatgctccgtagtaatcctaaatttacagagtttagttgatcaaaggtctgcatctattatatggccatcgctaaaatctagaaaaatagttctttccgcccccaaacagattcaaaatgaagaaattacggcaaaacttatcaagaaaaatattgaagtggtcaacatgccattaaataagatagtggaattcagtacaacaataaagaccctggatatctccattgactccaacctcgataaccttttgaaatggcaacgtatcagtgatagttatacagttgccactgtcgttggcaggctggttaaggagagcctaccgcaagtgaacaatcatcaaaaaacagcgtcaaggagtaaactagtcttgaaaccattacacggttcatctaggagccataaaacaggtgcgttgtcaatcggtgacgttaggttagcacaattaaagaaacttctcacagagaaaaactacattgcagaatttaaaggggaaggtacacttgtcataaatgaaaaagtagcagtccgcaaaatcaatgatgcagaaactattatcgatggtacgccttccgaactttttgatactgtcaaaaaattggttacggatatgttagcaaaaatctag

SEQ ID NO: 80638 - DNA, 939 bp, Saccharomyces pastorianus
atgacttataaatacaattgctgtgatgatggatccggaaccaccgttggttcagtggtacgatttgataacgtcaccttgttaatcgatcccggttggaatccatctaaagtatcgtatgagcaatgcatcaagtactgggaaaaagtgataccggaaattgatgtaataatactatcacaaccaacaattgaatgtttaggtgctcattcccttctgtactataatttcacctcccatttcatatccagaattcaagtttacgcaactcttcccgttatcaacttagggagagtttccaccatagattcatatgcatctgcaggtgttataggtccatatgacacaaataaactcgatcttgaagatattgagatatcttttgatcatattgttcctttgaagtactcgcaattggtagatctacgatcaagatacgatggattgactttgctggcgtacaatgctggtgtgtgtccaggtggttctatttggtgcattagcacatactcagagaaattggtttatgcaaagcgatggaaccacactagagataacatactaaatgctgcttctatattggacgccactggtaagcccttatcaactttgatgaggccctctgcaataattactactttggacaggtttggctcctctcaaccgtttaaaaaacgttcaaaaatctttaaagatacattaaagaaaggtttgagttcggatgggtccgttataataccggtagatatgagtggcaaatttctggacctgttcacacaagttcatgagttattatttgaaagcacaaagatcaatgcgcacacacaagtacctgtacttattctgtcttacgcgagaggaagaactctaacatatgccaaatcaatgctcgagtgctgtccccttcactacttaagacatgggaaacgggatcctcta

SEQ ID NO: 80639 - DNA, 477 bp, Saccharomyces pastorianus
atgagccgttttgacagaaacgccacggtaaataattctgcgccaatgcagagcaatgacgtacactataatagcaatactcatccaattcaagcaccaaaaagatctcgttatgacaataattcggcggaaccttctttaaaatttccggcttcttcacgttatgcaccatcaccttcacctcctgcgtcacatatttcgaggcaagctcaaaacgtgacgcctacaccccctcccggcctaacatcaagtagctttagttccggagttccaggaatcgcccctcccccattacaaagccctccagagtcggaacaaccgaaattttcgctacctccaccccccggtatgactacggtacaatcctcaattgctcctcctcctggcctaagcggtcctccagggttttctaataacatgggcaatgacattaacaaacctacacctccgggactgcaagggcctcccggattataa

SEQ ID NO: 80640 - DNA, 285 bp, Saccharomyces pastorianus
gtttttgaagaggcgatagtttttttcaaggagaaggatgataaacaagggagactgtctattttggaagcgctaaaagactatgaagaaacttacggtactgaactcgatcaagaaaccgtcaagaaaagattccctaaagtaatcaaaaaagtgaggttacaggacggtgtggaagaagaattcgtggattacgtttttcctgatgatatcgatgatgacaagccaaaaccatcaaagttcttggaactagccaaaaaatggaaacaggaacaggcactttga

SEQ ID NO: 80641 - DNA, 1161 bp, Saccharomyces pastorianus
  modified_base (1099)..(1099): a, c, g, t, unknown, or other
  modified_base (1133)..(1134): a, c, g, t, unknown, or other
  modified_base (1141)..(1141): a, c, g, t, unknown, or other
  modified_base (1156)..(1157): a, c, g, t, unknown, or other
atggacactttagagccaacagctgttgatacgcatgtttctgcggagcagattctgcgggatgtgtacaagaaggggcaaaaagcaagaggatcgactaatattgatatattagacttggaggaacttcgagagtatcaacgaaggaagagaacagaatatgagggttatttgaagagaaaccgattggatatgggacaatggattcgttatgcgcaattcgaaatcgaacaacacgacatgaggcgcgccagatctatctttgaaagagcattattagtagatagttcattcatccccctttggatacgatacattgatgctgagctgaaagtcaaatgtattaaccatgctaggaatcttatgaacagagctattagtacgttgcccagagtagacaagttatggtacaagtatctcattgtcgaagagtcgttaaacaacgttgaaattgtacgatcactgtacaccaaatggtgctccttggagccaggggttaatgcatggaattctttcgtggattttgaaataagacagaaaaactggaacggtgtaagagagatttactcaaaatacgtcatggctcacccgcaaatgcagacgtggctaaagtgggtgaggtttgaaaatagacatggtaatactgaatttacgagaagtgtgtattctttagcgatagacacagtagctaacctccaaaatttacagatttggtctgatatggaggttgcaaaattagtaaattcatttgctcattgggaagctgcgcagcaagaatacgaaagatctagtgctctttatcaaattgctatagaaaaatggccctccaatcaattgcttaaggcaggactgttggattttgaaaagcagtttggtgacataaactcaatagaagaaactattagctataaaaggaaaatggattatgaaacaatattgggtaataacgcctatgattatgacacctggtggctgtacttggatctcatttcagaaagtttccccaaacaaataatgcaaactttcgagaaagctgttgtggacagccgaccaaaagaactatcaaaaaatgttcagtggaaaagcgtatactttatcntgtggactgagatatatatgcgtaatgttgagtnntggaatntggaaaattcgcttnnttag

SEQ ID NO: 80642 - DNA, 552 bp, Saccharomyces pastorianus
atggatgtggtaccatctccgggtttaccagaaaaagtaaacgaaaaaagcaaaaatattcccttacctgaaggaattaaccttttatcatcaaaggagataatcgatctaattcaaacccacagacaccaattagagttatacgtcacaaaattcaatcccttaacggactttgctggaaagattcatgcattcagagatcaatttaaacaattggaagaaaattttgaagatttacatgagcaaaaagataaggtccaagccttattagaaaactgtaggattttagaatccaaatatgtagctagctggcaagattaccattccgaattttcaaaaaaatatggtgacatagcattaaaaaagaaattagaacaaaacacaaagaaacttgatgaggagagttcacagctagaaactaccacaaggtccattgactcagccgatgacctggatcagttcatcaaaaattatctggacatacgaacacaatatcacttgaggagagaaaaactggcgacctgggataaacaaggtaatttgaaatactag

SEQ ID NO: 80643 - DNA, 108 bp, Saccharomyces pastorianus
atggcgctctttcatacagtcttcattctatggccgcacttttgtggcattctctggacggtccatgaaaaattatataactatttgctttctattgaagtctattga

SEQ ID NO: 80644 - DNA, 96 bp, Saccharomyces pastorianus
atgataatgcaaaagcggctcctaaacagaaattcttcagtagtcaaatctcgaaattgccttgcttgtcatcaacatgaatcatctatatcataa

SEQ ID NO: 80645 - DNA, 210 bp, Saccharomyces pastorianus
atgtttttcttgtgcttggtattgcttcgtggagatatatattctcatatcaggacggaattttacaaagtgagaactctaaatggtgtagtaaagagaagaaaaaaaaaaagctcagcgatttacgctcattacaaccaccgagattcactaggaaacggagctgtccctcggaatttattgtcaacatatcatccaatgctaatgtag

SEQ ID NO: 80646 - DNA, 267 bp, Saccharomyces pastorianus
atgatgcagcgtgttatcacatcttgcgttaccgggccttgcaaaaattgctatgtttttcttgtgcttggtattgcttcgtggagatatatattctcatatcaggacggaattttacaaagtgagaactctaaatggtgtagtaaagagaagaaaaaaaaaaagctcagcgatttacgctcattacaaccaccgagattcactaggaaacggagctgtccctcggaatttattgtcaacatatcatccaatgctaatgtagaatga

SEQ ID NO: 80647 - DNA, 363 bp, Saccharomyces pastorianus
atgcctgcaggtcttattgaacatagcgagatggattttgatcaagcacaaaagaccgccccaatggagattgagaacagtaactatgaactacataacgattctgagatagaaagaaaatatgaattgacacttcaaagaagtctgccattcatcgaaggaatgctgactaatttaggcgcaatgaaacttcataagatccattcttttttgaaaattaccgtgccaaaagattggggatataaccgaattactcttcaacaattagagagatatttaaacactctggccgatgagggtaggctgaagtacattgccaatggttcatatgaaatagtgaaaaatgggcctaaaaactcatga

SEQ ID NO: 80648 - DNA, 1869 bp, Saccharomyces pastorianus
atgtcatttcagattaccccaactcgagatttgaaagttattacagatgagttacaaacactttcctcatacatctttcacacaaacatagtcgatgatttgaactctttacttacatggatgagccctaatgatgccaagagtaaccatcaactacgtcctccaagtcttcgtattaagaatatcattaaggttctcttccctaataacgcaaccacatcgccatatagcatgataaacactagtcaggcaaacaattcaatagttaatgagggaaatacaaacaaagagttacaactacaacttttttccacgctcaaagagttttatattttccaggttcgttatcattttttcttacattttaacaacattaattatctaaaagatatccaacgatgggaaaattattacgagtttcctttacgttacgttcctatttttgacgtaaatgtaaacgactgggcacttgaacttaattctttaagacattatctgttgaatagaaatataaagttcaaaaataatttaagaacaagattagacaaattaataatggacgacgatttcgacctggcagacaatttaatccaatggctcaaatctgctaatggttccttatcctctacggaattgatagtcaatgctctttacagcaaaatcaataaattttgtgaagataacatgagtagagtatggaataaaaggtttatgattatggaaacattcaacaaatttattaatcaatattggtctcagttctctaaattagtcggttgtccagaggatgatcacgaactgaccactacagttttcaactgttttgagtccaattttcttaggataagaacgaatgaaatctttgatatatgcgttttggcttatcctgattcaaaggttactttattggaattgaggaaaattatgaaagattttaaagactacacaaatattgtaacaacttttttgtctgatttcaagaaatacattctaaaccccagcgtaactacggtagacgctttgttgagatatgttaaaactatcaaagcatttttggtcctggatccaacaggaagatgcctacattcaataaccacgtttgttaaaccttactttcaggagcggaagcacttagtaaacgtattgttatacgcaatgttggacttacctgaagaagaactaaaggagaaaattaatttcaatgtagatatgaaggcactgctctcacttgtagacactttgcacgattctgatatcaatcaagatacgaacatcaccaaaagggacaagaataaaaaaagcccctttctatggaacctcaaggtgaaaggaaagagtgaattgaacaaggacctaccaataagacacgccatgctatacgaacatatactcaattattatatagcttgggtaccagagcctaatgacatgattcccggtaacatcaaatcaagttatattaagacaaatttgtttgaggtgcttttggatctatttgaatcaagagaattttttatatcagaatttcgaaatctcttaaccgacagattattcactttgaaattttatacgttggatgaaaaatggacccgatgtttgaaattaataagagaaaaaatagtcaaattcacagaaacaagtcattccaattatataacaaacggtatattaggactcccagaaacaacagcccctgcagcagatgcagaccagtcgaatttgaatagcattgatgttatgctttgggatataaaatgtagcgaggagctctgccgtaaaatgcatgaagtggccggactggatcccataatatttccaaatttatctcactcctctactggaagtacaactgcgatacagggatcctct

SEQ ID NO: 80649 - DNA, 405 bp, Saccharomyces pastorianus
atgcaaggctgttccaccatttcagacatgcaagagtgcatcaagacgttagatgttaaattacatgaagacttacaatatttcacacagatttataactatgctttcaatttgattctggacccaaatcgaaaggatatagatacagacgaaggcatccagtattggaagctatttttccaaccagagtacccagtgcgtatggaaccagatttgcttgagacatggttccgtttccttcgcgatgaggggaaaaccactataagtaaagacacctggcgtatgctgctcctctttttcaaacgataccccaccattcagaaaataataagcgattacgacgaaactgcagcctggccatttattatcgatgagttctatgagtacttacaggatcagcaataa

SEQ ID NO: 80650 - DNA, 948 bp, Saccharomyces pastorianus
  modified_base (8)..(8): a, c, g, t, unknown, or other
atgcgaantacccagaacccaacagtaagaaatgcaaacgctttagcgtcatcaagtgtactacctcctattcctggttccagcaataacactccaattaagaattctttgccacaaaaacatctatttcaacatactcccgtcaaagctccaccaaagaacggaagtaacctagctccgcttctaaatgcaccggatttaacagatcatcagttagaaattaagacacccatacgaaataacagtcacggtgaagtggaaagctatccgcaagtaccacctgtcacacatgatattcacaaaagccccactttgcatattacgtctcctttaccagatgaaataatacctaggactacgccaatgaaaataaccaagaaaccaactactctgcctccgggtaccattgaccagtacgtcaaggaactacccgacaaactattcgagtgcttataccctaactgtaacaaagtattcaagcgtagatacaacataaggtcgcatattcagacacatttgcaagatagaccgtattcatgcgactttcccggttgcaccaaggcgtttgttcgcaatcatgatttaataagacacaaaatctcccataatgccaagaaatacatctgcccatgcggaaagagatttaatagggaggatgctctaatggtgcatagaagtcggatgatttgcaccggcggtaagaaattagaacattcgatcaacaagaaacttacatctcccaaaaaaagcctgcttgacagcccgcatgacacaagtcccgtaaaagaaactatcgcccgggataaagatgggagcgtcctaatgaaaatggaggaacagctgcgagatgatatgcgcaaacatggattactggatccacccccatccacagcagcgcacgagcaaaactcgaaccgcaccctttcaaacgaaactgatgctctctga

SEQ ID NO: 80651 - DNA, 684 bp, Saccharomyces pastorianus
atggataacgttgtagatccgtggtatataaatccctcaggcttcgcgaaagacactcaagatgaggagtatgttcaacatcatgataatgtcaatcctaccatacccccacccgacaattatattttgaataatgaaaacgatgatggcctcgataatttgttaggtatggactactataacatcgatgacctgttgactcaagagttaagagatctggatattcctttagtgccttctcctaagacgggcgatggctcttctgataaaaagaatattgatagaacttggaactttggtgatgaaaacaacaaagtctcccactatagcaaaaaatcaatgtcctcgcacaagagaggtctaagtggcacagcgatatttggatttctcggccataataagacattgagtatttccagtttacagcaatccattctaaatatgtctaaagatccgcaacccatggaactcataaatgaattgggtaatcataatacggtaaaaaataacaatgatgactttgaccatataagggaaaatgatggtgaaaatagctatttgagccaagtttcgttgaaacagcaggaggagttaagaattgctcttgaaaaacaaaaggaagtgaacgaaaaattggagaagcagttgagagacaatcaaatacagcaagaaaagtcgcgtaac

SEQ ID NO: 80652 - DNA, 852 bp, Saccharomyces pastorianus
atggatatggtcgatagatatcacaagtggcttatttctcaagaacagggtatagagcaagtcaaccaaaatcttgtattctgccataatgatgcccaatacggcaatggacttttcactgctcctgtgatgaacacaccgagcctatacactgcaccttcgtctacatcattgacttcccaatcaagttccttatttccttcgagctccaatgtcattgtagatgatataatcaacccgccaaagcaggagcaaagccaagattccaaattggtcgtcattgattttgaatatgcaggtgccaatcccgccgcatatgatttagcgaatcatctttccgagtggatgtatgattacaacaatgctaaggccccacatcagtgccacgctgatagatatcccgataaagaacaggttttgaatttcttatactcttatgtttcgcatctaaggggtggtgctaaggaacccatagatgaagaggttcaaagactctataagtcaatcattcaatggagacccactgtacaactattttggtcgctctgggccatcctacaaagtggtaaattagagaaaaaagaagcctccactgccatcactagagaagaaattggacccaatggaaaaaaatatatcatcaagactgaacccgaatcccctgaagaagactttgttgaaaatgacgacgagcctgaagctggcgtcagcattgacacgttcgattatatggcttatggtcgtgacaagattgcggtcttttggggtgaccttattggcttaggcataatcaccgaagaagaatgcaaaaatttcagctctttcaagttcctcgatactagttatttgtaa

SEQ ID NO: 80653 - DNA, 885 bp, Saccharomyces pastorianus
atggtacaagaatcacgtccaggtagtgtaagaagttactcggtcggttaccaagcaaggtccagatcgagttctcaaagaagacattcgttaacacgccaacgttcctcgcaaagactgattagaaccatcagtatcgagtctgatgtgtctaatattactgacgatgacgatttgagagctgtcaatgagggagtagcggatgtgcaactggacgtctctgaaaccgcaaataagggaccaagaagagcatcagcaactgatgtcacagatagtttgggttcgacttcgtcggaatatattgagattccctttgttaaggaaacattggatgcaagtttaccttcggattatctgaagcaggacatattaaatctcattcagagtttgaagatatccaaatggtataacaacaagaaaatccaaccggtagcacaagatatgaacttagtcaagatctctggtgcgatgacaaacgcaattttcaaagttgaataccctaagttaccatcgttgctattgagaatatacggaccgaatattgataatatcattgacagggaatatgaattgcagattttggctaggctttcattgaaaaatataggtccttccctttacggctgttttgtaaacggtagatttgagcagtttctggagaattctaagactttaacaaaagacgacattagaaactggaagaactctcaaaggattgcaaggagaatgaaggagttacatgtaggtgttcctctcttgagttcagaaaggaagaacgggtcggcttgttggcaaaagattaaccagtggttgcgcacgattgaaaaagtcgaccaatggtgggggatcgacctgcaggcatgcaagctggcactgccgtcgttt

SEQ ID NO: 80654 - DNA, 873 bp, Saccharomyces pastorianus
atgttgctgtggatagctatcatgttagctgggcagtccatatcaagcttgcactcgtccagagacaacggaaactccaccacaggatacgttttgtggtctaccacacctttcttcatcaactggctgctgtatagtactagcgctgcacctttccgtcttgggagtcaggtggaagtaacctgcgggtcttcttgcgaggggcacaagcttgagttgcccaggctgatcgacctcacgggcgctgatcgcggcaagagaggtatcttggaacttggagcaggaatatcaggtattttgcccgtgattcttggtaacttcgtcgacacctacgtgtcgacagatcagaagggcattcttaataaactaaaagataacatcatggaaaacttatcacagttgaccagaaagcggtgcatttcccgatcactaagattggaacttcccaccgtcgaaccagttggcgacgctgatatcaccgcagcgtcacttccatctaagtctacgttgcatttggaagtagccgctctagactgggagaagataaacttgcaagacaaaaagacccactctctgcatcctgagttgtcactcataggtgaaacatgttcttccgtgtacgttatagctatggatgtcatatacaacgagtacctgatagatccgtttctgaagacgctcaagcaactcaaacactggttacaaactacctacaatttgcaattccatgtcctcgtggggatacacttgcggtcacaagaggtgacaacactgttcttggagaaagccatcatagaatatgacttcacggtttatgatatcgttgaccaggtcatacaagagtcccgttttaacttttatcttatcacctag

SEQ ID NO: 80655 - DNA, 159 bp, Saccharomyces pastorianus
atggcattcaagttatggctactggatgaggaaacaatatacgagcacgtgttcgaacggtacacacaattggagggccagtccgggaaactggcgcaggatttgggtattcaggatagaaggggcggtgtgctagagataacgttgaccctctacctg

SEQ ID NO: 80656 - DNA, 108 bp, Saccharomyces pastorianus
atggaacacaataatactggccaactttggtcaagaaaatacgtcaatgaagagggtgagttcactttgcccataaaagaagtcctgttggaaaactgggaccagtaa

SEQ ID NO: 80657 - DNA, 606 bp, Saccharomyces pastorianus
atgatccctggtttattgcgttacgaagaaggtattgagttatatgacgaaattgtcttgataactaccaagggtgaagccattgctgttgccatcgcacaaatgtcaaccgttgacttagcttcctgtgatcatggtgttgttgctagtgtgaagagatgtatcatggaaagagatttatacccaagaagatggggtttgggtccagtcgcacaaaagaagaaacaaatgaaggcagacggcaaattggataaatacggccgtgttaacgaaaacaccccagaacaatggaaaaaagaatatgttccattagacaatgctgaacagtcaacttctagctctcaggaaactaaggaaactgaagaagagcctaagaaagctaaagaagattctttaatcaaagaagtcgaaactgagaaggaagaagtgaaagaggatgacagcaaaaaggaaaagaaagagaagaaggacaagaaggacaagaaggaaaagaaggaaaagaaagacaagaaggacaagaaggaaaagaaagagaaaaaggagaagaaaagaaagtctgaagacggtgattctgaggaaaagaaatctaagaaatctaagaaatga

SEQ ID NO: 80658 - DNA, 216 bp, Saccharomyces pastorianus
atgcgtactttgtgtgttcatttaggtatgctattaggtgttggtggtcacatgcaagaattgcgtcgtgttagatccggtgctctgtctgaaaatgacaacatggtcactttacatgatgttatggatgcccaatgggtttacgacaatacaagagatgaatcttacttgagatccattattcaacctttagaaactctattggttggttactag

SEQ ID NO: 80659 - DNA, 999 bp, Saccharomyces pastorianus
atgattatggtctttggtgaaattactaccaaggcacagttggattaccaaaaaatcgtcagagacaccatcaagaagattggttacgatgattccgccaagggattcgactataagacctgtaacgtccttgtcgccattgagcaacaatctccagacatcgcccaaggtgtccacgaggagaaggatttggaagacatcggtgccggtgaccaaggtatcatgtttggttacgccacagatgaaactccagagggtttgcctttaactattcttttggctcataaactaaacatggccatggctgacgcgagaagagatggctctttagcgtggttgagaccagacaccaagactcaagtcaccgtcgaatacaaggatgaccacggtagatgggttccgcaaagaatcgacaccatcgtcgtctccgctcaacatgctgacgaaatcacgaccgaggacttaagggcgcaactaaagtccgagatcattgaaaaagtcatcccaagagacatgttggacgaaaacaccaaatactttatccaaccttccggtagattcgtcatcggtggtcctcaaggtgacgctggtttgaccggtagaaagatcatcgtcgacgcttacggtggtgcctcatccgtcggtggtggtgccttctccggtaaggactactctaaggttgatcgttctgccgcttatgccgctagatgggttgccaagtccctagttgccgctggtttatgtaagagagttcaagttcaattttcttatgccatcggtattgcagaaccattgtccttgcacgttgacacctatggtactgctaccaagtctgacgaagaaattatcgacattatcagcaagaactttgacttgagacctggtgtattggtcaaggagttggacttagctagaccaatctacttgccaaccgcttcttatggccatttcacaaaccaagaatacccatgggaaaagcctaagactttgaagttctaa

SEQ ID NO: 80660 - DNA, 153 bp, Saccharomyces pastorianus
atggccggtacatttttattcacttctgaatccgttggtgaaggtcacccagataagatctgtgaccaagtttccgacgccatcttggacgcttgtttagccgaggaccctcactccaagttgcgtgtgaaaccgcggcaaagactggtatga

SEQ ID NO: 80661 - DNA, 132 bp, Saccharomyces pastorianus
atggacagggccagtaaaatagagcaaattcaaaaacttgccaaatacgccataagcgcattgaattatgaagacctgcccaccgccaaagatgagttaactaaggcgttggatctgttaaattctatttga

SEQ ID NO: 80662 - DNA, 276 bp, Saccharomyces pastorianus
atggctagtaacgctgcaagggttgtcgctacagcgaaggattttgacaaagttggattagggatcatcggatactatcttcagttatatgcggtgggattgatactgagtgaagaagatcggtcgcaagagatgaccgcactagcgacagaacttcttgatactattgaagcgtttaagaaggagattggcggcgagagtgaagcagaagacagtgacaaaagcttacacgttatgaagactctagagatccccggtaccgactcgaattcgtaa

SEQ ID NO: 80663 - DNA, 78 bp, Saccharomyces pastorianus
atgagatacttgaaacacgtttcaagaagattcaagaacggtttccaaaccggctctgcttctaaggcttctgcttaa

SEQ ID NO: 80664 - DNA, 366 bp, Saccharomyces pastorianus
atgcaacaaggtggaaactcatcaatgtattctttccaatcttcgcaacatcggtttcattcgtcgcaacagcgccaaaaccaatcactttccttcagaaacaatacctatggaagtggtaacaatcaaaatacattccatccatcgccgcaactgcaacaacagcctcaaaatatgagatatttgaataataagttaccaataaatgatagatctccaataccgcaaacacagcaccatgtaccagatggccgtcccagcctccatataaataccactaaccgcacaaatccgcttactgcacaaagtggattttctcaatttatgcctcccaatagcacatcaaccaacccatattccagctga

SEQ ID NO: 80665 - DNA, 2556 bp, Saccharomyces pastorianus
atgaaaaggattttctctggtgtgaagtccccaaagttatctgctcccccaaaggttttcaaaaatgatgagagcccatccactccgagctctcccaaattcgaccaagggcttcgaagtttatcagcatcagcttcaagactcttcagtaactcaatatccactcctgggagccctacgttagatcttccgcaagaacactctattaatggtgatatctcaccagaactagtaccaatcgttactttactctctgcacaggctcataggagataccattatggtatattcttgatattacatgatttgaagacagacggaacacctgccgtgcgtcagtgggaagaatgctatggtgtgttgctaggaactcagctggctttatggaatgcaaaagaattatcagattccaagaataataagaacacatcaaccatgaaaaaagccgcatcgagaccttcttttatcaattttacagatgcttctgtgaggagtttggacgctaatgatcaggtaatcagtgcatcagagaacgaaaagacaaagaaagatctagacaatgttcttgttgtttcaacaactttaaaaaacaggtatttcttaaaattcaaaaattcaaaatcattcaaaacttggaacgcagcaattaggcttagtttgttcgagtttacggcattgcaagaggcctacacgggctcatttttgtcaagcagaggtgttaaacttggtgatatcaaagttgttatggcagatacaaaattcacttatgaggactgggttagcgtaagattcgggacaggcatgccatggaaacgttgttatgctgttatttctccacagtctggcaaaaaaaagaaaaattcgaaaggttcaatatgtttctatgaaaataacaaaaaaaccaaaaaatcaaacataatgacaacggtagtagatgcacgggctttatatgccgtttatccttcctcgccgatattaatcgacacatctacaatcataaaattggaaggttttgtctcttttgacaaaagtgaggaacctcaagaaaccaacctatttatcatgcctgaaaagcatcaaggtgttccgggatatgacactattattcgcttcttaatcccagctatgaacgcgttctacttatatggtaggccaaagggtttgattgccaacagaactgacccagactccctgctgtttgccttacccactcttccgcatatatattatttgcaggtggatgacgttttatcattaacaaaagacaaaaattacatacattggagtgctgctgattggaggaataacattgttcaagtattacagaaaaaattaagtaagggctataaaggctgtggtaataaaactgtatcagtttcatctggaatgatgaagtcgccggcaattagttcagctgaattatttgaagggtacgattctctccctgaaagacaaatggaaagtccgcaaaaatctaagatgaagtctcctacattagcatcgaccgatgatattaattccgcttctgcttccgtaaactcacatgctacctcagtaaaacaaactgaattatttgtaactgataattcttcaaaaatcaatgactctgtgtcggcgcagtccagtgtcactactaacttcaaagatacttttaccaccccaatgacatcaggaatgctcaaccaagaaaattcagagagaagctttggttcaggattaaaactcaaaatcactgattcaaatttggaaaatatggaagacgttgaagcgaaatctgctaacgaattctctacgacaccagaagacaaacatattcacctcgccaatgcagccgaattatccgccctttacgacaaatattccacatctccgtttggtaaatcggaggctaattcaagccctaaacctcaaaaatgggaagttaaagatcggtcaaaaaatgaaaacagaagtccttatgagagatacgtaggtacatccactgaaagcaagacatttgaaataggtaacgtcagagagtcgaaaagtacgataaatacttccctttcttcgcctttgagggtagaagataatagacgttcaaaaaatgaggacctgggatctttgaaagagtttgaagagttatctcaaaagattagcaatatgggaatggcaaatatttcttcagaagctttaagtgacacagcagaaaacagttcttttgttacggacctgaacttgaatatcaataacagttcatcggtcaacctcaatgaagaacaacgtgtgccggattttggggaggaaaacgtatttgatccagattatatggaacaaaaccaaatgttggaaacagaaagtaggtacactacggatgagtttgacttttcagataatcaggatgcagcatccagtaattatagcaatgggcaaaccaaccgaacagtaactgaaaccctttctgccagtgacagaaatgacaagatcccacattcttctttatttacaaacttaaaccagcttacttcgaatggaggaaactatcaggatagggaaaattctctggtgatcaaataa

SEQ ID NO: 80666 - DNA, 318 bp, Saccharomyces pastorianus
gatcctgccgtccttattctagatgaagcaaccagtgcccgtgactctcaaagtgaagaaatagttgccaaaaatcttcagagacgtgtagaaagggggttcactactatatcaattgcacataggctttcgacgatcaaacacagtactagggtgattgtgttaggaaaacatggctcagtggttgaaactggttcattccgagatctaatcgccattcctaatagtgaactaaacgcgctgcttgccgaacagcaggacgaggaaggaaaagggggagtgatagatttggacaatagtgttgcccaggaagtataa

SEQ ID NO: 80667 - DNA, 1572 bp, Saccharomyces pastorianus
atgattgtaagaatgatacgtctttgtaaaggtccaaagttgttgcgaagtcaattcgcatcagcaagtgcactatattcaaccaagtcattgttcaaacctcccatgtaccaaaaagcggaaattaatttgattattccacatagaaagcactttttgttgcggtcgattcgattacaatcagacattgcgcaaggaaagaagtccaccaagcccactttaaagttgtccaatgcaaattcaaaatcctcggggtttaaagacattaaacggctattcgtcttatctaaaccggaatccaagtacattggtcttgccctccttttaatcctcatttcaagttcagttagtatggctgtaccttccgttatcggtaaattattagacttggcttccgaaagtgacgccgaagatgaagagggttcaaaaagcaataagttatatggtttaacgaagaagcaatttttcacagcattaggagcagtatttataattggagcagttgctaatgcaagcagaatcatcattttaaaggtcaccggtgagagactggtcgcaagattaagaacgaggacaatgaaagctgcattagatcaagatgccacatttttagatactaatcgtgtcggtgatttgatctcaagattatcatctgatgcatctatagtggccaaatcggtcacacaaaacgtctctgatggaacaagggcaattattcaagggtttgtcggttttggcatgatgagcttcctctcatggaaattgacttgcgtaatgatgattttagcccctcctttaggtgctatggcactgatatatggtaggaaaatacgaaacctatcaagacagttacaaacctcagtaggtgggttaacaaaagtggcagaagagcaattaaatgctactaggacaattcaagcatatggtggtgaaaaaaacgaggttcgccgctatgcaaaagaggttagaaatgtatttcatattggtctgaaggaagcggttacttccggtttattcttcggaagtactgggctagttggcaacactgcaatgctgtcgttattattggttggaacaagcatgattcaaagtggttcaatgactgtcggtgaattatctagtttcatgatgtatgccgtgtataccggaagttcattatttggtttatcgagcttctattcagaacttatgaaaggtgctggtgcggctgccagggtttttgaattaaatgaccgtaagccattgattcgtccgactattggaaaggaccctgtatcattagcccagaaacccatcgttttcaaaaacgtgtcattcacttatcccactcggcccaaacaccagattttcaaggatttgaatattactatcaagcctggtgaacacgtttgcgctgtcggtccatcaggaagcggtaaatcaacaattgcgtctttgttgctcaggtactacgatgtgaactcaggatcgatcgaatttggtgatgaagacatcagaaatttcaacctgaggaagtatcgaagactaatagatacgtgcaacagaatccactacttttcaatgggactattc

SEQ ID NO: 80668 - DNA, 3258 bp, Saccharomyces pastorianus
atgaataatgctcaagaaatgaatgtgttgtcgcaagttgattctgaagaatctgattccagtgatagtttccaggaaaacattggtcgaaatgaggtaaaaagcaaaaaggaaaatctcaaaactaaatcgcatccggaagtaccaagattagacaaaagaaagccaactttattcgacttctcaataactagggaaaaactgtcaaaagacaatgtggctaagttgagacagcggttttgtttagacgaacaggaaccatttttgaatgatttccctgcatggctacttaaagatgtgttggttcaaggccatatttttattacaacaaaacatttcctattctttgcatatttacctaagaatcctcgggcggttaaaatgtctggaaaccttaatatcaggacaaaactaattaggtctaccaggtattggtgcgtactaaagaatcatttattttctatgtatacctcatcaactgagctatactttccggttttaaccatagatttgagggaggtccaaaaaattgaaacacaaaaacataccttaaacgggagtgctacgaaaacatttaagctttacacagatgaaagtacattcaaattcaatgcagattcagagttctccgctaaatcgtgggtgaacgctttgaaaaaggagcagttcgcagctcagaattctgaaaacaattcgataagtttaaaaattccgctgcccaacattatagagatagatgatcaacctatagtcaacaaagctttaacattgagattaagagctttggagagctcacagacctatgctatcgatgatttcatgtttgttttcatggatgggtccggtagtcaggtcaaagagagccttggcgaacagttggctatattgcagaaatccggtgttaatacactttattatgatattccagccaagaaatcaaaatcaagttttggaaaagagacaccagctacagctgagcaaaagaataacggcgaggattcaaaatatttgaatgttccaacttcggctgtgccttcttcggaaaatgggaaaaagagtcgattcagatttagagaaagaagcaatagttggtttcgtagagctaaacctcttgaagattctcaagttgaggatgtggaggaaatatataaagatgcggcgaatgatatagactcttctgtgcattccacgattcatattcatgaacaagaagatagtcaagagcaaaccgtagcttggaagccaagtcacctcaaaaattttgccgaaatgtgggctgccaaaccaatacactaccggaacaagtttatcccgtttcaaaaggatgatacctatttgattaaagaaacagaagaggtttctgctaacgagcggttcaggtaccatttcaagtttaataaagagaagtcactaatcagtacttactacacatacctgaatagaaatgttcccgtttatggtaagatttacgtatccaatgatacggtgtgcttcagatcgttattaccagggtctaatacatacatggttttgccattggttgatgtggagacatgctataaagaaaagggatttcgatttggttattttgtattggttatagtaattcacggtcacgaggagctattttttgaatttagcactgaggtcgccagggatgatattgaacgcattcttttaaagctcttagataacatatatgcaagcagtgcagaaggatcgaatatatcgagtgcttctcttggcgatgttcagcataaccctgactcagcgaagttgaagcttttcgaagataaaattaatgccgagggctttgaggtaccgttaatgattgatgagaatccgcactataaaacaagcataaaaccaaacaagagttataagtttggattattgacgattggctcaagaggggatgttcaaccatatattgcacttggaaagggcttgataaaagaaggtcaccaagtagtaataattacacattcggaatttagagactttgttgaaagtcatggaatccagtttgaagagattgctggtaacccagtggagttgatgtccttgatggtggaaaatgaatcaatgaatgttaaaatgctgagagaagcttcgagcaaatttaggggatggatcgatgctcttttacagacatcttgggaggtttgtaacagaagaaaatttgatattctgattgaatcaccctcagctatggttggtattcatattactgaagcattgcaaattccttattttcgagcatttaccatgccatggacaagaacaagagcatatccacatgcatttattgtaccagatcaaaaaaggggcggtaactataactacctgacacatgtccttttcgaaaacgttttttggaagggaattagtgggcaagtaaacaagtggagagttgaaactctaggtttagggaaaacaaatctttttcttttacagcagaataatgttcctttcttatacaatgtttctcctacaatttttccgccatcaattgattttagcgagtgggtgagagttacaggatattggtttcttgatgataagagtactttcaaaccgccagcagaattacaagaatttatttctgaggcaagatcaaaaggaaaaaaattggtttatatcgggtttggttcgattgtagtctctaatgccaaagaaatgacggaagctctcgtcgaagcagttatggaagcagatgtatactgcattttaaataagggatggtcagaaaggttgggcgataaggcggcaaagaagacagaggtagatcttccaagaaacattttaaatatcggaaacgttccccatgattggttgttcccacaagtcgatgctgccgttcaccatggtggttctggaactactggagcttcattacgtgctggtttacctactgttataaaacctttctttggtgatcagttcttttatgcaggtagagtagaagacattggagttggtattgctttaaagaaacttaacgctcaaacattagcagatgctttaaaagtagctacgacgaacaaaataatgaaggatagagctggattaataaagaagaaaatttccaaagaagatgggattaaaactgcaataagtgcaatttacaacgaacttgagtatgcaagaagcgttactttatcaagagtgaaaaccccgcgcaagaaagaggaaactgtagatgcaaccaaactgacacctgctgaaacaacggatgaagggtggacgatgatttaa

SEQ ID NO: 80669 - DNA, 342 bp, Saccharomyces pastorianus
atgcccatcactcaaatcatatcagcgtctgatagcgaggcggggccaaaaccaagcatttcgttggtacctgataagccatctgagccagaaacttcccctaggcatcatcgcctttcaaggtcactttcgaagttcaagcgctggagaggaagatcaaatagcagtttatcgatggggtcgtctgagcagcaagaactgcaggacagtccaaatgaagcccgtagtgatgatgacgaaaacggttacaataacgataatgcagatgacttggcgaaatccaagtatatgatgaaaagtattgccggtttattactactgctagtgtgtatgcagggatga

SEQ ID NO: 80670 - DNA, 255 bp, Saccharomyces pastorianus
atgtacgagcctatgatccttgaagttagattgcaagagcgtatagatttgttcagaaaccagagatggaattgctttaaaaaagggcgacttgatgcaattttgagtaagaaagaccctcttgggagggattctgactggtggaaagtgaggacaaagaacggcaatattggctacattccgtataactatattgagatcataaaaagacggaagaaaattgagcatgttgatgatgaaacgcgtacacactag

SEQ ID NO: 80671 - DNA, 423 bp, Saccharomyces pastorianus
atggtcaacaacaatatgcttattggctctgttattttaaacaacaaatctccgataaatggaataagcaatgctaggaattgggataacccagcatatcaggacactttaagtcccataaacgatccacttcttatgtcaattttaaaccgcttacaatttaatttgaataatgatattcaattgaaaacagaaggaggaaaaaattccaaaaactcggaaatgaagattaacttaagactggaacaattcaaaaaggagttggtattatatgagcagaaaaaatttaaagaatatggtatgaaaattgacgaaattacgaaagaaaataaaaaattggctaatgaaattgggcgattaagagaacgctgggacagcttagtagaaagtgcgaagcaaagaagggataagcaaaaaaactag

SEQ ID NO: 80672 - DNA, 849 bp, Saccharomyces pastorianus
atgctgcaggtccagagaaaatgttggaagattcgattcacacatagcggctacacatcaattgaagcgagtagcgggaatattgttctggctatgccaaaaaaaactaccggaagtttgatcacatcgaccaggtcgtttctatacggcaaggcaagcgtgcgaatgaaaacggcgaggtcgaggggtgtggtgactgcatttgacttaacatccgcaattggggacgagattgattttgagtggctgggtggtgatttaatgacggcccaatcaaactactattctcaagggcatttggattacacaagaatgcaaagatttcccgtaggcgctgacacttgggccacttaccacacttatgagattgattgggacccggataggataatatggtatgttgatggtaaaatagctcgcacagtcctgaagaaggatacctgggaccccattagtaaagaatataggtacccacaaacgccgatgagactagaaatcgctgtttggccaggcggctcggaaaccaacggacccggtacaataaactgggcaggtggcctcatagattgggaaaattcacccgatattatcgaaaagggccaatttacggcgcatgttgaacaaatcaccgtaacgccgtaccaaaataaattcacagaacaagtgcagttttgtataaaggcaaagaaaaaggcaccaaccttttcccaaaaagatttgtcaagagtagtcgtttcgtataacaggcaagacagactgaatcatcatgatgaggggtctctcaaatgggactgctttgttactccaaagataaatgactggttgagttcttggaaacggtcaaaatag

SEQ ID NO: 80673 - DNA, 231 bp, Saccharomyces pastorianus
atgagaatatcaatattacagctggtgccggttgttggctacatcggatttgcactgggagaattatacaaacccaaaaactccatttcttgttctccaaataacccttgtcccgcagaatggccgtgctgctcgccgtataatgaatgtggcgctggaccgatatgtgtcggtggctgcaacgtgaggtcatctttcgacgaggaaagctgtgctcctatacctgcataa

SEQ ID NO: 80674 - DNA, 981 bp, Saccharomyces pastorianus
atggcaaagactaaccctgatgtaccattgtcgtacaagggttccattctccacagagtgatcaaagacttcatgtgtcaatttggtgattttaccaattttaatggtactggcggtgagagcatatacggtgtaaaattcgaggatgataatttcactgttaaacatgataaaccattccttctatccatggccaacgccggtcctaataccgatggatctcaagctttcataacctgtgttcctacacctcatttggacgggaagcacgttgtgtttggtgaagtgattcaaggtaaaagaattgttcgtttgattgaaaaccaacaatgtgaccaagaaaacaacaagccattgcgtgatgtaaagattgatgactgtggcgtgttacctgacgattatcaagtgccagagaatgccgaagctacaccaacagatgagtacggcgataattatgaagatgttttaaaacaagacgaaaaagttgacttgaagaatttcgacaccgtcttgaaagctatcgaaacggtaaagaacattggtactgaacagttcaagaaacagaactattccgtggctttagaaaaatatgtcaaatgtgataaattcttgaaagagtatttcccagaagatttggagaaggaacaaattgaaaaaatcaatcaattgaaagtgtctattccattgaatattgccatctgtgctcttaaattaaaagattacaagcaagtattagtagcctcatcggaggtgttatatgccgaagcggctgacgaaaaagctaaggccaaagctttgtaccgtcgtggcctggcctattaccatgttaatgacacagatatggctctcaatgacctagaaatggccactactttccagccaaatgacgccgccattttgaaagctattcatgatagtaaattccaaagaaagcaacgaaacgagaaagctagaaagtctctttcgaagatgttgtcctga

SEQ ID NO: 80675 - DNA, 222 bp, Saccharomyces pastorianus
atggggagacccctttgtacggacaatggggtgacagtcagggttttaggtctgttgcccataccaggcattttcctgtcacacaacttccaaaaaattttcagccgttttaggcactatgtcattgtacaactcaaaaactatacggccttggggtttacctccaatagaaatatcaaaaaaagttttaggtctagtcatttttactccttgatcgcctga

SEQ ID NO: 80676 - DNA, 1032 bp, Saccharomyces pastorianus
  modified_base (657)..(657): a, c, g, t, unknown, or other
atggatgttcaaatcatcaaggtatccgaatatactcgtcatgcccatgaaaaggatatcaatgctttgtcagtttctcctaacgattctatttttgcaacagcatcatacgacaagacctgtaagatctggaacctagaaaatggtgaattggaagccacgttggccaaccacaagcgtggactatgggatgtatcattttgccaatatgataaattattggcaacttcttcaggtgataaaacagtcaagatatggtcattggatacattcagcgttatgaaaacattggaaggtcataccaatgcggttcaaagatgttcgtttattaataagcaaaaacaactgatcagttgtggtgctgatggcttgatcaaaatatgggattgttctagcggtgaatgtctgaagactttggatggtcataataatagattatgggctttaagtattatgaatgatggtgatatgatcgtaagtgctgatgcagatggtgttttccagttttggaaagattgtacggaacaagaaatagaagaagacaagaaaaagctaaattacaagtcgaacaagaacaatcgcttcaaaaactatatgagccaaggtgattggacaaaggcatttttgttagcaatgactttagatcacccaatgagnttgtttaatgttttgaaaagagctttgggcgaatcaaggtctagacaagataccgaagagggcaaaattgaagtcattttcaatgaagaattggaccaagccatctctatcctaaatgatgaacagttaattttgttaatgaaacgatgcagagattggaatacaaatgcaaaaacacataccatagcgcaaagaacaataagatgtattttgatgcatcataacatagcaaaattgagtgagatacccggaatggtaaagatagttgatgcaataattccatacacgcaaaggcatttcacaagggttgataacttagttgaacaaagttacatattagactacgcgctagtggaaatggataagctattctag

SEQ ID NO: 80677 - DNA, 930 bp, Saccharomyces pastorianus
atggatctgaaaacctcatataaaggtatatcgttaaaccctatttatgcaggaagcagtgctgttgccactgtttcagaaaatggtaaaatactagctactccggtgcttgacgaaatcaacataatcgatttaaccccaggctccagaaaaattttgcacaagatttctaatgaagacgagcaagaaattactgcactgaaattaactcctgatggtcaatatctcacgtatgtttcacaagctcagcttttaaaaatctttcaccttaagaccgggaaagttgtcagatcaatgaaaatctcttctccatcgtacattctcgacgcagattccacttcaacgcttctcgcagttggcgggacagatggtagtataattgttgtggatattgaaaatggttacattactcattcgttcaaaggtcatggtggtacaatttccagtttgaagttttatggacaattgaatagtaaaatatggttattagcatccggtgacaccaatggtatggtaaaggtttgggatcttgttaaaaggaagtgcttgcacacattacaagagcacacatctgctgtgagagggttggatatcattgaggtaccagataatgatgagccaagcctaaatttactttccggtggtagagacgatatcatcaatctctgggatttcaatatgaaaaagaaatgtaaattgttgaaaacacttccagtaaatcaacaggtagagtcatgcggattcctaaaggatggtgacggtaaacgcataatttatacagccggcggtgatgctatctttcagttaattgactctgaatctggtagcgtgcttaaaagaaccaataaacctatagaagagttattccttattggtgtacttccaatattgagcaattcccagatgtcccagtattgtctgaccagacct

SEQ ID NO: 80678 - DNA, 156 bp, Saccharomyces pastorianus
atgtggagaagaaggcaaagtatggtggaagcagcggctgaaaatcttcgtttcactaaaaatggtttatttagtgagagtgcattggcagatatcgaaggaattatgggcaatgatgttaaccattcattcgaattcaatgacgtcttacaatga

SEQ ID NO: 80679 - DNA, 2955 bp, Saccharomyces pastorianus
atggcaggcaaaaaaagtcctcgaaaaagtacgatcaatcatagtacacattctggtaaactgccagcaaatattaaaaggctcataaaaaagggcgaatccgatacaaagtccaggcaatcaccacccacactgagtacaacgaggccaagaagatttagccttatatactcttctgagtcatccttgagtgacgtatctgattctgataaaaacaaaagtacaaacccacataaaattaaaagaaaagcaaagaacatttcaaataattcccaaggaaaaaaaagtaaacttatacaaaggcaaatagacaatgacgacgagggcacagagtcatccgattaccaagctgtaacagatggcgaagagagtgaaaatgaagaagaagagagtgaagaagaagaagaagatgatgacgaagacgacgacgacgatgatgatgacggaagtgatagtgatagtgatagcgaaacaagttctgatgacgagaatatagattttgtcaaactgacggcccaaagaaagaaaagagccatgaaagctttatctgccatgaatacaaatagcaatacactctattcctctcgtgagaacagtaacaaaaataaatcagttaaactatcccctaagaaagaaaatgaagaagagcagaaagaagaaaaagaaaaagagaaagaagagcaacaaaaacaacaagaatcaaacaaaaaagaagtaaacggttcaggcactactactacacaacaggcgctatcgtttaaattcaaaaaagaggacgacggcattagttttggtaatggtaatgaaggctataacgaggatataggtgaagaagtcttggatttaaaaaacaaagagaacaatggtaatgaagaagataaactggattctaaggtgatgttaggtaacaacgatgagttacgatttcccaatatttcagagtcagatgaatctgaatatgatattgaccaggatgcgtactttgacgtgattaacaatgaagattctcatggagaaattggtacagatcttgaaacgggggaagacgatcttcccatattggaagaagaagaacaaaacattgtttctgagctacaaaatgacgacgaactctcattcgatggtagtatacacgaagaagggtctgatcctgtagaagatgctgaaaataaatttttgcaaaatgaatacaatcaagaaaacggatatgatgaagaagatgacgaagaagatgaaataatgtctgattttgatatgccgttttatgaagatcctaaatttgcaaatctttattattatggcgatggttcagagccaaagctatccttgagtacatctttaccgttaatgctaaatgatgaaaaactatctaaactaaaaaagaaagaggccaaaaaacgggaacaggaagaaaggaaacaaagacgaaagctctataaaaagacgcaaaaacctagtacgagaacaacctccaatgtggacaatgatgagtatattttcaatgttttttttcaatcagatgatgaaaatagtggccataagagcaagacaggcaggcataaatccgggcaaagtcatattgaacatacgaataacggctcgaatttgataccatccaatgatgatctggaaccatccactcatagtacggtcctgaattccgggaaatatgattcttctgacgatgaatatgataacattttgttggatgttgcccatatgccttcagatgatgaatgcagtgaatctgaaacgtcccacgatgctgacacggatgaagaattgagggcactagattcagatagcttagacattggcacagaactggacgacgattacgaagacgacgacgatgattccagcgtgacaaatgtgttcatagacatcgatgatttagatccagactctttttactttcattacgacagcgatggatcttcctctttgataagttctaactcagacaaagaaaattctgatggatccaaagattgcaaacatgatctcttagagactgttgtgtacgttgatgacgaatccacagatgaagatgataacctaccgcccccaagttcaaggtcaaaaaacattggctcaaaagcaaaggaaatcgtaagttcaaatgttgttggattacgtccaccaaaattgggtacttgggagacggacaacaaaccttttagtattattgatggtctgtctactaaatcattatacgccttaatccaagaacatcaacagcttcgcgagcaacatcaaagggctcaaaccccagatgttaaaagagagggaagctctaatggcaataacggtgacgaattgacactcaatgagctgctaaacatgagtgaattggaggatgattcaccatcccacacagacgatatggagaacaattacaatgatgcaattaatagcaaaagcacaaatggccatgctgcagattggtatgaagttcctaaggttccattatctgcatttagaaataagggtattaatgcctatgaagaagatgagtacatgataccagcaaattctaacagaaaagttcccattggctatattggtaatgaaagaacaagaaagaagattgataagatgaaagagctacaacggaaaaaaactgaaaaaaaaaggcagttaaagaaaaaaaagaagcttcttaaaataagaaagcaaagacaaaaggcaataaaggagcaagaaactatgaatttacaattgggaatcaatggccatgagatcatcggtaacaataacagccatagcgacataaataccggtaccgattttacaaccaatgaaaatacccctatgaatgaacttccctctcacgcacctgaagatgcgtcattaatacctcataattctgatcttgccgtggacagcaatacaaggaaaaattcaacaaaaagtgttggtttagatgaaattcatgagattttggcaagatga

SEQ ID NO: 80680 - DNA, 828 bp, Saccharomyces pastorianus
atgactaaatacatcgcagattcttggtatattgtatacaatgcgctgcaatatcctggcaagataattaatatgggatgggacaaatatacccaaagtcaagattcaaatggttctgattctaccagtaactttaatagtcggcccaaggaaagaactcttatgcagtcgttgacagctttacctgttaacttttggtccaggaggaaggacgagcctacaccggtaaacgtttggttttatgtaaaaaatgcgcacgttgccagatacataccgaaaattattacggaaataggcatatgcaactatgggccgaagcagatcgtggcaagtgcaggatatatcaacgaattgataacatctgaaggaatatactgtgttaacctaggccaccttcccaggctatacgatgagcaaatttttgaaggcactggaacgacacatcttcccctggaactgaaagctatcgacaggacagattcagatgtttgtatcaatggtgatttagttctactcggttatgactttattccatatcagatatcgaagccgtggttactctttagaatcgaacccgtaaatagcattgaagcaatcttcaactatagtgaatgttctttttcataccagtttgcatggagtttggcctgcttacaatctgaacagaaaatttcatttcctagagacacgattattgggcacggtgtacctttacaagcctatccgatattgataagaagtttcgtctacaagcatccggtactaaagcaagatcttggtcaagaaatagcattgcccaactggaataccccttatcttcgaagatga

SEQ ID NO: 80681 - DNA, 771 bp, Saccharomyces pastorianus
atggataagataacgcttaaattttcaaaggtcaatgaaaattttgtttttagtcagttttttcagtattgtgcagaaatcgaagaaatgttagccattctgagaggaaatatttgggagtgtgaatgtgatgtgttcggtcccagaatcggactattagtagatagtaaccacatgaatgaaacaattcaaaaaaatattctgtcaataactttcaaacttaaaaatgaccctcagattatatgctgcttgaataaaattctggaaggcttattactttcatcaggtgttcaatttaaagttatccagtttttttatgtattaaaactatactatatgcaagataatgaatacacattcgaagcatcatctgaaatggataaattgaccatagaatgcttatgtatcatcgaaaatattattgatgcttgtgacaatcctgatgaagtaactgactaccaactccctaaggtactgttgactgctatggaggggaaattacttgttgctgaaaaaatatccgaagataatgactgttcagaatctctggacgattatcatccccgaacttaccaattcagacatcccagaataataatagacaagatgaaaacaaaattgaagcagaaactgcgctttgactcacctaaagatccagaaacagatgatcattggattgagtattggaaatattgctatcaggataacatagggaacttgccggacattttgtcacgtatatatcaaacctttactgatccctccaattaa

SEQ ID NO: 80682 - DNA, 783 bp, Saccharomyces pastorianus
atgtgctggattaagtcatatagatctattttgcagtacactcacagacacaaaaagttttgcacttcattcgccttgttgctgaacgacttgataaatagtccactgaattgttcaggaaatatatatagccacaggccgaaaagaagctatctttttagagaagatattattttcagggaattttcttgcattaactttgcactaacagattttaatgacgattatgtgtatgattctcccgacatgattaataatataattggatgccctacattgactaaggtgctttctccaaaagaagaatgtgttctgcgaattagatcaataatattttctggcatgaaatttttagagaaaaatgacaccggcatcatatggaatgccagcaaatataagtttgatttaataagcccaaatattaaaataaaacgccaaatagcattatcggaaatttcctccaaaataaatgtaaaaacacaacaggaaagagtagtctcttcgagaaaagttgaggccaaaagagacgaacaacagcgcaaaagagccgggaaaatagctgtgacagaactggaaaaacaatttgcaaatgtccggagaacaaaaaaattgtctccgctcccagaaaaagatggcgtttcttctgagttggtaaaacatgctgcttcacgagggagaaaaactatcactggcccactatcctctgattttctctcatatccagacgaagcaattgatgctgatgaggacatcaccgtccaagtgccagatactcctacttga

SEQ ID NO: 80683 - DNA, 1032 bp, Saccharomyces pastorianus
atggataatgaagaagttaacgaagaatgtatgagaatatttttcaagaacgctcgtgcgcatctggataaacatctaacatcaaggttgacatgcgatgaaaatgcatatatcacgttcagatgcttcctggatggaatacattgcaaatctactaggtttctcgaagagctacttttgaaacaagaaaatatgtaccataataacaattacgaatgcataaatgattccgtgataccattggttctgaaacttttatggcttcaaattcacgaacctacactccaatggtttgagcactggttccatgacatcatgcgactaagtaacagaagaaagttcagagtttttagaatttttcaaaaaaaaatgattcaatttttcaaaattacacacagatattactatgacatcatcgaacacctatgcgcaaagtatgatatgaattccgttatttcaaatgctctcttcgcgaagttgaatttgatgcaatacacagatggactttcaactcatgagaaaattatcttaaacacgagtaatccactgacgttttccattgtaatctcactacaaagatgcgtgattaatctaggttccacacatttttataaaacactactaaacaagccgtctaaaaaacccaagagtgtggaaggttttgagaagtctattaggtacttgaatattgcctcactctatctcccagccgttggagatacttattttcaacgagcgaaaatttacttggtcactgggaaattctcactgtatttttttgaattagtaagaggagcattagtaaggattccgtccaaatgtgcgttaaacaatttgaaggatttcattttaactcctaattttccggaaagaagacgtctgatgaaaaaattggcaattcttgtgtcaaaagatctcaaaggtgagaaatcattctttgaaggtcaaattgttttgcaatttctatcgatagtagaacacactttggttccacagtcatggaacgcatcacttcttctaattgttggttag

SEQ ID NO: 80684 - DNA, 447 bp, Saccharomyces pastorianus
atgaatgccctcgtagacatcgcgaaggccgaaatgaaggcgggcactacggcgccgcccaagccgatgactgagagtgaactcattctcctcatggatacaaacggcattggcacagacgccaccattgcggagcacatagacaagatccaagtacgtaattacgttaggagcgagaaagtaggcaaggaaacctacttacaacccacgaccctgggtgtctcactagtgcacggcttcgaggccatcggcctcgaagactcctttgcaaagcccttccagcgcagagaaatggagcaagacctcaagaaaatctgcgaaggtcatgcctccaagactgatgttgtaaaggacatagtcgagaagtataggaagtactggcacaagacgaatgcctgcaagaatactctcttgcaagtttatgaccgtgtcaaggcatccatgtaa

SEQ ID NO: 80685 - DNA, 1290 bp, Saccharomyces pastorianus
atgaaagtactatgtgtcgcagagaaaaattctatagcgaaggcagtttcacagatcctaggaggaggcagatcaacttcaagggattccggctacatgtatgtaaagaactatgatttcatgtttagtgggttcccgtttgccagaaatggggctaactgcgaagttaccatgactagtgttgcagggcacctaacaggcattgatttcagccatgattcgcatgggtggggaaaatgcgccatccaagagttatttgatgcgccactgaacgagattatgaataacaaccaaaaaaagatagcaagcaacatcaagcgagaagcgaggaatgcagactatctgatgatatggacagattgcgaccgggaaggagagtacatcggttgggagatatggcaggaggccaagagaggcaacaggctcatacaaaatgatcaagtataccgggcagtcttttcgcatctcgaaagacaacacatattaaatgcagcacgaaacccaagtcgattggatatgaagagtgtgcacgctgtaggcacgcggattgaaatcgatcttcgagcaggtgttacattcaccagactcttaacagaaacgctacgaaataaactgagaaaccaagccaccatgaccaaggatggtgcaaaacaccgcggtggtaacaagaacgactcacaagtcgtatcgtatggtacatgccagtttccaacgctcggctttgtagtagacaggtttgaaagaatacgaaattttgttcccgaagagttctggtatatccaattggtagtcgaaaacaaagacaacggcggaacaacaacgttccagtgggacaggggccacttgttcgaccggctgagcgtgttaacgttttacgagacatgcatcgaaaccgccggcaatgttgctcaagtagtagacttgaaatcaaagccaacaacgaaatacagacctttacctctgaccacagtggagctacaaaaaaactgcgcccggtacctgcgtctgaacgccaaacaatcactagacgcagcagaaaagctataccaaaaggggttcatatcgtatccaagaacagagactgatactttcccacacgcaatggacctaaaatccttggtcgaaaagcaagctcaattggaccaactcgctgcaggcggcagaaccgcctgggcatcgtacgcggatcgctgctccaacccgaaaacacaagtaacaataacaagttcaagtttccacgaagcggctcccatgacgacaaagcgcatccaccaatccaccccatcgtaa

SEQ ID NO: 80686 - DNA, 297 bp, Saccharomyces pastorianus
atgcacatatgcagtctgctgaatcatgcaattaagcggagagctttttcgaagacaaaaggcggcaaaaacgccttacatggatgccttgacacggtcataaacttgcaagagagtattcttgcaggcattcgtcttgtgccagtacttcctatacttctcgactatgtcctttacaacatcagtcttggaggcatgaccttcgcagattttcttgaggtcttgctccatttctctgcgctggaagggctttgcaaaggagtcttcgaggccgatggcctcgaagccgtgcactag

SEQ ID NO: 80687 - DNA, 417 bp, Saccharomyces pastorianus
atgagcacgaaaattttgacttcagggctggcgtactttattattgggttttacgtctataaatatcaattgatttttgccacagatcatttgccccattctacaggaaaagtatggccattaatttttagaagaatcatcgttggattgctattgtttcaattaacaatgacaggaacactggcaggattcgaaggaggatgggttttgtcatcttgccttttcccgcttccagtagtgacattatgtttcctatatgatttcgagaagaactatttgccgttgtcaaaatatatcgcattgagttcaattcgcgagtacgaaagagacaattctacggtgaattctgccaatgaggaagagtcgtatgcatacccttacgctgtgagtgaattagagggtccgatgttggattga

SEQ ID NO: 80688 - DNA, 780 bp, Saccharomyces pastorianus
atgaaaattggatatcgtggaatctttgggaaggaagtagatgccatagagtatctggagcagcaattaaaatttattgatgctgaaattattgaagcgaggaaacaacactactccgcaacacctacggcattcgttacgatggattctgttgctaatgcgcaaatggcagctcaggctgtattagatcctagagtacattacttcataaccagattggctcctgcacctcacgatatcaagtgggatcatgtttgtctttctagaaaggaccggttaacaaaagtttattctactaccgtatttataggcctttcaagtttgtttttagtcattcctgtatcatacttagccacattgctaaatttgaaaacactttcgaaattctggccaagcgtagggcaactactaaaagatcaccagtgggccgctaacattgtaacggggctattaccaacctatctcttcacattgcttaactttggaatcccctatttttacgagtatttgacttcttatcaaggattggtatcatacagcgaagaggaaatctcacttgtttcaaaaaatttcttctatatttttgtcaaccttttcttagttttcacattggcaggtacagcatctaattactgggcgtacctcagcgataccaccaaaattgcttatcaacttgctacatctgtgaaggagttctccttattctatgtcgatttgattatattgcaaggtattggtatgttcccgtttaagttgttattagttggtagtttgatccct

SEQ ID NO: 80689 - DNA, 1122 bp, Saccharomyces pastorianus
atggaattccaatatccaggtacctctaagccacaaatcactgacattaacttccaatgttctttgtcttccagaattgctgtcattggtccaaatggtgctggtaagtctactttgattaacgtcttgactggtgaactattaccaacctctggtgaagtctacacccacgaaaattgtcgtatcgcttacattaagcaacacgcttttgctcatatcgaatctcatttggacaagactccatctgaatatatccaatggagattccaaaccggtgaagatagagaaaccatggacagagctaacagacaaatcaacgaaaatgatgctgaagctatgaacaagatcttcaagattgaaggtacccctagaagaattgccggtatccactccagaagaaagttcaagaacacttacgaatatgaatgttctttcttattgggtgaaaacattggtatgaaatctgaaagatgggttccaatgatgtccgtcgacaacgcttggattccaagaggtgaattggttgaatctcactctaagatggttgctgaagttgatatgaaggaagctttggcttctggtcaattccgtccattaaccagaaaagaaattgaagaacattgttccatgttgggtttggacccagaaattgtttctcactccagaattagaggtttgtctggtggtcaaaaggttaagttggtcttagctgccggtacatggcaaagacctcacttgattgtcttagatgaacctaccaactatctggacagagattctttgggtgctttgtctaaggctttgaaggaatttgaaggtggtgttattatcattactcactctgctgaattcacaaagaacttgactgaagaagtctgggccgtcaaggacggtagaatgactccatctggtcacaactgggttagtggtcaaggtgctggtccaagaatcgaaaagaaggaagacgaagaagataaattcgatgctatgggtaacaagattgccggtggtaagaagaagaagaagttgtcttctgcggaattgagaaagaagaagaaggaaagaatgaagaagaagaaggaattgggtgatgcttacgtttcttctgacgaagaattctaa

SEQ ID NO: 80690 - DNA, 2130 bp, Saccharomyces pastorianus
atgtctgattcccagcaatccattaaggttctagaagaactattccagaagttatctgttgccactgctgacaacagacacgaaatcgcttctgaagtcgcttctttcttgaatggtaacatcattgaacatgatgttccagaacacttcttcggtgaattggccaagggtatcaaggacaagaagaccgctgctaacgccatgcaagctgttgctcacattgctaaccaatctaacttgtctccatctgttgaaccatacatcgtccaattggttccagctatctgtaccaacgcaggtaacaaggacaaagaaattcaatctgttgcttccgaaactttgatttccatcgttaacgctgttaacccagttgccatcaaagctttgttgccacatttgactaacgctattgtcgaaactaacaaatggcaagaaaagattgctattttggcagctatctctgctatggtcgatgctgctaaggatcaagttgccctaagaatgccagaattgattccagtcttgtctgaaaccatgtgggacaccaagaaggaagtcaaggctgctgctactgccgccatgaccaaggctaccgaaactgttgacaacaaggatattgaacgtttcattccaagtttgattcaatgtattgctgacccaactgaagttccagaaaccgttcatttgttaggtgctactactttcgttgctgaagttactccagctactttgtccatcatggtcccattgttgtccagaggtttgaacgaaagagaaaccggtatcaagcgtaagtctgctgttattattgacaacatgtgtaagttggtcgaagacccacaagttattgctcctttcttgggtaaattgttgccaggtttgaagagtaactttgctaccattgctgacccagaagccagagaagttactttgagagctttgaagactttgagaagagttggtaacgttggtgaagacgatgctattccagaagtttctcacgctggtgacgtttctactactttgcaagtcgttaacgaattgttgaaggacgaaaccgttgctccaagatttaagattgtagtcgagtacattgccgccattggtgctgatttgatcgatgaaagaatcattgaccaacaagcttggttcacccacatcaccccatacatgactatcttcttgcacgaaaagaaggccaaggacatcttggacgaattcagaaagagagctgtcgacaacattccagttggtccaaacttcgacgacgaagaagacgaaggtgaagacttatgtaactgtgaattctctttggcttatggtgctaaaatcttgttgaacaagacccaattaagattgaagagagccagaagatatggtatctgtggtccaaacggttgtggtaagtccactttaatgagagctattgccaacggtcaagttgatggtttcccaacccaagaagaatgtagaaccgtctacgtcgaacacgacattgatggtactcactctgacacttccgtcttggatttcgttttcgaatctggtgttggtactaaagaagctatcaaggacaaattgattgaattcggtttcaccgatgaaatgattgctatgccaatctctgctttatctggtggttggaagatgaagttggctctagctagagctgtgttgagaaatgctgatatcttgttgttagatgaaccaactaaccatttggataccgtcaacgttgcttggttagttaactacttgaacacctgtggtatcacttctatcactatttctcacgactccgttttcttagataacgtctgtgaatatattattaactacgaaggtttgaagttgagaaagtacagggtaactttaccgaattcgttaagaagtgtccagctgctaaggcttacgaagaattatccaacactgatttggaattcaagttcccagaaccaggttacttggaaggtgttaagactaagcaaaaggctattgtcaaggttaccaacatggaattccaatatccaggtacctctaagccacaaatcactgacattaacttccaatgttctttgtcttccagaattgctgtcattggtccaaatggtgctggtaagtctactttga

SEQ ID NO: 80691 - DNA, 159 bp, Saccharomyces pastorianus
atgaagttgtttaaggatactatcaaagtctcgaccacatcttcaaccttgtacttgcagaacatggcaaaaactaacaacgctgcaagaagtcactgtaatattccaaatacccaaataacacaatccactgtgatagcaacaacgtcttccgtttaa

SEQ ID NO: 80692 - DNA, 336 bp, Saccharomyces pastorianus
atggtgccgaatttggatttggaaacagctatacagataatctcctcactggagacccagttgagcgagcttgaaggcgccacgaaagaatatgaaaatgatttggaacaagtaatatcaaagttaaaaagcgatcttcttgagagccaacaacaaaataaatgcaataagaaacagataacagatttagagatacaggtagatgagttggaaaatgaaaatatccaactgaggaataagatagagacattacattggagagtgaccgacgactggaacgcaacgttctactggaacacgagttattcgacaccaacgaggcgctgcaaaagttaa

SEQ ID NO: 80693 - DNA, 1332 bp, Saccharomyces pastorianus
  modified_base (722)..(771): a, c, g, t, unknown, or other
atgttatcttgtcttacccttgtttggacattggacaatcgttctttacaatttatcgtttgtttgatcctgagagctaaatgtggcccattgactggtatgcgtgaatcatcgatcattactaatggtacatcaagtggatttaatagttcggtagaagatgaggacgtcaaagttaaacaagaatcttctgatgaattgaaaaaagacgatttcatgaaagatgtaaatttggattcaggcgattcattagcagagattctaatgtcaagaatgctgctatttcaaaaactaacaaaacaactatcaaagaagtacaactacgctattcgtatgaacaagtccactggattctttgtctctttactagatacaccttcaaagaaatcagactcgaaatcgggtggtagttcattcatgttgggtaattggaaacatccaaaggtttcaaacatgagcggatttcttgctggtgacaaagaccaattacagaaatgccccgtgtaccaagatgcgctggggtttgttagtccaaccggtgctaatgaaggttctgctccgatgcaaggcatgtccttacagggctctactgctaggatgggagggacccagttgccaccaattagatcatacaaacctatcacgtacacaagtagtaatctacgtcgtatgaatgaaacgggtgaggcagaagctaagagaagaagatttaatgacggctnnnnnnnnnnnnnnnnnnnnnnnnnnnnnnnnnnnnnnnnnnnnnnnnnnccttcaaatgggctatcatcggtgcagccactattatcgtcattttccatgaaccagctaaacgggggtaccattccaacggttccatcgttaaccaacattacttcacaaatgggagctttaccatctttagataggatcaccactaatcaaataaatttgccagacccatctagagatgaagcatttgacaactccatcaagcaaatgacgcctatgacaagtgcattcatgaatgctaatactacaattccaagttcaactttaaacgggaatatgaacatgaatggagctggaactgcgaatacagatacaagtgccaacggcagtgctttatcgacactgagaagcccacaaggctcagacttagcatccaactctgctacacagtataaacctgacttagaagactttttgatgcaaaattctaactttaatgggctaatgataaagccttccagtctggtagaagttgttggtggatacgacgatcctaataatcttggaagaaatgacgcggttgattttctacccgttgatatgttgaaattgatggactag

SEQ ID NO: 80694 - DNA, 282 bp, Saccharomyces pastorianus
atgacaattagaatgttgctgtacttattgaactacattttgtttactcattatgaaccaatgggcagtgaagatcctggtactaatatcgtagctaaggagtacgctcaagaggcattaaattttgccatggatggctacagaaactgcatgattttcttcaacaatatcagaaacaccaattcactattcgattacatgaatgttatcttgtcttacccttgtttggacattggacaatcgttctttacaatttatcgtttgtttgatcctgagagctaa

SEQ ID NO: 80695 - DNA, 141 bp, Saccharomyces pastorianus
ctaacctatggtactgagaatgtcaatgatagtagtgagcccttgatcaacaaagggttattaccaacttcggaaggtggttctgtagattcaaataatgatgaaatttacggtctaccggaaactacccgactattctaa

SEQ ID NO: 80696 - DNA, 876 bp, Saccharomyces pastorianus
atgagcatgccatcttcatctacactagagaaccaacccataacacaaatcaatcttccaaaactttccgattcttgtaacttaggtattctgataataatcttgagattgacatggctatccataccttctaattcctgcgaagtcgacctgggagaggaaagtggctcatttttagtgcccaacgaatctagcaatatgtctgcatctgcattgacctcgatggctaaagaagaatcacttctgctaaagcatgagacaccggtcgaggcactggagctatgtcaaaaatacttgattaaattcgatgaactttctaatatttccaataacaacgttaatttaaccacggtgcagtttgccattttttacaacttctatatgaaaagtgcctctaatgatttgactaccttgacaaataccaacaacactggcatggccaatcctggtcacgattccgagtctcaccagatcctattgtccaatattactcaaatggcctttagttgtgggttacacagagaccctgataattttcctcaattaaacgctaccattccagcaaccagccaggacgtgtctaacaacgggagcaaaaaggcaaaccctagcaccaatccaactttgaataacaacatgtctgctgccactaccaacagtagtagcagatctggcagtgctgattcaagaagtggttctaaccctgtgaacaagagggaaaatcaggttagtatcgaaagatttaaacacacttggaggaaaatttggtattacattgttagcatggatgttaaccaatctctttccctggggagccctcgactactaagaaatctgagggatttcagcgatacaaagctaccaagtgcgtcaagg

SEQ ID NO: 80697 - DNA, 1131 bp, Saccharomyces pastorianus
atgtttattgaggctctagcgcgtttgaactacagattaaaagtatctggatccaaaaaaactgtggtagcgtttattgtcatgcccgccaaaaataattccttcactgttgaagcattgaagggccaggctgaggtgagggcgttagaaaatactgtacacgaagtgactacttcaattggtaaaagaatattcgatcatgctatcaggtacccccacaatgggctgacgacggaattaccaaccgatttgggtgaattactaaagagttcggataaagttatgttaaagagacgtattttggctttgagaaggccggagggacagttacccccaatagttacacacaatatggtcgatgacgctaatgacctgattttaaataaaatcagacaagttcaattgttcaatagcccaagtgatcgtgttaaaatgatcttccatccagaatttttgaacgctaataatccgatccttggtttagattatgatgagttcgttcgtggttgccatttgggtgttttcccttcatactacgagccttggggttacacacctgcagaatgtacagtaatgggtgttccctccatcacgacaaatgtctctggcttcggttcctatatggaagacttgatcgaaaccaaccaagcaaaagattacggtatttatattgtggatcgtcgtttcaaggcacctgatgaatctgtggaacaattagttgactacatggaagaatttgtaaaaaagacaagaaggcaaagaattaatcaaagaaatagaactgaaagactgtccgacttactggactggaaaagaatgggtctcgaatacgtcaaggcaaggcagttagcattaagaagaggctatcctgatcagttcagagagctcgttggtgaagaactaaatgattccaacatggatgctctagcaggcggaaagaaattgaaagttgcaagaccgcttagtgtacctggctcaccaagagatttgagatcaaacagcacagtttacatgacccctggtgatttgggtactctgcaggaggttaataacgcggacgattatttttcattgggagtgaatcctgcagctgacgatgacgacgatggcccatatgctgatgacagttaa

SEQ ID NO: 80698 - DNA, 429 bp, Saccharomyces pastorianus
atgtcccgtgacctacaaaaccatttgttattcgagactgcgactgaggttgctaatagggttggtggtatttactccgtgctaaaatcgaaggctcccattacggttgcccagtataaagaccattaccacttgatagggcccttaaataaagccacttatcaaaatgaagttgatatactagattggaagaagcctgaggccttttccgatgaaatgaggccagtgcagcatgccctgcaaacaatggaatctagaggagttcattttgtttatgggaggtggctgattgaaggtgctccaaaagtaatactttttgacttggattctgtgagaggttattcgaatgaatggaagggtgatttatggtcattagtaggaattccctctcctgagaatgatttcgagacgaatgatgctatcctatag

SEQ ID NO: 80699 - DNA, 81 bp, Saccharomyces pastorianus
atgtcaaataaattgccatattatactaatactgaactagactatgttatacacttggaccaaattgatcgggatttgtga

SEQ ID NO: 80700 - DNA, 84 bp, Saccharomyces pastorianus
atgaagcaaaatctgttggcagttgagacatggtatatgctaattttgtcgtttcgctttcttttttttttccaggaattataa

SEQ ID NO: 80701 - DNA, 132 bp, Saccharomyces pastorianus
atggcaattcgatcatccaaaagagttggaaagcctcttttccttcgatatatagtgatgatatccttgaaaagactccctaaaaagtgcagtgcggcgggtcacccgccagcttgcctgaaaaatacgtaa

SEQ ID NO: 80702 - DNA, 1785 bp, Saccharomyces pastorianus
atgtgcagaaattgcagacacacaacatcaataacaatcaacaatttcaattctatcacaggtaataccgtcagtttaccacgctcttgcttatctacgattgagagtgaatcttctatggcaaacgagtcgaatattggtgatgaatcgaccaagaaaaattgtggacctgatccatatattattatccatgagtcttcaaagtttattgatcaacagtttttaaaattacaggaaatcccagaactggttccagtaggtgagatgcctagaaacttaacaatgacttgtgaccgatacctaacaaacaaagttattcctggtacgagagtcactatagtaggtatttattccatctataattctaaaaatggtgccggatccggaaggagcgggggtggaaatggaggaagtggtgttgctattagaacaccttatatcaaaatattaggtattcagtccgatgtagaaacctcctctatttggaattcagtaactatgtttactgaggaggaagaagaggaatttctacagctaagtagaaacccgaagctttatgaaattttgaccaactctattgccccctctatttttggtaatgaagatataaaaaaagccattgtatgtttattgatgggtggttccaagaagatattacccgatggtatgaggttaagaggtgatatcaatgtactattattaggtgatccaggtaccgccaaatctcaactattgaaatttgtggagaaagtgtcacctattgcggtatatacatccggtaagggatcttctgcagctgggttaactgccagtgtacaaagagatccgatgacaagagaattttatttggaaggtggtgctatggtgcttgccgatggtggtgttgtatgcatcgatgaattcgataaaatgagagatgaagatagagtggccattcatgaagctatggagcagcaaacaatctccatcgcaaaagctggtatcactacagtgctaaattctagaactagtgttttagcggctgctaatccgatatacggccggtatgatgatttgaagtctcctggtgacaacattgatttccaaactactattttatcccgttttgatatgatttttattgttaaggatgaccataatgaagaacgtgatatttcaatagctaaccatgttattaatattcatacaggaaatgctaatgctatgcaaaaccaacaagaggaaaatggcagtgaaattagtattgaaaagatgaaacgttacattacgtattgtagattgaaatgtgcaccaagactttcaccgcaggccgctgaaaaactgtcatcgaacttcgtcaccattaggaagcaattattaatcaacgaattagagtcaacggaaaggtcgtctattccaattaccattcgtcaattagaagctattattagaataacagaatcattagccaagttagaattaagtcctattgcacaggagaggcatgttgacgaagctattagattgtttcaagcttctacaatggacgcagcgtctcaggatccaattggcggcttaaatcaagcaagcggaacatctttgtcagaaattcgtcgttttgaacaagaactaaaaagaagattacctataggctggtctacttcttatcaaactttgagaagagaatttgtagatacacatagattttcccaattagcactggataaggccttatatgccctagagaagcatgaaacaattcaattgagacaccagggacagaatatttacagaagtggtgtatga

SEQ ID NO: 80703 - DNA, 438 bp, Saccharomyces pastorianus
atgtcatttgatagaccggaaatatacagtgctcctgttttacaaggagagtctcctaacgacgatgataatactgaaatcataaagtccttcaagaatttcattttggagttcagacttgactcgcaatttatttacagagatcagttaaggaacaacattcttgtgaagaattattctttaacggttaacatggagcatttgatcggatataacgaagacatatataagaaactatcagacgaaccttcagatatcattccattattcgaaaccgcgatcacacaggtggctaaaaggataagtattctgagcagagctcaatctgctaataacaatgacaaagatccagaaaatactagtatggatactgattctctcttattgactctttaccaacattcaattaattttatactccaatgcaaatcagaggga

SEQ ID NO: 80704 - DNA, 243 bp, Saccharomyces pastorianus
atgtccctgataaatgatgctatggtgacaagaacacctgtgataatctcattaagaaacaatcataaaataatagcgagagtgaaagctttcgacaggcattgtaatatggttttagaaaatgtgaaggagctttggacagagaagaagggcaaaaatgtaattaatcgggaaagattcataagtaaactattcttaagaggtgattcagttatcgttgtgttaaaaacccctgttgagtaa

SEQ ID NO: 80705 - DNA, 1155 bp, Saccharomyces pastorianus
atgagtgcaaccctaaatgacgatatacaggctttgaaacaaaaattttgtcgttctccagctattcttaaattcaatgacgaggaaataaataagaaccaaaacaaattacttcaatattacgttaaagtcagtgaatttgacaaattcttactatgctatgtcatttttaaacttaacttaatcaagggtaaaacattaatttttgtaaataatattgacagaggatataggctcaagctagttatggaacaatttggtatcaagtcctgtattttaaacagcgagctacccgttaattcgaggcaacatattgttgaccaattcaataaaaacgtttaccaactattgattgccacagatgacaccgagtacataaaagaggaagatgacgaaatagaagaagggcacaatacagaaaatcaagaagaaaaaagcttggaaggcgagcctgagaacgataagaaaccaagcaagaaaaagaaggtccaagtgaagaaagataaggaatatggtgtttctcgtggtgttgatttcaaaaatgttgcatgtgtcctcaatttcgatttacctacgacggctaagtcctacgtgcatagagtaggtagaactgctcgtggcggaaagaccggtactgcaatttcattcgtagtcccactgaaagaatttggtaagcataagccatcaatgctacagacagcaaagaaggatgaaaggattctttcacgaatcatcaaacaacagagcaaacttggattagaattacagccttacaaattcgatcaaaagcaggtcgaggcgttccgttacagaatggaagacggtttccgtgctgttactcaagttgccattagagaagctagggtcaaagagttgaaacaagaactattggcaagtgagaagttgaaaagacattttgaggagaatccaaaagagctacaaagtttaagacacgataaagaattacatccagcaagagtgcaacagcatttaaagcgtgttccagattacttgcttcctgaatcagccagaggaaatggaaccaaagtcaagtttgttcctttccacaatgctaagaagcgccattcacataaaaagggaagagtcagtaagccaaagaatggtaaagtagacccgttgaagaacttcaaatga

SEQ ID NO: 80706 - DNA, 1692 bp, Saccharomyces pastorianus
atgtcactccatttacactcatccttctattcacacaaatacttactaccgccaaccgatgcctttgatagttctgctaacacgaatattgctgtttattggggtcaaaactcagcaggaacgcaagaatccttagctacttactgtgaatcttctgatgctgatattttcctattatctttcttgaaccaatttccaacccttggtttgaactttgccaacgcatgctctgatactttttctgatggcttgcttcactgtacccagattgctgaagatattgaaacttgccagtccctaggaaagaaagttctattatcattaggtggtgcatctggtagctacctcttttcagatgattctcaagcggaaacttttgcacaaactttatgggatactttcggtgaaggtacaggtgccagtgagagaccatttgactcagcagtcgttgatggttttgattttgatattgaaaacaacaacgaagtaggctatagtgcgttagctaccaagttaagaactttgtttgccgaaggtacaaagcaatattacctttctgccgcaccacaatgtccatacccggatgcttctgttggtgacttgttggaaaatgcagacattgattttgcgttcatccaattttacaataattactgcagtgtgtgtggtcaattcaattgggatacttggttaacctatgctcaaactgtatccccaaataaaaatatcaaactgttcttaggtttacctggttccgcttctgctgctggctctggttatatttctgacacttctttattggaatcaactattgcagatattgcctcttcaagttcttttggtggtattgcgttatgggatgcatctcaagccttttccaacgagctaaatggtgaaccatatgttgagattttgaagaatttgctaacaagtgctagccagaccgccactactacagttgccacctcaaaaacctcagcagcctcaacttcatctgcttcaacttcatctgcttctacttcatctgcttcaacttctcagaaaaagaccacacaatctacgacatctacacaaagtaaaagcaaagttactttatctccaactgcaagcagcgctatcaaaacatcaattactcaaactacaaaaacattgacgagtagcaccaagacaaaatctagtctaggtaccaccacaacagaaagcactttaaattcagttgctatcacaagtatgaaaactactctatcttcccaaataaccagtgctgccttggtgacccctcaaacaactactactagcatagtttcttcggccccaattcaaacagctatcactagtactctttcgccagcaacgaagagttcttctgtcgtttccctacagacagctactactagtacgctttccccaacaacgaccagtacaagctcaggtagtacaagctcagacagtacagctcgtacattggctaaagaattgaatgctcaatatgcggctggtaaattgaacggtaaatctacctgtactgaaggtgaaattgcatgttctgctgatgggaagttcgccgtttgtaatcatagcgcttgggtttacatggaatgtgcttctggaaccacatgttatgcttatgactccggcgactcagtctatacccaatgtaatttctcttatttggaaagcaattacttttaa

SEQ ID NO: 80707 - DNA, 261 bp, Saccharomyces pastorianus
atgacagtatcctgtatggtgggaaaggctgaacaggaaagttcgtcgacacatgaagtaatcatccgttgcaaagattggaaggtgtgttccaagctatacgctgcatttgaagaagttgttttggcgatttctcacgacgaatcctgcgtattccactgttcgttggatcgtggtagcttggaagatagcgaagaggtggaaaaaccaagggaaagaggacagattatatactatatagcaagatcgaagggcttgtaa

SEQ ID NO: 80708 - DNA, 1197 bp, Saccharomyces pastorianus
atgaaattaaaattgatagtaaatggttgtgaagcacctgatgattataaattgctaagaactactatcaatacagttgcttcgctacgaaagacggctatcttaagatttaatagtgaaagattgacaataatatccactccaaaatcatcactcaacagcagtaacaacggtacaatattacgaggggatactggtcagctttggtgtaccattcctcatgatgtattcagattatatacagttatatcagctcgcgagcttaatacaataacaatggagtgtaattgtgattctttattgagtgtgtttaaaagatatgatcgagtaatgaaccaaggatcttcctctaatatgattataaaactacagtcaatgccagaatggaatacaaataacggaacactttcaggaggaacagcaggaggcgtagatacaacctcaaaaccgaaccccatttgtgctttaggtataacattcgaagaaattgtacataccagcggcccaaatgacgctatagttatgaatgggggagtggatgagcacaatggtttaccaaccacagtaggcacaggaaatctactagcaagcaataaggttattatgcattcgttcaaagtacctgtcaaactattattccgagcacaagatacgcgaatacaagagccaatgattaactatattcaactgatgatgtacaagctaccaccaatatcgggtgagtttggctccgccttccacgggttcattagacgtgttgaacggtacagcaatgtcaaccacattcatttaatgggagtcaaaaaaaaggagcatggaaatgaaggtgatgatgtagaactcaagataattgtgaatgaattagattggcatttggaaatatgttggaatggacccttagattctgtgatacaacgccaagaagggctcactgacaatccttcccaaaaccagcacatcgacacagacggccggcaggaggaaggatctcttccgattatcgaagcggataaaccgatgtcttcactatataccaatactagagatcgagagatggaagagaatatccgctacgatgaagatttattaagaattgaggatagctcgatcgcagatacgcggggaaacatttacacagctgatacgagcggtgagactgaatgtaatgacagtatcctgtatggtgggaaaggctga

SEQ ID NO: 80709 - DNA, 879 bp, Saccharomyces pastorianus
atgcctgcaggtcttttgagggatgaagtagaagaagacactatgagcacaactgtcacatccacatccgttgctgaacctttgatttcttctatgtttaatttattacagaaaccggagcaacctcatcagaatagaaaaaatagttcagggagctctggtatgaaaaccaagactgattaccgtcaagtagccattcagggtatcaaggatcttatagatgagataaaaaacattgatgaaggtattcagcaaattgctattgatttgattcacgatcatgagattttattaactcctacacctgattcaaaaaccgtattaaaatttctgattactgctcgcgaacgtagtaatagaacatttacggttttggttacagaggggttccctaataacaccaagaatgcacatgagtttgccaaaaaattagcacagcacaacatagaaaccctagtagtcccagactcagctgtttttgctttaatgtcccgtgtgggtaaggttattatcggcactaaagccgtttttgtcaatggggggactatctcgtcaaattcaggtgtatcatccgtttgtgaatgcgcccgagaatttagaactcctgtatttgctgttgcaggtttgtataagctttctcctctatatccgttcgacgtagagaagtttgtcgagtttggcgggtcccaacgtatattacctagaatggatccaaggaaaagattagatacagttaatcaaattaccgattatgttccgcctgaaaatattgatatctacattacaaacgtcggtgggttcaatccaagttttatatatcgtattgcgtgggataattacaagcaaattgatgtgcatttggataaaaataaggcgtga

SEQ ID NO: 80710 - DNA, 210 bp, Saccharomyces pastorianus
atgtcctctcaagcattcacttcagtgcatccgaatgcggcaacatctgatgtgaatgttactattgacactttcgttgctaagttaaaaagaagacaagtgcaaggttcatacgccatcgccttggaaactttacaactgttaatgcgatttatctctgcagctcgttggaaccatgttaatgaccttattgacaaatcagagatttag

SEQ ID NO: 80711 - DNA, 630 bp, Saccharomyces pastorianus
atggataaaatgaagaatgactacttggcacctgcttacgaatacttgagaaacaacatcaagagtgaccaagttatcatcatccatgacgctttccaaccatacaattattgggatgacttcatgactgaaaacgatggctactggggtgtcactatcgaccatcatcactaccaagtctttgcttctgatcaattggaaagatccattgatgaacatattaaagtagcttgtgaatggggtaccggagttttgaatgaatcccactggactgtttgtggtgagtttgccgccgctttgactgattgtacaaaatggttgaatagtgttggcttcggcgctagatacgacggttcttgggtcaatggtgaccaaacatcttcttacattggctcttgtgctaacaacgatgatatagcttactggtctgacgaaagaaaggaaaacacaagacgttatgtggaggcacaactagatgcctttgaaatgagagggggttggattatctggtgttacaagacagaatctagtttggaatgggatgctcaaagattgatgttcaatggtttattccctcaaccattgactgacagaaagtatccaaaccaatgtggcacaatttctaactaa

SEQ ID NO: 80712 - DNA, 198 bp, Saccharomyces pastorianus
atgatgacaacgacgaaggaatctgtcgacgaatatcacttctgtcaatatttaggtaaggatttggctaaaagccgtttacagagccattggtctactttctaccaagaacaagatttcgctaatattgcttcccaaggtttcaacctctgtcagaattcctatcggttactgggctttccaaactttggacgatga

SEQ ID NO: 80713 - DNA, 780 bp, Saccharomyces pastorianus
atgttgaaaccaccacatggtgatggtttgcctcaaagaggttatgatgctggtgagaacacttaccaagctccacctgcagaccgtagcaccgttgaagttaaagtttctccaacttcagaccgtctacaactgttgaaaccattcaaaccttgggacggtaaggatgctaaagacatgccaatcttgattaaggccgtcggtaagacaactactgatcatatttctatggctggtccatggttgaaatacagaggtcatttagaaaacatttctaacaactatatgattggtgctattaatgctgaaaacaagaaggctaactgtgttaaaaatgtatatactggtgaatacaaaggtgttccagacactgctagagattacagagaccaaggtatcaagtgggttgttattggtgatgaaaactttggtgaaggttcctctcgtgaacacgctgctttggaaccaagattcttgggcggtttcgctatcatcacaaagtctttcgctcgtatccatgaaactaacttaaaaaaacagggtctattgccattgaacttcaagaacccagctgactatgacaagatcaatcctgatgacagaatcgatattctgggtctagctgaattggctccaggtaagcctgtaacaatgagagttcatccaaagaatggtaagccatgggatgctgtgttgacccatactttcaacgatgagcaaattgaatggttcaaatatggttctgccttaaataaaattaaggccgatgagaagaaataa

SEQ ID NO: 80714 - DNA, 345 bp, Saccharomyces pastorianus
atgaatgccacaggcaaacatttccccaagtattttaggcctccatacggtgcaattgataatagggttagagctatagtaaaacagtttggcctaacggttgtcttgtgggatctcgatacttttgattggaaattaatcactaatgatgatttcagaacagaggaagaaatacttatggacataaatacttggaagggaaaacggaaaggtttgatcttagagcacgatggtgcacgaagaacagttgaggttgctattaaaatcaacgaacttattggtagtgaccaattgacaattgcagaatgtattggtgatacagactacatcgaacgctacgactag

SEQ ID NO: 80715 - DNA, 456 bp, Saccharomyces pastorianus
atgcaaaaggagggacacttaatcggctcacatacctggtctcacgtatatttgccaaatgtatcgaatgaaaaaattatagctcaaattgaatggtccatctgggcgatgaatgctactggcaaccatacccccaaatggttcagacctccatatggcggaatagataatagagtaagagcaataacaaggcaatttggcttacaagccgtcttatgggatcacgatacttttgattggagcctccttctcaatgattctgtcataactgaacaagaaattcttcaaaatgtaataaactggaacaagtcaggaaccggattaatattagaacacgattcaacggaaaaaactgtcgatcttgccattaaaataaataagttgataggtgatgatcaatcaacagtttctcattgtgtcggcggaattgattacataaaagaattcttgtcctaa

SEQ ID NO: 80716 - DNA, 1416 bp, Saccharomyces pastorianus
atgatcgaggcctacgaagctaaaaatactgagttgagaagtaagatagagttattgagcaagaaagtagagcatctgaagaatttatgtacagaaaaggagaaagagcagactacatcgcagaacaaggtagccaaattaaatgaggagatatctcaacttacctacgaaaaatcaaacataacaaaggagcttacttctttaagaacctcttataaacaaaaggaaaaaactgtgagttacttggaggaacaagttaaacaatttagtgagcaaaaggacgtggctgaaaaatccacagaacagctgagaaaagatcatgctaaaatttctaacagattagacttattaaaaaaggaaaatgagacactgcataatgatatcgcaaagaattctaattcctacgaggagtatttgaaagaaaatggtaaattatcggaaagattgaatattttgcaagaaaaatacaataccttgcaaaatgtaaaaagtaattcgaatgaacacatagattctatcaaaagacaatgtgaggaactaaatgtcaagttgaaggaatctacaaaaaaaattttatctttagaagatgaactaaatgaatatgctaatattgttcaagacaaaaccagagaagctaacacattgagaaggttagtttcggacagtcagacagatgattcgagcaaacaaaaagagttggagaatagattggcctatttaacggatgaaaagaataaattggaagcagaattagacttacaaacatccagaaaggccactgaattacaagagtggaagcatacagtaactgagctgaaatcggaaatacacgctttaaagcttcgtgaagagggactaaaatcagaggttgacgcattgaaacatgttaacaatgacatcaaaaggaagactcaagccacttcagatgattccgatcagttggaacagatcacatctaatttaaaactctcattgtctaaggctgatgaaaagaattttgagctacagtctgccaatgagaaacttctgaatttaaataacgaacttaacaagaaatttgatcgattactaaaaaattatcgttcattgtcctctcaattgaatgctttaaaggaaagacaatacagtgacaagtcaggaagagttagtaggtctggttctatcggtactctagctaacgcgaatattgattcctcaccagcgaataactctaatccaactaaattagagaagatacgatcatcaagttcattggagttagactctgagaaaaatgaaaaaattgcatatataaaaaatgttttgttgggatttttggagcacaaggaacaacggaaccaattacttcctgtaatttctatgttgttacaactggacagtactgatgaaaaaagactggttatgtctctgaagtaa

SEQ ID NO: 80717 - DNA, 1257 bp, Saccharomyces pastorianus
atgttcaaacagctgtcacaaattggtaagaatcttaccgatgaattagcgaagggcttagccgatgatatgagccctaccccgtcagaacaacaaatcgaagatgataagagtggcttgccaaaagaaatacaagctaaattaagaaaatttgagaaatatgaacaaaaataccctttgctactctccgcatacaaaaatgaaaaattaaagtcagagaagttagaggctgttgaaaagattttagcggaaaatacacccatatctaatattgacgacgcagtggatacgttgccagcttttttccaggatttaaacaacaaaaataacctattgaatgatgagatcaagagattaactaagcagaactcggaaattccagaaagcgcctctagtgaaactctgaaggataaagaagaggaatttttgaaaaaagagcaaaattataaaaatgacatagacgatctaaaaaaaaaaatggaagctttaaacatagaattggatactgtacaaaaagaaaaaaatgatactgtttcaggtttgagagaaaaaatagttgcactggaaaatatactaaaggaagaaagggaggtcaaaaaacagaaagaagaagtatctatatccgaactgaaggaagaattggctataaagaaccattccctcgaggacagtcgaatgaagataacggaattggagcaaaatttgtcttcgaaaagtactataatggaggaaaagtcctcagagttggcagaactaaatattactttaaaagagaaagagcacaagctgagtgaattggaaaaaaaaatgaaggagttaccgaaggcgatatctcatcaaaatgtaggaaacaataacagaaggaaaaagaatagaaacaagggaaagaaaaataagggaggcataactacgggtgatatcagtgaagaggaaacggtcgataactcaatcaatactgaagaatatgataagcttaaagaaaatttgcaagaattacaagaaaaatataaagattgtgaagattggaagcaaaagtatgaagatatagaagcagaactaaaagatgctaaagaattggaaaactcacagctcgaaaaatcagcaaaggagctggaaacccttaacaccgagttgatcgataccaagaagtcattgaaagaaaaaaattcggagctagaggaggtgagagatatgctgaggactgtagggcatgagcttgtggacgcaaaagatgacattacagagtcttcgaagtaa

SEQ ID NO: 80718 - DNA, 762 bp, Saccharomyces pastorianus
atggaaaatagcatgatgtttatatcgcgttccttgcggagacccgttactgctttgaactgcaatttacaaagcgttagaacagtcatataccttcataagggtccgagaattaatggtttgagacgagatccagagtcgtacttgagaaatcctagcggggtactctttactgaagttaacgcaaaagagtgtcaagacaaagttagatccatactacaattgcccaagtacggaataaatttatcaaacgaactgattttgcagtgtttaacacataagtcgttcgcacacgggtcaaagccatacaacgaaaaactgaatctgctaggagcacagtttttgaaactacagacgtgcattcattcgttaaagaatggttcgccggccaagagttgcgagaacgggcaactttctttgcagttcagcaatctgggaacaaaattcgctaaggaattaacgtccaaaaacacagcatgcacattcgttaaattacataatctagaccctttcatattttggaagatgagagacccaataaaagatggccacataaatggtgaaaccacgatttttgctagtgtcttgaacgcatttattggtgcaattctgtcaacgaatggatctgaaaaagcagctaaatttatccaaggaagtttgctggataaagaagatcttcattccttggttaacattgctaatgaaaatgtagcatctgcaaaggcaaaaatatccgacaaggaaaataaagcatttctgtga

SEQ ID NO: 80719 - DNA, 204 bp, Saccharomyces pastorianus
atgtgctccatggccctgatccattctcgtgtgagacgagtggtcttccttacagagatgcagcgcaccgggagcttaaaattaacgagtggtgacgggtactgcatgaacgataacaaacagctaaactcaacatacgaagcctttcaatggatcggcgaggaatatcctgtggggcaggttgaccgggatgtctgctgctag

SEQ ID NO: 80720 - DNA, 198 bp, Saccharomyces pastorianus
atgcaacggcaggaaaacagtccaatggtgagcgtctttgttgacccatcaagaaagaaggacaaagtggtggcagaagatggcagaaactgcgaaaactcgctacccatcgaccacagtgtaatggtgggcatccgtgcggtaggcgaaagactcaggaggtgtagacgaagacgcaaactcttatctgtgtcttga

SEQ ID NO: 80721 - DNA, 123 bp, Saccharomyces pastorianus
atggttaagaaagttaataatccgctaaaaatcgattatcagaacgggataatagaaaatcggcttctgcaaattagaaatttcaaagatgtaaatacgcccaaactaagtatgtatctatga

SEQ ID NO: 80722 - DNA, 222 bp, Saccharomyces pastorianus
atgcctgcaggtctggtatctgtgttgagaatcgcagatgggttttgggagcatgacaaacttttgcagctaaggatgcttgatagtaatatgaacatacctaatcagattcctcatactactttgcaaagttcgctatctgcgattgtaataaagataatagaaagtaatataggaaaaattgaggcgtctgaacctttcaaaaccttcaagaatacgtaa

SEQ ID NO: 80723 - DNA, 3864 bp, Saccharomyces pastorianus
atggatgttgatgaaccgaatcctattgtgatatcagattctgaggccactgatgaggaaattagtatcatatacgaacccgaattcaatgaaaattatttatgggcagaggaaaacgtccaagaagcaagcagatcacagaaaattgtcactgagaggttgagcctggattccactgctggagaatcttgtactccttccgtagtaactgatacacaagttactacggggcttcggtggtctttgaggaagaggaaggctattcaaaagatgccatacagtttagaacgcataaagcataggcagttgctagagggctatgatatctctagttttgacagcatttcgaatcagttgaccttaccgaagaacgcttctacagtgattcactcaaatgatattttacttacaaagagaactggtaaacccttagatgagcagaaagatgttacaatcgactccattaaacccgaaaacagctcggttcaatctcaaagatatgatagtgatgaagaaataccaaagaaaaggcatcgtacttttaaagacctcgaccaggatatagtatttcaatcaggtgattctacggaagatgaacaagacttggctagtacaaatttacagaatactcaaaatgacgaagtaatatttagaggaagagtattgaatgtaaaaactggttaccgtggggtcctaccaagagttgcttgggaaaagtcgttgcaaaagcagcagtcttcaaaagtcacgaaaagaaaaactcaattattgaaccataagggtgtggctaagaggaaaatgaacagaagcgcccatatggaagatgaagaacagaacttattgaacgatcttattgcacctgatgacgaactggatatcgaggaaaacgctcctccagatatatacttaggaaatcttccagaggatcgtgaggctaacgaaaaggaattaaaggaattgcaagaatattatgagagcaagtatagtgaagacgcacaatcggctggaacttctggttttaatttaaatgaggaataccgcaatgaaccagtgtatgagctggaatatgacggaccggggagctgcatatcacatgtatcttataaagaccagcctattatttatttgaattcacggcattcagatagcggatttagtgagcaatacaatatatctgccgaagataatcaaagtgtaatttccctagatgctgctgaagagcataacgatggtataattgacaagatgttggttaaacctaaaagaattaaagcaaccaatgatgccaactttttgaatacaaaaagtaagagagtgagaagatataagtacaaatatcgaaattcttgtctggccccaagtacaaaagctatcaaagtcggaaaacggtcagcgcataaatctcatttggcagctaataatccagtttcatttgtttctaagaagaatcatgtaattgatgattatttttttgaagaattagaatctcaatccctagaacaggatgacagctcttctctcaagccacagaaaaaaagaaggaagaagaaagcccctatatactcaagtttctccgctgatcttgaatcgagacgaaaaccagttttcaatactgttgtagaggttcccacgaaccgatacgctttcacaaagccaaatgtacgtaatagggacagcattaatcatgacatggaatttgaggaagaagactccaatcaagagcttggaccaataatggtcgtacttgactcaattttactaaaaaaaccttttgagccacctaatttcttcaagatccagttgtcagacaagagtttcttgctatcaaaattgaatcctgcagatatagctacatcgttacagaaaatattcagagtaatcattgataaaggtatcactgatactgaactagttcactttaacgaaagccttattgcttttttggtgcaccttgacatgcctgaactattcgacttaataggtgaatttcatcgtgaatttagatcgaaggtcaatagcttgaggaaaaaagctaaaccaatccatttttttcaaattgcggcatgccaattaatgtttctagaaatatcaagatataacaaaatttcagccgctgcaaaattcgacatggatgtcaaactcttagatcatattgtctctttcttcaaattactttctgtctgttatgattctgttatgaaaaatccaatgcaatatctgtacacaagttattatattctctctgctgtcgttgatgtcatacataaaaaggaagctttgtgggatttatttcaaaagcaccccttttcgcctcatatttcactgttgctggtcaacatatttcctacgaaagtctgccgctggcaggttttgagattagattctgaattccaacccttgagttcggcatttcggttcatcaattattgcattgagacttgtaattggaatgttacaaattctttgattctttctctcgatcgcatattcaaacggagaagattttcggactttgaagaagagtctgatttgtcacaaaacaataagataatttatcctccaacgaatcagcttacgagtcgattaatgtttaacagatatttgcatctactgacgttgtgtgaattgtctagttctgatacacaacgtgtgataccgatgggtgatatttctatgaatgattctctatctgttttgaagaaccgcctcaacctactaattgttctagctacacgttttgatttaaacttagagaagcgcttccaagagctaacacgaccgttatatagtaaggaatatttaaacttgcatacacagaacacagtcaggacgataacaacattgatcatgcaggccagcctttcattcctggaaatcagtcgaatcaaaaatcatccattcagtggaaaatttattgcgtcattatttgataaactagtacttcaacaaccttccatatcgggagtaacagaaaattttttgaaagaattcacaaatttagtctccaaaatgaaaagaaaaagcgtgagtatgctcaaatttctgtatccttcactggtggccatgtctcaagaaaatatattcgagtcgtctttttttttattattacaggtatatttgaagagcttagatgttctgggtccaacttgggtgcaaaattatctctttcagtttataaagagcaaggctcaagaaaatgaaagatggatagaatgctattctcagatcggaaaattcctcgtagattctggtatatttacctggtggactttctttacctataacggcttagatgctgcattacactttcagcttgcatttcactcccttattatcgatttctgtgatacagactcttttgaattactgaaaaaaccgctttattccattgcttctgatttgctgctcatttccaaagatgacgctttctatcactttctttccaatctgttgaagagggcacatatcatagtagcagatttgaaacctgtttccgatgagaatgaactcctgcgatgggcttatattttttctaaagcattgaaaaaaaatgcatatcaagatctattagctgttttcttatccctggcgaaaaaacattacgatgaaggggacatcagtagaaatttcttggcaaaatatctcgaatttcttaacataaattgcttgactgagctaagaaataatcaactcttcatcagtctaagaagggaacgtggtatttcaagtgatgaagacgaaaaatgtgcgttctgggactcattcaatgaaggtgatatactttccaaagctgcatttgttgaaaccggtattgttcaagcctgttgcactgggaatgaaatgatgatatgcgtgacatgttaa

SEQ ID NO: 80724 - DNA, 531 bp, Saccharomyces pastorianus
atgtgtgaattggcctgcgaaagaacctcatcttggttgatggtggatgcatgggagtcattgcaaccttcatacacaagaactgccaaggtcttggatcatttcaatcacgaaatcaacattaagagaggtggtgtagctactgttactggagaaaaaattggtgtgaaaataatgttgctggctggtggtgacctaatagagtcaatgggtgaaccaaacgtttgggcggacgccgatttacatcacattctcggtaattacggttgtttgattgtcgaacgtactggttctgatgtaaggtcttttttgttatcccatgatattatgtatgaacatagaaggaatattcttatcatcaagcaactcatctataatgatatttcttccacgaaagttcgtctatttatcagacgcgccatgtctgtacaatatttgttacctaattcggtcatcaggtatatccaagaacatagactatatgtggaccaaaccgaacctgttaagcaagttcttggaaacaaagaatga

SEQ ID NO: 80725 - DNA, 228 bp, Saccharomyces pastorianus
atggtcttctccatgatttcaaggctccgattgaagtggcaacaaagttcgctcgctccgatatcctacgccctaacgagcaattcagtacttcttccaataatgcttaacatgattgcccaagacaaatcttcaacaacggcgtatcaaattctgtgtcgaagaagaggtcctccaattcagaattttcaaattttttctataccggctgtaacgtacaataagtag

SEQ ID NO: 80726 - DNA, 114 bp, Saccharomyces pastorianus
atgaacgatcgattagttacggaagagcaagagttgtttacaaaattgcgcgagattgtaggttcaagtattcgcttttggaggaacaactgttttatcaagttcaagatgtaa

SEQ ID NO: 80727 - DNA, 315 bp, Saccharomyces pastorianus
atgacattcaatgctgaaaccaaatcgtacgattcaagaggcgtaggcgaaatgaagcttttgaagaaaaaggacgatccttctaaagtgcgcctactttgtaggtctgacggtatgggtaatgtattactaaatgcaactgttgtagactccttcaaatatgagcctttagctcccggaaatgataatctcattaaagctcctactgttgcggctgatgggaaacttgtaacttatatcgtcaagtttaagcagaaggaagaaggccgctcatttacgaaagctattgaagatgctaaaaaagaaatgaaataa

SEQ ID NO: 80728 - DNA, 1131 bp, Saccharomyces pastorianus
atggccaaaagagttgccgatgcgcaaatacagagagaaacgtacgattctaacgagtctgacgatgacgtgactccctccactaaggttgcgtcatctgctgtgatgaatagaagaaaaattgccatgccaaagcgcaggatggcgttcaaaccttttggttctgcaaaatcggatgaaaccaagcaggctagttcctttagcttcctgaaccgggcggacggcactggagaagctcaggttgataatagccctaccacagaaagcaattccagactaaaagcattgaacctccagttcaaggctaaggttgatgacttagttctaggcaagccgttagcggacttgaggccccttttcaccaggtacgaattatacataaagaatatcttagaagctcccgtgaaatctatcgagaatccaacgcagacaaagggaaatgatgctaaacctgccaaagtagaagatgtccaaaaaagttccgattcttcatctgaagatgaggttaaggtggagggacccaagttcacaatagatgctaaaccgcctatttcagattccgttttctcatttggcccaaaaaaagaaaatcgcaagaaagatgaaagtgatagcgaaaacgatatagaaatcaagggccctgaatttaaattttctggaactgtatcaagtgatgtatttaagctgaatccaagcaccgataaaaatgaaaagaaaaccgagactaatgctaaaccattttcattttcttcggccacttcaactactgaacaaacgaagagtaaaaatcccctttcattgacagaagctaccaagaccaatgtggacaacaacagtaaagccgaggcttccttcacttttggaacaaaacatgctgcggattctcaaaataataaaccatcttttgtatttggtcaagcagctgcaaaaccatcgctagaaaagagctcattcacgtttggttcaacaacaattgaaaaaaaaaatgacgaaaactcaacctctaactcaaaacctgaaaagtctagtgatagcaatgattcaaacccatctttttccttttccatacccagtaagaatacacctgatgcatctaagccatcttttaattttggggtcccaaactcttcc

SEQ ID NO: 80729 - DNA, 2628 bp, Saccharomyces pastorianus
atggaaaggttttctatttcagaaggaaaaaagagaaaacgaggaaatggcaaacatttaagccgtaaagaaaagagaaagatggaacgggccgacaagaaacgtaaaattatatcaactagagaaatcaattccagccggctaaaatcagcaccaacgtccgaaaagaggagtgctaatgcaggtgtgaaaaacgtaggcaagcaggctaacggtaaaaatccgatttcttcagatgaatcagaaagtaatgaaaactgggatagtgacgaagtgcttactgatgaagtagcagaagaaagcggtgagcaggcaatgtctgcggaagaaacaatgaaaaaactagaatcattgaaacggaaagcaaagggtatacaaggagctgaaaactcgggagaaataaaaggtaactcatatgaaaagaaacatattcgtaacagagatacaaatgagaattttgtgagttatccgctggccccttcagacagatcagcgtttgaaagggacgagatggacatgcaatattacgcaaaaaagttgggcttgaaaggagaaaggaaggctatacatgcaaaagatgaatttgatgctattggtggacttcttgaaggtttggaatactttgaaaattatggcaaaagtgacgaagagtatggagattttgccacagaaactaattctatgagaaaagatgatgaagcaagcgagaaagcattttcctcggatgatgatctttcagcttctgattttgaagactcagatgggcttagtgaatctgataacgacagcgttgcggactcggatgataattatagaagagaaaaggaaaatccctatgtagctcccacacaatctgtagagagctatgttcccccatcactgagaaagaaattggatgatagtgaaaacaatagtactttgtctgaaattagcaagaaggtcaactcctctttgaataagctttcagactccaatattactattattatcactgatttaaacagattgtatgattccctgcctaggcagtacgttacagaatcgttaacgaaagggatattgaatattataagccaaaatcagaagttgttggacggatttataatgaattatgctgctcttgcgtatacattatcaaaactaagaggtattgaggtgggtgcttttttcattcaaaaaacggtagaggcatttctgcatcattacgaagaggaaatggaaaatatattaaaggatcagcagagcaaaatttcctctaaaatatgcatcaatattgcaaccttactatcgtattgttataattttggatttgtttcgtgtcgcttaatctatgacattattcgaatatttgtagcagatcctaatgaattcactactgagttacttttacgaattatatcgatttcaggacaactgatccggggtgatgatccatccgccctgagagatatacgatcagaactgttgaagaacgccaagaatttaaaagagcagagcccaagattgagatttttaatggataccatgtctgacttgaaaaacaacaggttaaagccttctattttggcgactgatcatcatccattaaagaaaaacttgcaaagcattttgaattcttcttcttcttgggagcctttacaggtttctctggaagacattaaaaacattgattccaaggggaaatggtggctggttggtgcttcttggcgaggaaacatggaaaatgcttttgaagtttcgatcaataatgaaaatgatgccagcaagtccaagaaatctaaaatttcaatcgaggatgatcttcttgatgatattccagattggaatattatcgccagacaacagcgtatgaatactgacattcgaagggctatatttataagtattatgtctgcacaagattacctggatgcatttagtaaacttgaaaagttaagcttgaaaaataagcaagttcttgaaattccaagaattgttttacattgtcttttggctgatagtggatccaatggttataatcattactacgcattggtcgcgaacaaaatatgtgaaaggtatagccatttatcgaagtcgtttcaattcctattctgggatgtgataaaaaaatttgaagacaaagaattcgattctgaaagcgatactgacgaagaagatgatttagatgataaagaaaaactgcttcgcatctcaaatcaggggagattttttggatcgttgcttgctaatgacattttgaaattagatgttttcaagcatgttccatttatgggtggattaaacacagaagggatgttatttatggagatattgctatttcagttatttttaactgtagctaaaaaaagtgagaagaaactcaagatggatgaaagtggaaataagcgtataatctactccgatgattatttgcgcgatgttttaacgaagaacgttaaatcggaaaatatgctattcattctcaaaggtttgaagtggtttattaacaagaaatttagataccataatttccttgcaggaaagaaaggagataaagcttttgatagggatgaaagaagattggcttgggcttcaaaagctgccaaatctattatagacaaagaactggaaaatatagattcgtag

SEQ ID NO: 80730 - DNA, 849 bp, Saccharomyces pastorianus
atgtcgtttctggatgaaattgaatccaaattacataagcaaacatcatcgaatgcttttaacgcaccacccccccatacggatgctatggcgcctcctttgcctcctagtgcacctcctcctcctataacatcgctaccgactccaactgcatcaggtgatgaccacaccaatgataagagtgagactgtgttagggatgaaaaaagcaaaggcccctgcactgcctggacacgttccacctccaccagttccaccagttttatcagatgatagcaagaataatgtccccgccgcttctttattacacgatgttcttccctcctcgaatctcgaaaaacctccttctcctcctgttgcagctgctccgctattgccaacatttagtgcaccaagtctgcctcagcaatccgtgtctacatcaataccatcacctcctcctgttgcgcctacactttccgttcgtaccgaaactgaatcaatttcgaagaaccccactaagtcgccacccccaccaccaagtccatctacgatggataccggtacctctaatagccccagtaaaaaccttaaacaacggttattttctacaggtggatcgacgctgcaacacaagcataatacgcatacaaatcaaccagatgttgatgtaggtaggtatacgatagggggatcgaattctatcgttggggccaaatctggaaatgaaagaattgttatagatgattcaagatttaaatggactaatgtgtcacaaatgcctaagccacgtccctttcaaaataaaacaaaactgtatccaagtggaaagggtagtagtgtgccattggacttaacattatttacgtga

SEQ ID NO: 80731 - DNA, 294 bp, Saccharomyces pastorianus
atgagctatgcgtcgactaacagagtaaaagcaaccccggttcccccaaatatagcaccaccgttaccaaatactacatcagttcctcctaacaaagcatcgtcaatggcccgggccaccacctcctcctcccccaccacctggtgctttttcaacatcctctgccttgtcagcatcatctattcctttagcaccaccaccacctcctcctcctccttcggttgcaacgtcagtaccatcggctcctcctcctcctccaacactcacgacaaacaaaccctcagcgtccagtaa

SEQ ID NO: 80732 - DNA, 1053 bp, Saccharomyces pastorianus
atgaagattacaaatctattccgattctttttcagcttcacgcataagatacataaccggaatacctttagacatcctgcaaacagtctaataaatacgtataataagtttgaaatgggaggcattcgtgaaaagaaagctgaatactttgctaaattaagagaatacttggaagaatacaagtctttgttcgttgttggtgttgacaatgtttcttcccaacaaatgcacgaagtcagaaaggaattgagaggcagagctgtcgtcttgatgggtaagaacaccatggttagaagagccatcagaggtttcttatccgacttgccagacttcgaaaagttgttgccttttgtcaaaggtaacgttggtttcgttttcactaacgaaccattgactgaaatcaagaacgttattgtctctaacagagttgctgctccagccagagctggtgccgttgctccagaagacatctgggttagagccgtcaacactggtatggaaccaggtaagacttctttcttccaagctttgggtgtcccaaccaagattgccagaggtaccattgaaattgtttctgatgtcaaggtcgttgacgccggtaacaaggtcggtcaatctgaagcttccttgttgaacttgttgaacatctctccattcactttcggtttgactgttgttcaagtttacgacaacggtcaagtgttcccatcttctatcttggatatcaccgatgaagaattggtttctcacttcgtttccgctgtcagcaccattgcttctatctctttggctattggttacccaaccttgccatctgtcggtcacactttgatcaacaactacaaggacttgttagctgttgccattgctgcttcctaccactaccctgaaattgaagatttggttgacagaattgaaaacccagaaaagtacgctgctgctgctccagctgctacctccgctgcttccggtgacgctgctccagctgaagaagctgctgctgaagaagaagaagaatctgatgacgacatgggtttcggtttattcgattaa

SEQ ID NO: 80733 - DNA, 990 bp, Saccharomyces pastorianus
atgctaaatactgcagatgaagacgtgatagaatttagttttgacgataatgtcccttatgctgagttattatctggtgccacccttgaaaaatgttcgttgactctaaatgaaataaacaaaaaactattcaatacgctctatgactttcgagtaagcaaagataatcccgaagaaaatttggtagaactaatacttccgaactgcgtggtgttattaaacttttttgaagacattgaactcttggccgactcttctgatgaggctttcgaaaaatctactttcattaacacaattgagttcattgtgcacgatatttgggtcgaaacgttgataaagaacataaacttattacaaatgtttgatgcagatttgaaatgttacaatgacaagtacataatttgcaagctaaagggtcagtatccctccacaaatatagtggacataatgagccgtttgaagcatttttccaattctattttggaaactttcaaattcggaatcgagctaaaagaacaagatcaatgccacaatagaaacactattatcaactacgttcttttcagtagagtattttcaacgattgttttagagattcaaaaatgctttatcttgatcgttaaattcatgtattctgtcaattttttagaaaaattttccgatgaagtatttttgtcatttattgaaattctcataaaaattgtctttgagcaccagattccgcagttatttttgggaattgatgaaattattcaactctggttaaagaacaatgaaggaaaacggcaacaactcttgagcgcttggtgcaacggaactgttcaagatatgaagcaaagccaacaaagagagtcctcaaacgcagaatctgaatcaatcacttcaagtacagaagaggacgaagaaggcctccaattcaataaatgggatgtgattgaaccatttattgataatatcaaggctttgaatcaatcaaaatcccatatgtga

SEQ ID NO: 80734 - DNA, 1191 bp, Saccharomyces pastorianus
  modified_base (190)..(232): a, c, g, t, unknown, or other
atggccgcgatagtaggaacggtcgcagaaggtatcgcgtcgcaatctcagttgagtgccaaggaaagggccctctccactgtacgtcgtagacatgtttgtataaaagggctgcaaggtgtggtctttggcaagcgattacgctgcaatgttgggggcaggaaacggtcgggcggtcggcttgtagtgnnnnnnnnnnnnnnnnnnnnnnnnnnnnnnnnnnnnnnnnnnngtgtagaggttcgttcctcttgctctgaaagtgttgaaaagataacgcaacagctggacggcatgtcaaccaacgcaaaagagtctgccggtaagaatatcaagtatccatggtggtacggaggtgcagcgggtatctttgctaccatggtgacacatcctcttgacttggccaaggtcagactgcaggcggctcctatgcccaagcccacactcttcaggatgttggagagtatcttggcgaatgaaggtttggtggggttatattccggcctgagcgctgctgtgttgaggcaatgtacatacacgacggtgagattcggtgcatacgacttgttgaaagagaatgtgatcccacgcgagcaattgactaacatggcgtatcttttaccttgctccatgttcagtggtgccattggggggcttgcagggaattttgcagatgttgtaaatatcagaatgcaaaacgactctgctttggaggcagcgaagaggagaaactacaaaaacgctatcgatggtgtgtacaagatatatcgctacgagggtggactgaaaaccttgtttaccggttggaagcctaacatggttaggggcatactgatgacggcaagtcaggtcgttacgtatgacgtgtttaagaactacttggtcacaaaattagatttcgacgcatccaagaactatacacacttgacagcgtccctgttggctggcctggtggccaccactgtgtgctctccagcagacgtcatgaagacacgtatcatgaacggcagcggagaccatcaaccggctttgaagatccttgccgacgctgtccgcaaagagggcccatctttcatgttccgggggtggttgccaagtttcactagactgggtccattcacaatgttaattttctttgcaattgagcaattgaaaaaacatagggttggcatgccaaaggaagacaagtag

SEQ ID NO: 80735 - DNA, 594 bp, Saccharomyces pastorianus
atgtggtctaacctgaaaccattcccttctcaaagcaacaaaatatccactccagtgaccgaccataggagaagacggtcatccagcgtaatatcacatgtggaacaggaaacctttgaagacgaaaatgaccagcagatgcttcccaacatgaacgctacgtgggtcgaccagcgaggcgcgtggttgattcatatcgtcgtaatagtactcttgaggctcttctactccttgttcgggtcgacgcccaaatggacgtggactttaacaaacatgacctacatcatcggattctatatcatgttccaccttgtcaaaggtacgcccttcgactttaacggtggtgcgtacgacaacctgaccatgtgggagcagattaacgatgagactttgtacacacccactagaaaatttctgctcattgtacccattgtgttgttcctgattagcaaccagtactaccgcaacgacatgacactattcctctccaacctcgccgtgacggtgcttattggtgtcgttcctaagctgggaattacgcatagactaagaatatccatccctggtattacgggccgtgctcaaattagttag

SEQ ID NO: 80736 - DNA, 1719 bp, Saccharomyces pastorianus
atgattgctaatccaattagtcttcaagacataaataaaaaggtaaagactcgtcgttataaaacgttccaggagttccagaatgattttaatcttatgttaaccaactttagaatttcgcacagaggtgatcctgaaagcataaaaatttcaaatatcttagaaaagacctttactagtctggcaagattcgaactatccaaacctgatagaagtttcattccagaaggcgagctaagataccctctagatgaagtcattgtaaataatatatcataccacgtgggagattgggcacttcttcgaaatcaaaatgatcctcaaaaacctatagtgggccaaatattcaggctatggaagacaccagatgggaaacaatggttaaacgcttgttggtattacagacccgaacaaactgtgcatagagtggatagattgttttacaaaaacgaagttatgaaaacaggtcagtaccgtgatcatttagtgtcaaacttagttgggaaatgctatgtgattcactttactagatatcaacgtggtaatcccgatatgaaattggagggtcccttgttcgtttgcgaattccgttataatgaatccgataaaatttttaacaagattagaacctggaaggcttgcttaccagaggaaattcgtgatttggacgaagctaccattccggtaaatggtagaaagttcttcaaatatccttcccccataagacatctactaccagctaatgcaacgccgcatgatcgcgttcctgaaccaacgatgggatccccggacgcgccaccattggtcggtgccgtttatatgagacctaaaatgcagcgtgacgatttgggggaatatgcaacctctgatgactgtcccaggtatattatcagacccaacgattctcccgaagagggacaagtggatatagaaacaggtacgatcaccacaaacacgccaacagcaaatgctcttcctaaaacaggatactcaagtagtaaactatccagtttaagatataacaggtcatctatgtctttagaaaaccaaaatgctattggccagcaacaaataccactgtcaagagttggttcccctggcgcgggaggcccgcttactgtacaaggtttaaagcaacaccaattgcaaaggttacaacagcagcaacatcaataccaacaacagaaaagatcccaagcatcacgttataatatcccaacaataatcgatgatttaacatcgcaggcatcaagaggtaatttgggtaatataatgatcgatgcagcctcctcgtttgtcttacctatctctataaccaaaaacgtagatgttttgcagcgtactgatctgcacagccaaaccaagagatctggaagagaagagatgtttccatggaaaaaaacaaagggtgaaatattatggttcagaggacctagtgtgatagtaaatgaacgaataataaattcaggtgacccacacctaagcctgccactgaataggtggtttaccactaacaagaaaagaaaactagaatacgaagaagttgaagaaaccatggaagatgtgactggaaaggacaaagatgatgatggcttagaaccggatgttgaaaatgagaaagagtccttgccaggcccatttgtccttggattaagaccctcggctaagttcacggcgcacagactctctatgctgcggcctccttcgtcgtcttcatga

SEQ ID NO: 80737 - DNA, 639 bp, Saccharomyces pastorianus
atgaacgatgttgtccagattccatggaatgccaagacttacaatacaagagattcaggaatttataaatacgccttagtccttgagaaatatttaaaggacacaatctatccaaatttaaaagaaaaatatcctcaattagtgtatcctgatttgggtcctctacccgatgaaccaggttatgaagagtttcaacagaaattaagagaaaaagctgaggaagtagcgagagctaatgcagccagagccgagtcgagctcttcaatgaatccaacagaagcagccagaagattaagaaagactcgtacttccgtcaaaagagaatcagaaccaggaaccgatacaaataatgatgaggactatgaggcgacggatatggatatcgataaccctaaggatgctgattttcctgatttgattaagaaagccactgtatcaatactaatccatatactcgggaaaccattaagagacaacaggtccactactccatgtcactcaggcacccctcagccgttaggcccaaggcatagacagctatccagaactcaggtaaagcgtgggagacccccaatcatcgacttaccgtatattcaaagaatgaagaatgttatgaaagtactaaataagaggtgctag

SEQ ID NO: 80738 - DNA, 312 bp, Saccharomyces pastorianus
atgatgcctgatgacaattcaaactcgtccactcaaaactcaagcgcattatacaaggacctgaggaaagaatatgaatctcttttcactttaaaggaagattctgggttagagatttcaccaatattcaatgtccttccacctaaaaaggattatccggactactacgcagtgatcaagaaccctgtatctttcaatactgtaataaagcgtattccgacattatacagatgctcaacagtttatgaacgatgttgtccagattccatggaatgccaagacttacaatacaagagattcaggaatttataa

SEQ ID NO: 80739 - DNA, 825 bp, Saccharomyces pastorianus
atgggtgatagatctattcaagactctgaaaccgtattattaaaggcggtagcacccgtcattgcaagaaaaattccgtgggcaatggtatggggaaatcacgacgacgagggaagcttaacgcgctggcagttatccgaaatagcttcagtactaccatattcccttttcaagtttagtccccatgatacacacgataatacgtttggcgttggtaattatatttatcagattttttcgaacaatgatacagaagtcccagtaggtacactttattttctggactcacataaatattctacggttggtaaaatttatcctggatatgattggattaaggaatcacagtggaaatacattgaagattatcatgatgtgaacttgaagttcaaaacaggtctttcaatggcattttttcacatcccactgccagaatacttgaatattgaatccaagacacatcccggagagaaaaatcccctcattggaatgtacaaagaaggtgttactgcacctaagtataattctgaggggataacaactttggataggttaagtgtggatgtcgtcagttgcggacatgaccattgtaacgattactgtcttcgagatgactctacgccgaacaaaatctggctatgctatggcggtggaggtggagaaggtggttatgctggctatggaggtacagaaagacgtatccgtatttatgaaattaatgtaaatgagaacaatatacacacatggaaaagattaaatggcagtccaaaagagatttttgattttcagtctatgttggacggtaattctccagaatctgtttaa

SEQ ID NO: 80740 - DNA, 2217 bp, Saccharomyces pastorianus
atgcataaagagagaccacttaataaagctagtatgataagatcaccggtagacgaaatatacatggaacagacacaaacagcagagggcactgacttactaattggtgacgaaaagaccaacgatttaccttttgtgcagttatttctggaggaaataggatgcactcaatacctggatagctttattcagtgcaaccttgtcacagaagaagaaattaagtatctcgacaaggatatcctcattgctttgggtgtaaacaaaataggagacagactcaaaattttaaggaagtcaaaatcgttccagagagataaacggattgaacaggtgaatagattgaaaaacctgatggaaaaagtaagctctctatccactgctacgctatcgatgaattcagaattgattcctgaaaagcactgtgttatatttatcttaaacgatggttccgctaagaaagttaatgtaaatggttgctttaatgcagattctattaagaaaaggctaatcagaagattgccacatgaattattagccacaaactccaatggagaagtaactaaaatggtccaagattatgatgtgtttgtcttagattataccaagaacgtactgcatttgctatatgacgtggaattagtcactatttgccacgcaaatgatcgtgttgagaaaaataggctaatttttgtttccaaagaccaaacaccaagtgataaagctatatccacatccaaaaaactatatctaagaacgttgagtgcattgagccaggttgggccatcctcgtcaaatttgttggcacagaacaaggggatttcgcataacaatgctgaagggaaactccggatcgacaacacagaaaaggacagaattagacagatttttaatcagaggcctcctagcgaatttatttctaccaatttggccggatattttcctcatacagacatgaagcggttgcaaaagacgatgagagagtcatttcgccattcagcaaggctaagcattgctcaaagaagacctttaagtgcagaatcaaataatatcggtgacatactattgaaacactcaaacgctgttgatatggccctattacaaggattagatcagacaagattaagcagtaaacttgacacaactaaaattccgaagcttgcccataaaaggccagaagataatgatgccatatctaaccagttagaactattaagtgtagagtctggtgaagaagaagatcacgatttctttggggaggacagtgacattgtttcattaccgacgaaaattgccacgcccaagaattggttaaaaggtgcttgcattggatcaggcagttttgggagtgtttacttgggcatgaatgctcacactggtgaactaatggcagtaaagcaagtggagataaaaaataataacattggtgttcccacagacaacaataaacaagccaattctgatgagaataatgagcaggaggaacaacaagagaaaatagaagatgttggggcggtaagtcatccaaaaaccaatcaaaatattcacagaaagatggttgatgctttacagcatgaaatgaatttattgaaggagttacatcatgagaacattgttacttattatggtgcttctcaagaaggcggaaatttaaatatttttcttgaatacgttcctgggggttcggtttcctccatgctgaataattacggaccatttgaggaatcactgattactaatttcactaggcaaatactgattggggttgcgtatttgcataagaagaacattattcacagagatatcaagggtgcaaatattttgattgatatcaaaggttgcgtaaaaattactgattttggtatttcaaaaaaattatcacctttgaataaaaaacaaaataagagagcttctttgcaaggttccgtattctggatgtcaccagaggtggtcaaacagaccgctactactgctaaagcggatatatggtctacaggatgtgttgtcattgaaatgtttaccggtaagcatcctttcccagatttttctcaaatgcaagcgatcttcaaaataggcacaaacacgacccccgagataccttcctgggctacgtcagaaggaaagaatttcttaagaaaggcatttgagttggattatcaatacaggcctagtgcccttgaattgctgcagcatccatggctggatgcacacataatttga

SEQ ID NO: 80741 - DNA, 1242 bp, Saccharomyces pastorianus
atggcctcaagggatgctgaaatgatatatttaagattatctgccattgatacgtcttttgatgacttactagatgctagagaattcatattaaatggaatatgttccgatctactacaaaagtataaaaaaattgaagagtttttgaaattacgaccggtgactagggtttccaagttaatctcaatcagtactgactatctggactgcttcacacaacctcatgattcagtgggtcaaacaaatgatagggccacaggaagggagctacatagagaggatttcatgttactaagagtatattcccgagaaggacgaggttataaaactattattctagcaataatacaggctatcactaagagatataacgttgattcatatcttgctcgagatcatttggtggtgtctgaaccagactttccagatggacgggcatttgttaccgtaaatgaggatttccagccatacatttttgataaagaggaccttttgagcgtttggtcgaacaacttccataacgcagaaaattttgaaagtacagttttaccagcattattagaaccaatatcgatacaacatcttctgacggagttctttcgagaactgctgcgatgcaagcccaggccatttgagggatatccaaacagagcacacggattacgcgatatgtttccatacggaaaagtggaagttcccagagatgtgacgatgtattttgcatttatatacgatcttttcgatggcatgtttgaatctggaatgacaagtttacggggccaaatgttgagagatttactgaactacgttaacgctaataattttggtgatttgaatatcatcattggacaaaatgctcttaaggaaccaaatgactgctggtccaacaagagggattacgttcttcttgatgacaataataagattggatatttctatacggatattgaaactgaggatactttatgtgccttaaaccaatatgaagtggacggcaaagtttttataacaacaatagatatcttgggtgatataagagtacgcctggctgaaggactaacgccttttcagggagataatgataagttgtgggagagcttttcttccgttattccacgaactgactggggactttttttcaaaggctatgacaaagaaaggcgtagaatgcaattaaacccttacatagaggaaaagctttccaatctagcgaatgatgaacaacctttacataatttatag

SEQ ID NO: 80742 - DNA, 243 bp, Saccharomyces pastorianus
atgataagtgatactgagaatttatttaaaagatatgaaaaactgatttctagcgaaaaagagtattctaatatcgtagaggacatcaaagctctgagacaagctataaagaattttaaggctaacgaaaatgacatgtcaattgatgtaaacggaataaaaaaagctacggatgcgctacagggtagggcattaaaattattccaaagcgcaacaaaaaaccagcagaatcaaggtaaataa

SEQ ID NO: 80743 - DNA, 375 bp, Saccharomyces pastorianus
atgcttaaatctggtagactcaactttctcaagttgaatatcaattcacgattactatactcaacgatccctcaactggctaagaaggtcattggtatcgacctgggtaccacgaatagtgctgttgcatatatccgtgattctaacgacaaaaaatcagctacaatcatagaaaatgatgaaggacaacgaaccacaccatctatagttgcctttgatgtcaaaagctcgccacagaataaagatcaaatgaaaactcttgtagggatggcagctaaaaggcaaaatgctattaattctgaaaacactttctttgctacaaagagacttattggccgtgcattcacgacaaggaagttcagggggatcctctag

SEQ ID NO: 80744 - DNA, 1065 bp, Saccharomyces pastorianus
atggctgttatgccatataagattgtcaaatgtgagtcaaatgggcaggcctatctcagcacgtctaatggtctcattcaatcaccaagccagatagcatctatattactgaaatacctgaaacaaacttcagaagaatacttaggcgaaaaggttaatttggcagttattacagttccagcatattttaatgattctcaaaggcaagccacaaaagatgccggcaagttagctggcctaaatgttttgagagttattaacgaaccaactgcggccgccttaagctttggaattgatgataagaggaataatggattaattgcagtttacgatttgggtggtggtacatttgacatatccatcttggacattgaagatggcgtgtttgaggttcgtgctactaatggtgacacgcatttaggtggagaagattttgacaacgtcattgtaaactatattatagataccttcattcatgaaaaccctgaaattacacgggaagaaattacgaagaacagggagacaatgcaaaggttaaaagatgtttctgaaagagctaagatagatttatcccatgtgaagaaaacttttatcgaacttccatttgtatacaaaagcaaacatctacgagtgccaatgacagaggaagagctggataatatgactttgtcattaatcaacaggactatcccacctgtgaagcaagcattgaaagatgccgatatcgaaccggaggatatagatgaagtaatccttgttggtggtatgacccgtatgccaaagattagatctgttgtaaaagatctttttggtaagtctccaaattctagtgttaacccagatgaaacagttgctttaggagcagctattcaaggtggtattctatccggtgaaataaagaatgtcttacttttggatgtgacaccattgacattagggattgaaacatttggaggagcgttctcacccttgatacctagaaatacgacagttccagtaaaaaaaacagagatatttagtactggtgttgatgggcaaacgggtgttgatatcaaagttttttag

SEQ ID NO: 80745 - DNA, 375 bp, Saccharomyces pastorianus
atgaacaactatataagacaaagggagaatagtaacttttgtgattccaattctgatatctcgcaaaggtccgttagccaaagtaaactacatttccaggaactaattaatcattttaaggccgtttcagaagaagatgaatattcatcagatatgataaggcttgaccatggtgctaacaataaatcacttctgcttggaagttttttggacggtattgacgaagataaacaagaaattgtcacaccaatctcgcccatgaatgaagctattaacgaggagatggaatctcccaacgatagtagttctgtcatattaaaagatagtggcagtctgccattcaaccgcaatgtatccgataaattaaaaaaataa

SEQ ID NO: 80746 - DNA, 1185 bp, Saccharomyces pastorianus
atgtctgaaaaacatacggcaaagacagtagcgtttgtgacaagaagtaatgcccgactcccacctacgttcaatagtcattggcaagaatttaataaaatcgataatctggatttgtatttttactcttttggaaaagttatatatatggtgcaagttcaaatagagctagggaaatcttcatcttggtttaagccattccataaactgataagggaaatcgagacgttcgaatttatacctgagccaaaagatcttattatagaacctgatgaagatgacaatgaagaacttaatgccttcagtaacaatagtagaggaaatagtatggtcaccaacaatgaatttttcaatagttcaaatttaaaggtgccatcaaaggacgtcaaagtcgttaatggagtcggatatataaaaagtgacaggaacttttctcaagctaattctatattgatagaaaacggcgacattagatcgagaccggtatcatcagtcacatcaacaagacaatctactcgcctagtaaatggtatgaaagttttcccatctacttataaaatggggttgcctgatggggaaagcaatatgagaatagaggttagaagtcgagatttgaagcaaatatacaggaaagactacttgtttaggtctggcagcctaaattttgacaaggtctatgtagtcatggaggggaatatagcaagtttgagcaaaatgcaaattaccccacttaaactacaactgaacttgctagagactacaacatatttatctcagggaatagcgaacggcaattactcttctttgaagctaatcgagattgatttgaatcagctcaaatccaataaacctcttttggacttaaacgaaatacgagaaaattttgatggttctatgtttgaatgtgaattacggttaaaggatcaccccattttaagaaagttggtatttaatgaagaagactatagacatcgcggcaataggttgtatagtttcaagacatgcacgataaaaagaatattcagtttacagctactgatagaatggggaatcaatggaattaggaagcaatctgaagtaaacattgatcctgttcagatcttttgtcaagttagagagcacgttgaagctgaagctctgcccagatatgtaccgccaccgacatatactgaaatggcgagttaa

SEQ ID NO: 80747 - DNA, 1326 bp, Saccharomyces pastorianus
atgccggattctatttttgaacagccctttgtttactgtggtgtttgccacagaagaacatcgcatggagatccattgaggctgacctcatgtgctcatatcctctgttcgcagcattctccattaacatcaaaggtgtgtcctatatgccgttcgagcgatatctccatcattaaccttgtggaatctaaacagctgcctaccgacattaggattttttttgagccactgcccccacttttggagtcgttatataatgtttcccaattccaactgaatgggctttcgaaacagtgtcaatactatcaaaatcattgtttaaagttgagagaaaaatgtgcaagacaacagcagctgctatatcaggccaaaatagagttggattctatggcgattcttaagaaaagaatacaggaattagagtcagttttgaatcataacaatgtttcttcgatgtcagttggtgtgctaccaacaagaaatagccatcaaaatcattaccagccccctccaaccgttgatctgacagttgatgataatagtttagaagaattcgaagccaaatcctttattaaaaagttgaaaaaaaactcttctttgagaaattcttcaaaaaataacaatggaactgtcactccctctacaagtggtcgtgtaaataaaaaccagcctctctttatggagacattgaataatcctaatagaaatagcattcctcctcctggaatgaacccaaacgcaaatagtaatctacctaatatttcgactattgcagaatcaaccaatctgaacagattttcgttctctcctgtgcgtgttgcaaaaggcttcgatggaaagttgccaaatcttgacatcctcacgaataatggctctgtatcttccaaaaatatatcaagattatcttcagcttctctccaaccctcttcgcctctatcttcatcatcaaataggcttattttaccaaatagtaacctcaaagaattgcatcattcaaatacacctttaacaagtacctcgacgcagtttccctcagctttagaaaaattaaaaataacaaggaagagaaataatactatcagcggttcgaatagaataacacacaacttgagctcacacgtaagaagcagtggtcttgccttttcatcttcatcgaactcattgcaacaaagtaaactgccgaaatcaaatatactaaagcggtccaattcaactcagcaactgactaatacacatttgaagagtgataatcatcagccacctcgctcaagtaatactgtgttgggtagtagcaagaaaaacaataagtttagaaggattaggtaa

SEQ ID NO: 80748 - DNA, 312 bp, Saccharomyces pastorianus
atgctttgtgttttcaatacgcatcagattccattaactcaggatgaagctgagtttttggacagaaaaaggtttgccatgatgaatgtggtgtatgagtgggcccgtggtttatcattcaaagaaatcatggaaatgagccccgaggctgaaggtactgtagtcagagttatcacttggctagacgaaatttgccgcgaagttaagactgcctctattattattggtaattccacattacatatgaagatgagcagggctcaagagttgattaagagagatattgttttcgccgcaagtttgtatttatag

SEQ ID NO: 80749 - DNA, 636 bp, Saccharomyces pastorianus
atgccaaagaaactttacaacctggaacatgaaaaacaaatcaaagtattacaagaggaattacaaaccatagagtacaaaagttgtgaaatctgtgataatgatatcgaaaagtttttggaattgatgctggcatataaggaggcaacagtcaacctaatgcaagaaatggttaaatcgccttcgatattgcatatcttgaaagagggcagactcgttgcttttagggaccccaatgattgcttgaaattaggatttgtatttaaagtttctctgaaggatgctgtttgtgtcattatgacgttcacaaaaccatacaaactcccaaatggtgagccaaatcatttaatatactttccaaaagcggatggatacagaagaaggaacttccctaaattccagaagactgatttttatatggaagaagttcctgtgacggctattgaagtgatcactaaacgcaagtttgccgcacccttgggaaaagtgattaaaaaggatgttgccgctttgaacgagtttaacgctgaaacaaataacattttggacggcaaaacgctaaaagaagcaattaacattgaaaagcaaggtttaaaaattcaccaaatattgttaccgtacaaatataagggatga

SEQ ID NO: 80750 - DNA, 612 bp, Saccharomyces pastorianus
atggttgttttcgtatttagtaaaaagaggtgcgaggaatatgctgactggttggagggaattaacttctgcaacaataaggaaaaatcacaaatccacatgtttattgagaagtcgattactcgtttgaaaaaagaggatagagatttgcctcaaattcttaaaaccagatcattacttgaacgtggtatagctgttcatcatggggggctattgcccattgtcaaggagttgatcgaaatattattttccaagggttttatcaaagttttatttgcaacagaaacttttgccatgggtttgaaccttcccacaagaacagttatctttagcagcatccgtaaacatgatggtaatggattaagagaactgactccaggtgagtttacccaaatggctggtagagctggtagaaggggcttggattccactggtacagtcattgtgatggcatataatagtcctttatctattgctacgttcaaagaagtaacgatgggtgttccgacgaggttgcagtctcagtttagattaacatacaatatgatattaaatcttttaagaattgaggcgttgagagttgaagaaatgatcaagtattcttttagttga

SEQ ID NO: 80751 - DNA, 1863 bp, Saccharomyces pastorianus
atgtctgagggattcagtagcagttccatacaggaattatatcaatcgttaaaagaaatcactaacaacgcagacgtagagcttttcgaagatcgcattactaaattagattttgagagcaccgatgaaccaaagcatgcaaatgatatcataaaggatagatttttgagaccttctaatgctcttccttggagcttgttggacatggtccaagacgttccacatacgtcttctccagaagattgctctggtaaactagattacaaggaattgctgaaagtcccggacccaattaatagaacatcataccagtttaaaagaactgggttagaaggtaaaatttcaggctacaaagaagaggttggtttgaaggaagttgcaaatgccaatgcatcaaattcactgtcgattacgagaagtatcaaccataaccaaaactcagtaaggggttctacagcgcaattgcctttcacaccaggcggaattcccatgaaatctgtcaagacaggttcagaacaaaatggatcttctacaatggccaacgctactaaattgttacacaaggatggtcaaggtttattcgatattccagagggtatgaatagaggcattaagccgatggattctccagctgaaaatgaggatcaaaacggacagttcaaagaattgaaacagctaaatgagatagataatgaattagacataaggattgaggcgaacgaggcaaagttaaaagaggaggaaaaatctgccaagtcaatttctgaagaaattatggaggaagccactgaagaaacgactgccgataatgctgatgatgccgaaatcgatgaactattaccaattggaatagactttggcagaactaaaccagtttcgaaaagtgttcctgttaaaaaggaatgggcccatgttgttgatttgaaccataagatcgaaaatttcgatgagttgattccaaaccccgctagatcgtggccttttgaattggatacatttcaaaaggaagccgtctatcatctcgaacaaggtgattccgtatttgttgccgcccacacatctgctggtaaaactgttgttgcagaatacgcaattgccatggcacatagaaacatgactaaaactatatatacatcacccattaaagccttatccaatcaaaaattccgagactttaaagaaacttttgacgatgttaatattgggttgattactggtgatgtgcaaattaatccggatgctaactgtttgattatgacgaccgaaattttaagatcaatgctttatagaggtgccgatttgatcagagatgtagagtttgtcattttcgatgaagttcactacgttaatgatcaagaccgtggtgttgtctgggaagaagttattattatgcttccacagcatgtcaagtttatcttattatctgccaccgttcctaacacttatgagtttgctaattggattggaagaactaagcaaaaaaatatttatgtcatttccacaccaaaaagacccgttccattggaaataaatatatgggctaaaaaggaactgataccggttattaatcaaaattcagaatttttagaagctaatttcaggaaacataaagagattctaaatggggagagtgcaaaaggggctccttcaaaaactgacaacgggagaggtggatccacagcaagagggggccgtggtggatccaatactcgaggtggaagaggaggccgtggtaattcaacacgtggaggtgccaaccgtggaggttcaagaggtgctggcgcaattggctccaacagcgtaagttttacactcaagatggtccttcgaaaaaaacatggcccgaaattgtcaattacctaa

SEQ ID NO: 80752 - DNA, 1689 bp, Saccharomyces pastorianus
atggaggttccaaaggaacctgcccctgctcctcctccagagcccgatatgaataatctccctcagaatccaataccaaagcaccagcagaaacatgcattgcttgcgattaaagctgtcaaacgcttgaaggatgcgagaccctttctacaacctgttgacccagtgaaattggatattcccttttactttaactacataaagaggccaatggacttgtctactatagagaggaagttgaacgtaggcgcttatgaagttccggagcaaatcacggaggatttcaatctcatggttaacaacagtattaaattcaacggtccaaatgcgggcatatcacaaatggcaagaaacatacaagcttctttcgagaaacatatgctaaatatgcctgctaaggatgctccacctgtaatagccaagggacggcggtctagtgcccaagaggatgccccaattgtaattagacgagcccaaactcataatgggaggccgaaaaggactatacatccgccgaaatcaaaggatatttatccttatgaatcgaagaaaccgaaatccaaaagactacaacaagcaatgaaattttgtcagagtgtgctaaaggaattgatggccaagaagcacgcctcttataactacccatttttggaaccagtagacccagtttctatgaatttgccgacttatttcgattatgttaaagagccaatggatttaggcacaatcgccaagaaattaaatgactggcagtatcaaacaatggaggattttgagagagacgtgaggttggtctttaaaaactgctacacgttcaatccggatggcacgatcgttaatatgatgggtcatcgtctagaggaagttttcaattccaaatgggcggataggcctaatttggatgactacgattccgatgaagattcgaggacccaaggcgactacgacgattatgaatctgagtattcagagtctgacatcgatgaaactataattacaaatccagccatccagtatttggaagaacaacttgctcggatgaaagtggagttgcaacaattaaaaaagcaagaactggaaaaaataagaaaagagaggcgcttagcacgtggatcaaagaaacgcggcaaaagatcgaagggaaggagtgggtctaagaacgcttcttcgaaaggaaggcgagataaaaagaataaattgaaaacagtagtgacatatgatatgaaacgtatcattacagagaggatcaatgatttaccaacttccaaattagaaagagcaatcgacataataaaaaaatccatgcccaatatttctgaagacgatgaagtagaacttgacctcgacactttagataatcacaccatcttaacattgtacaacactttctttagacaatatgaaagctcatccggtgcttctaacggtttggacggtacttcaggtgttacgcgagatgcttcgtccttgtcgcctacaagtgcgggaagcagaaagagaagatctaaggcattaagccaagaggagcagagtaggcagatagaaaagataaaaaataaactagctatcttagacagtgcttcacctctgagccaaaacggctccccaggccaaattcaaagcgctgcacacaacgggttttcctcatcttcagatgacgatgttagcagcgaaagtgaagaagagtga

SEQ ID NO: 80753 - DNA, 351 bp, Saccharomyces pastorianus
atgaccgatatcacacccgtacagaacgatgtggatgtcaatggtaataatgtcaatgacgacgtttccagtaatctaaagaggcctatagatcaaggggatccttcgaatggactcgcagaagaagaaaaccccgccaataaccagttgcatctcaaaaaggctagactggatggagatgctctaacatcagcgcctgctggacttgcagagaacggtattgaaggcgccaccctggcggctaacggggaaaatgggtataacgccaccggaagtggcgcagaagacgaacagcaggggttgaagaaggaagaaggaggacaagggtaccaaacaagaggatttagatga

SEQ ID NO: 80754 - DNA, 1275 bp, Saccharomyces pastorianus
atgacctgcagaataacatggccgctcatactcataatgcaggtcataagactaatactatgcaggctcatgagcagcaatgcaactaaaaacaccgccattaataatatgcatgccaatcttcagagcaacatggattccaactccacaatacgacaatctcagcatcctcaccatcagcagaatataatacaacaacagttgcaatcgaattctgtaaatcatacatcaggggctgtacccacaccgagtgtaatgggttcagcaactgcgtcgtctacaactgcaaatccaaatgtgatatctataacgggtgcccccaactcgggcttatctatggctaatcactctcaacaactacatctgaatggtaatctagtcgatgccgtttcaacgaatgatgtgtttttaagaacgagcaattctccatcaagacacgttccgcacaataaacaaattaacagtaacagtaatagtggtatcaatatcaacaataatacctcacacaattctaatattaacatgggtagtaaaaacgccatggtgaatcgtccacatacttttaataactattccttgaacaaaacgtccaggaatcctattcaacatcaatcaagaaaaattgatcctcatcaaaccgatttatcacctctggtacttgtccaagatatagatttaagttttatggatgatgatattttgggccctagtaaccacaattccatgaactctgtcgtaaatccaactacaggttctcacaactacaatacttttcattcttccgtacacgcaaaatcttctcaaaacatggtcgaggatcaagacattgatgacattgatgatgacgatgatgttgatgatgacgatgacgatgacgatgacgatgacacagaaaatggctccagttccaatggaaaatcagttcataacaacaattacaagatgcctcagcaagcttatatagacgatcctgcgagaaggctctatgtaatggatcatgaggaacaaaaaccctttaagtgtccagttattggttgtgaaaagacttataaaaaccaaaacggtttgaagtaccatagattgcacggacatcagaatcaaaaattacacgaaaaccctgacggtacatttagcgtaatagatccagattcgaccgattcttttggtgatggaatgggctctgcaaaggataaaccataccgttgtgaagtttgtggtaagagatataagaacttgaacggtttaaaatatcacaggggccactccactcactaa

SEQ ID NO: 80755 - DNA, 168 bp, Saccharomyces pastorianus
atgtcaccaataccgatgaactctgctggtgacactagttcatcagttcgtatgacttataatacctcttctgccaactatgacctgcagaataacatggccgctcatactcataatgcaggtcataagactaatactatgcaggctcatgagcagcaatgcaactaa

SEQ ID NO: 80756 - DNA, 570 bp, Saccharomyces pastorianus
atgcgtgacaacatggaatacaagctcgatctaaacctacagctttattgccagagcaaaactgaccatttaaatttagacaatttgttaattgatgtttacagaggtccaggcccgctattgggtgctcctggaggaagtaacagcaaagatgaaaaaatctttcacacttctagacctattgtctgcctcgcactgacggattccatgtcgcctcaggagatcgaacaactaggcccatcacgtctagacgtttacgatgaagaatggctaaatacaataagaatagaggacaaaatatcgttagagtcttcatatgaaacaatctcggtgttcttgaaaacggagattgcccaaagaaatctaataatacatccagaaagtgggattaagtttaggatgaattttgagcagggattaagaaacttgatgcttcgaaaaagatttttatcttatattattggcatttcaattttccattgcataatatgtgtacttttttttatcacaggttgcactgcattcatttttgttagaaagggtcaggaaaaatccaagaaacatagctga

SEQ ID NO: 80757 - DNA, 237 bp, Saccharomyces pastorianus
atgaaaatcaatgtatcccgtccattacagtttttacaatggagttcatatattgttgttgcatttctgatacaattgctaatcattcttcctttatcgatcttaatatatcacgatttttacctaagactattacctgccgattcctctaacgtagtcccccttaatacgttcaacattttaaatggcgtacaatttggtacaaaatcttccaatctattaaaagcattccggtag

SEQ ID NO: 80758 - DNA, 213 bp, Saccharomyces pastorianus
atgggtactgaagatgtccgtctagccccagaattgaaccaagctatctggaaaagaggtgttaagggtgttgaatacagattgagattgagaatctccagaaagagaaacgaagaagaagatgccaagaacccattgttttcctacgtcgaaccagttttggttgcctctgctaagggtctacaaaccgttgtcgttgaagaagatgcttaa

SEQ ID NO: 80759 - DNA, 213 bp, Saccharomyces pastorianus
atggagaatgtacaggtgaagaagttattgcgacttcatgacgactcatttaaaaataagtgtgtttctcctattaactatatgttggaaaagtacactccgtatatggggcataccgaagcattacaaaaggaagcagagcttgtggatagggatctccgaatccttgaaatgacgtaccaactgatagaaaagaatcgcaactcgaaataa

SEQ ID NO: 80760 - DNA, 2478 bp, Saccharomyces pastorianus
atgcaaatgtcggaacatttgtgcatattcggagattatctttgcgcttccaccgacgacaattccatctttatatacaagaagtccgatccgcaagataaatatccatcagaattctacactaaacttaccgttactgaaattcaaggtggcgaaattgtgtctttacaacatttggcaacttatttgaataaattaactgtcgttaccaaatctaacgttttactttttaacgtcagaaccgggaagcttgtattcacatcaaacgaatttccagaccaaatcacaactgctgaacccactccagtcctggatattattgctctaggtaccgtgaccggtgaggttattatgtttaatatgagaaaaggtaaaaggatccgcacaattaagattccgcaatcaagaatctcctcattgagtttcagaaccgacggttcttctcatttgagtgtgggaacgagcagtggtgatctaatattttatgatttagatcgccgttcaagaatacacgttttgaagaacattcatagagaatcgtacggtggtgtcactcaggctacttttttaaatggtcaacccattattgttacatcaggtggtgacaattccctgaaggagtacgttttcgatccgtcattatctcaaggaagcggtgatgtagttgttcaaccgccaagatatctacgttccagagggggtcattctcaaccaccttcatacattgcgtttgctgattcgcaatcacacttcatgctatcagcatccaaagatagatcattatggagcttttctctgcgtaaagatgcacagtcgcaagaaatgtcacaaaggttacacaagaaacaagatggcggcagggtaggtggtagtacaattaagtctaaatttcctgaaatagtggctcttgcaattgaaaatgccagaataggtgaatgggaaaacattatcactgcacataaagatgaaaagtttgcaagaacctgggatatgcgaaataaaagagttggcaggtggacttttgatactactgatgatggatttgttaaatctgtggccatgtcgcaatgtggtaattttggattcatcggttcttctaacggctctatcaccatctataatatgcaaagtggtatactccgtaaaaaatacaaattgcacaaaagagcagtcaccggtatatccttagatggtatgaatcgtaaaatggtttcttgtggactagacggtattgttggtttttatgactttaacaagtcaaccttgttgggaaaattgaaattggatgcacctattaccgcaatggtttatcatcgttcttccgatctatttgcattggctttagacgacttatcaattgttgttattgacgcacttactcaaagagttgttcgtcaattatggggtcatagtaatagaataactgcatttgatttctcacctgagggccgttggattgtttccgcttctctagattccaccattagaacgtgggatcttccaaccggaggatgtatcgatggtatcatagtagataatgtcgctacgaatgtaaagttttctccgaatggtgacttgcttgccactacccatgttactggtaatggtatatgcatctggacgaacagagcacaatttaagacagtatcgacaagaaccatcgatgagtctgaatttgcaagaatggcgttacctagcacatctgttcgagggaacgactcgatgttatcaggggctttagaaagcaatggaggagaagacctaaatgatattgatttcaacacttatacatcattggaacagattgataaggagctgttgactttatcaataggacctagaagtaaaatgaacacattgcttcatttagatgttatcagaaaacgttctaagccaaaggaagctccaaagaaatcagaaaagcttccatttttcttgcaactatctggggaaaaggttggggatgaagcctctgtcagagaaggcatagcacatgaaacaccagaagaaatccatcgcagagatcaagaagcacaaaagaagttagatgcagaagagcaaatgaataaattcaaagttacaggaagattagggtttgaatcacatttcacaaagcaattacgagagggctcacaatccaaggactattcatcattgctggccactctaataaatttctcacctgctgcagtggatttggagataagatcattgaattcctttgagccatttgatgaaattgtgtggtttatcgacgcgttaacacaggggttgaagagcaataaaaatttcgaactttatgaaacgtttatgagcttactgtttaaggcacacggtgatgttattcatgctaacaacaagaatcaagatattgcctctgctcttcaaaattgggaggatgtacataagaaggaagacagattagatgatcttgtgaagttttgcatgggagtggcagcttttgtgaccaccgcgtga

SEQ ID NO: 80761 - DNA, 804 bp, Saccharomyces pastorianus
atgaggaaaggggctagttctcacgaatacaacaatgaggtgccatttattgagactaaattgagcagaattggcatatcaagcttggaaaaatctagagaaaaccagcttttgaacaatgacattctctttaacaatgcgttgaccgacctaaacaagctaatgtcgctggctaccagcatcgaaagactataccaaaatagcaacataacgatgaaaaacacgacattgaacttacaggatgaagcaaccgtgaatgaaccgaaaacgagaagaccgctattgatccttgatagagagaagttcctaaataaagagctggttctggatgagattgggagagaaatttacgagttcacgttgtccgagtttaaagatttgaacagtgataccaactatatgatcataactctggtagatctatatgcaatgtacaacaaatctatgcgtataggtacaggcctcatatctcccatggaaatgagagaagcatgcgaaagattcgagcatttaggtctaaatgaattgaagttagtgaaagttaacaaaagaatattatgtgtaacgagcgaaaaattcgacgttgtaaaagaaaagctagtagatctgatcggtgataatcctggttctgatctcttgagattgacacagattttgagttccaataattcaaaatcaaactggacactaggtatccttatggaggtattacaaaattgtgtcgatgaaggcgatttactgatagacaagcaactgagtgggatttactactataaaaactcttattggccctcgcatatataa

SEQ ID NO: 80762 - DNA, 513 bp, Saccharomyces pastorianus
atgatggcacacttgaggcatccacatttgaatagcttaccattcaaaagtgctacagactccaagaaacgcccctccatagaatctctcactgaagaagcaaaaaaggatatcgccacttgcaaagctataccggtcaatttttttcaaatatcacaatctagattttttgccttagtttatgatgaagccgtagtgaaaataaactgctacggtgagatgtctgattggagaaaggatattctcttacttgatttttgttgtaccggcgcgagcttccatggtaatcatttgattctcgttggcgacaatttgatacagatttacgacttaaaaaatgttgagcagagcctaggcgaattggttcccgtccagatcataaaaggaaagaagataaagctggctagttcagaaaggagagagaaaacaattcttgtgttaagtcatccaaatatacttaatagacaattattagtcgcgtgcaatcctgtagcaatggcagatcatcaataa

SEQ ID NO: 80763 - DNA, 3210 bp, Saccharomyces pastorianus
atgtatcgatataatagaagttccccctttgaacgaacaccagaaaaacgagtaagccgtcaagaaagccaacgaaagagcatcgaattgccaaaactgccaccattgaatacgaggaactcctttttggatgattctgataacggaacagataatatctcaattggctggacaccaatcagtgacacccagcaattccgaagcccggtccctcaggcttttacctttacatcaaaacatagtgcaaggggaaacggtactagctcttcagaatccacacccaaatcgacaaagtatgtcaaagaaagacgaccaccaccaccgccaccccttttgtattccactgaatcaatacggatagactcacccatggtatctcccagttctcagtcccgggaaagatcacctaataaactatcctttataggaaactcagaggaacgacatcacatggaatacatatctaaccattccaggatcttaaaatcaccatttgcgaacggatttagtccaaattcccctaaatctccaagagatagtagcaaacagcaggctcacttctctgatgaatcagatctacggtgtcatgaaagagaaaaagctttacccccaattcctttcactactactcttctgctatctccttttgatgatgaagactcagaattttttacgaaaccaccaccgcctctatcaacatctagaaacgtaagtgggaatagccgagtatcagaagccctagaaagtgtttattctgactcagattatacttttaataactcaaatgccaggcaaagtagttttaactctttactgggagccaagccattagaattagcaccaagcattactgcaccgacacaaccattttcaattcaatctatcgatgagcacaagctttatcaatgtgataatgtttacaaactttctgctatttatgagtggattttgaaagtttattttgaatggtttaatgaatgtgtcttcacgaaaatcgatcttttccaaattgttcaattacttttagagtttcaaatgcctacaaatttcgatcaagatacgatagactcaaatgtggataatattatggcttcgtttatttcccagaaagcagtaagattcgatatcattaacgatgaagaggtagccgtagttgtgggagggctggatattactggtgttttcaccgaactactaccgtgctattcattcatcgataatacttatggatctacaaactccctgatttgttattccaacgtttgcacacatggccaaagctctggcttcagaaaagaaataaaactttccgaaatcataaataaatcagttggactttggacagaatactggcacttgactccagatgatttagcagaaattaatccccgtgaagtacaaagacaaagctttatatttgacttaattattttagaagaaagatccttaaacatggctactgccgcggtagaaatctatgggaaacggtttgacaaatccctacttccagatgagcctgagttcaaggcattggtatttgatatcttcgaacctctaatacaattacataccgaatttcttttgacgccaatattttggaaattaaaaacgagaggtaagtttattgatggcgttggaaaaatctattcaaaatggtgtggtgaagccaagaatatatatttgaactacgcgaaagctatggcaacggtacacgaaatcataatgtgggagaagaaatacaagacaaaatttgtaacatggcttaaggagattgataactcggttgaaattacaagatcgaagatgtatcatgatgttatattctttggggggtttttcaaatctttacaaaacatgcccgtaactctgcgctcaattttgaagaacacggatccttccatggaggattatgaatacctgaaaatagtaattaaggaagtagaaaagttgaactttgaagttaatcaggtacatggattggcaattgaccataggaaactagtaaggttttcgaaacaattagtattaagtactaatagtagtaatgcaacaagctatgtgaacgtcggtggtagtactaacgcaaatgacgatgatgcaattcaggataaactagctcttggtttaacttatccggaaaggaagttagtactatctggcactgtttataaaaagagggatttatggctggacccaaccccagtgtatatcgcattattggacaattgcttactgattacagaggaaataagtaaaggagaaactcaaaaatataagcttattgaaagacctatcccaatagattatttaagtctcgagaaaaggaaaattccaggaacaagtaaacagcctctgagaaactactctcagaaagaacataaatccccaatgcataatttttcgacaccgattagctccatgagacctctgcttaaaagttctggaaatcacatgtcaacagcgtatggagatagaaagactagtaatactgaaatttctaacgcgaatccaaacacagacgagttctcatttaagatcagaaatacagccacaggtgaatcgttcaaattttttacagaaagtgcagaagtactcaaccaatggattgatgctatcatggaatcttttaaaagaaatgcagaaaatcatgatttaaatgcctttgaatttacagtgttgagctctgagttcgcatacttcgacaaggatgcaccggtgaatctacctgtagctccggaaggatcagaaattgatgtagcactcaaagcttacgctcaaaaagcaaacaaagattcatgttcatggagtaagacaacacggattctttgttgtgaagatgttaaattcgagggcagaatttacctatttgtggctacaacagacggtatctatgtgaaatatagagacgattatggtagtggtttcgttaaaatattagaattaaacgacgtcaaaagaatggaagccaatgttaagttggggctcttgtttgtattggataacagaaagttgtgctattttaatatctcaacggtagtgagccgttacctagcgcaaggaaacactctagatgaaaactgcattgtgggaacagtaatcagagataaggtgagattcttcaaaattgctgatgattttggtaactcaaaacatttattttttgaaagaaaggggaagatagttatattaacaccagaatttgatcattga

SEQ ID NO: 80764 - DNA, 501 bp, Saccharomyces pastorianus
atggaacgggataatcttgataagatttttaagataaacacatttgcaccacttcagttcattcaagaactggcccctagtagacactcaactagacagtgttatattgtcaatatcgcaagcattttgggcatattgacgccggccaaagtagcagcttatgcggcgagcaaagcagcattgatagcctttcatcagtcgtacagttttgaattgcaaaacgaaggcgtaagaaatatcagaacactattagtgaccccagggcaactgaatacggaaatgtttgcaggattcaagcctcctcgccagttctttgcccctgtaatagacattactactctagctgccaagatagtccgttattgtgagctgggtcagaggggacaactaaatgaacccttttattgtagttttgctcatcttttgatgtgcgtaccttattcgctacaacgcattgtaagaagcttctctcgcatagattgctgcctcccggacgagtag

SEQ ID NO: 80765 - DNA, 93 bp, Saccharomyces pastorianus
atgaatatagactgtttgtgtcgttgggtagttctgccactgctgcgctatccacttctggtagctcttgtattgagatggtatgtaaagtag

SEQ ID NO: 80766 - DNA, 141 bp, Saccharomyces pastorianus
atgattgtaaaccctcatccgccaccacgatcttcagcattcaaaggacctggtattgggcccacaggcacacgcaacagttcgagacggaatgcttcatctagcccatttatccccaaaaaaagtaagcctagatcatga

SEQ ID NO: 80767 - DNA, 1650 bp, Saccharomyces pastorianus
  modified_base (37)..(62): a, c, g, t, unknown, or other
atgaattccaacaatcctgataataataatagcaacnnnnnnnnnnnnnnnnnnnnnnnnnnggataaggatattgcccccaatagcgatgttcagctagctaccgtctataccaaggcaaagtcttacattcctcagattgaacaagtttatcaaggcacaaatccaaatattcaagaggcaaaattattaggggagttattacaagttctagcagaagttcccaagggtacgcatttattttgcgaccccatacttgaaccaatatcaattttttccttaaccattttctcattcaatgaagaagctacggccacatggctgaagaatcattttaatccaattctctctgtttgtgataaatgcattctaaattttgcaagagggaagtgcaaaatgttacaacattttgccattcaaagacatgtgccgcatgaacatgtagccaagtttaatgacatcgtatgccaatggagggtggaggctgtttttcctattcttagaaatatttccgttaacgataatacgggaattaacattacaaatgaaattgaaactgcaatgtacgagtgtctctgtaatccgcatatgttgaggcttaacaagcaacttaaggctactttcgaagcaatcttcaaatttttctacgatacaaagcatcgtttgttggacgttacgaatccattaagcataaaaacctttatatcaggtgtcatattttgctggtgtgaaggttcaaaagaggaaaacgagtggtcacgagcttttctaaaggatttatactcaaaaaatttccatataaatctttctagcctgacaccggatattattgaggaagtttatatccatattttattcttacagaatccggcaaactggacagagattgtggtatctcaattctggtcgagattactaccggttttcaatttatttgataaagacgtcttcatagagtactttcaggtcccaaaaaatgtggagtctttaaaaaaaacattcaaatttccgttagagccaattttcaaaatgtggtacaatcacttaagcaaatcatatcatgataagccactagactttttgttaagaggactaacaatgttcttgaataaatttggctccgagttttggtccaaaattgaacccttcacattccatagcattttggatataattttcaatagagattcattcccaatcaaactaatcaaaattcaagacaatccaattgttgagcatcaaacagaagtttactttcaacttaccggttctgtaaccgatttactttcttggaccttaccattttatcatgcactgtcaccatccaaaagaattcaaatggttagaaaggtctcaatggcgttcctgcgtataatagccaattatccatccttaaaatccattcccaaagcatgtttaatgaattcagcaactgccttgttgagagcagtgttgactattaaggaaaatgaaagggcaatgctttataagaatgatgaatttgagacagtactattgactaaaacagattctagagctttgctcaacaatcctttgatccaagacataataattagatcagcttcgaatcctaacgacttttatcctgggctaggtgctgcttctgcatcggtgccacatccacgatga

SEQ ID NO: 80768 - DNA, 3669 bp, Saccharomyces pastorianus
atgatggtattggcagaatgtatcgattttgatatactgttattatgtcatcgaacgtttaagctttattcaggtaaaccaattagcgaaattccaatttcaaccaacgtcttggaaaatgttacaaataaaattgacctgagatcttttcatgacggtccattgctggccaaacagctgctagtatctttaaaaaacattaatggtcttttgatagtaccgtcaaatactgccgtagctgaggcacacaatgcattgaatcagaagtttttgctgctatcaacgagattaatggaaaaatttgcggatattttgcccggtcaactgtctaaaatccttgcggatgaagatgcatcgcagggtttttggtcctgcatattctcctctgataaacacttgtatcaagcagctactaatattttatacaatacatttgacgttgagggtagactggaaggtatcttagcgattctgaatagtaatttgaccgttaacttgaagaatataaacgtgatgctacaaaggttaatcaattgtgaattctatgagccttgcccccgtgctgttcgtgttttgatggacgtagtgagtgcatttgtagacccgatttctggtgtgtttgctaatttccaaactttgaagagccaaaataccgaaaaggaatttttaaaattctgggaatcatgttggttattcttggatacgatttataagtttactttgaaatgggcttctaaatatgactattctgaactggaaaatttcaccaaagatactttagacctaagtcgctctttggtggactcctttagagaattttcagatattcttcatgaccaaacgaaaaatttacttctcaacgttttagaaacctttaagaatatgttgtattggctgagattgagcgacgaagtacttttggaatcttgtgttagattaattataagcacgtctgatttagcacatgaaaagcatgtgaaagtggatgattccctggtagaaatgatggccaagtacgcctcgaaggcaaagagattttcaaataagttgacggagcaacaggcgagtgagattctacaaaaggctaaaatattcaataaagcactcacggaagaggtcgctacagaagctgaaaactacagaaaagaaaaggaattatcaagacttggaaaggtgatcgacttaacggattctgtgccggcgtcaccatccctctcgccctctctgtcttcaaccattgctagttcttctgctgaatccagggcagactatttacaaagaaaagctttatcttcttcaataactgggagaccaagagtagctcagcctaaaataacatcttttggtacgttccaatcatcagctaatgctaaactgcatcgtacaaaacctgttaagcctttatccaaaatggaattagctaggatgcaattattaaacaacagagttgttcatccacctagtgcgccagctttccatacgaagagtaggggtttgtctaacaaaaacgacgatagcagtagtgaggagagtgacaacgatatagaaagcgctcgggagctttttgctattgctaaggcaaaaggcaaaggaatacaaactgtcgatattaatggtaaggttgtcaagagacaaactgcggctgaattggctaaacaggagttggaacatatgagaaagagattaaatgttgatatgaaccctctatatgaaatcatattgcaatgggattacaccagaaatagtgaatatcctgatgatgagcctattggtaattattctgacgtaaaggatttcttcaactctcctgctgactaccaaaaagtcatgaagcctttactacttctagaatcttggcaaggtctatgttcttcacgtgatagagaggactataaacctttcagtattattgtaggaaatcgaactgctgtgtcagatttctatgatgtgtatgcctctgtcgctaaacaagtcatacaggattgtggtatttctgaatctgacttaattgtaatggcttatttacccgattttcgaccagacaaaaggttgtccagtgatgatttcaagaaagcacaacatacatgtttagcaaaggtgagaacattgaaaaataccaaaggtggtaatgttgatgtcacattacgaattcatagaaatcattctttcagtaaatttttgacactaagatcagagatatattgtgtgaaagttatgcaaatgacgactattgaaagagagtattcaacactggaagggctggaatactatgacttagttggccaaattctacaggctaaaccatcgcctcccgtaaatgtggatgcggcagaaattgaaacagttaagaaaagctataagctcaatacgtcgcaggctgaggccatcgttaattcggtatctaaggaaggtttttctttaattcagggtccacctggtacgggtaaaacaaagactatattgggtattattggttactttctgtctacaaagaatgcctcatcttcaaatgtcatcaaagtgccactagaaaagaactcatcgaatactgaacaactgttaaaaaagcaaaaaattctaatctgtgcccccagtaatgccgctgtggacgaaatctgcctcagactgaagagtggagtgtatgacaagcaggggcatcaatttaaacctcaattggtccgtgtaggtaggtcagacgttgtaaacgttgcaattaaggaccttactttagaagaacttgtggataaaaggataggtgaaaggaattacgaaatcagaacagatccggaactagaacgtaaatttaataatgctgtgactaaaagaagagaattgagaggaaaattagactctgagagtggtaatccagaaagtccaatgtcaaccgaagatatcagtaaattacaacttaagattagggagctaagtaaaataatcaatgaacttggccgtgatagggacgaaatgcgtgagaagaattccgtaaattataggaatagggatttggatagaaggaatgcacaggcccatatcttggcggttagtgacatcatatgttcgactttatctggttcagcccatgatgtactcgcaacaatgggtattaaatttgatacggtcattatagatgaagcatgtcaatgtaccgaactttcttcaattattcctctcaggtatggagggaagcgttgtattatggttggtgatcctaaccaactaccaccaactgttctttcaggtgcagcaagcaattttaaatacaaccagtcactgttcgttagaatggagaaaaatagctccccgtacttgctggatgttcaataccgtatgcatccttccatcagtaaattcccctcttctgaattttatcagggacgactaaaagacggccctggtatggatatcttgaacaaaagaccctggcaccagcttgagccattagctccctacaaattttttgacatcattagtggtaggcaagaacaaaatgcgaagactatgtcttatacaaatatggaggaaatacgtgttgccattgagttagttgactaccttttcagaaaattcgataataaaattgatttcacgggaaaaatcggtataatttcaccttatagagagcaaatgcaaaaaatgcgtaaagagttgcccgctattttggaggcatga

SEQ ID NO: 80769 - DNA, 1290 bp, Saccharomyces pastorianus
atgatcaacaaatcaatcgatttcaatacaatcgacggtttccaaggtcaagaaaaagaaatcatcttgatatcgtgtgtccgtgccgatgatacgaaatctagtgtcggtttcttaaaggactttcgtcgtatgaatgtggctctgactagagccaagacaagtatttgggttttgggacatcaaaggtctctggctaaaagcaagttatggagagatttgattgaagatgcaaaagatagaagttgtcttgcatatgcttgctcgggtttcctggatcccagaaataatagagctcaaagtattttaagaaagttcaatgtacccgtaccatcagagcaagaagatgattataagctacccatggaatatattacgcaaggccccgatgaggtaaaatccaataaggacacaaagaagagaagagttgtcgatgaaggtgaagaggcagataaagctgtaaagaaaaagaagaaagagaagaagaaggaaaagaaaaagtccaaggcagatgataagaaaaagaataacaagaaggcagaatcgcccagcacctcatctggtacaaagaaaaagtcatccatttttggtggaatgagtgtaccgagtgccgtagttcctaaaacttttcctgatgtggacagcaacaaaaaggcagcagcagttgttggtaaaaagaaaaataacaaacacgtttgtttttcggatgatgttagtttcataccaagaaatgacgaacctgaaattaaagtgaccagaagtttatcctctgtattgaaggaaaagcagttaggtttgaaggagacgagaacaatttctccgcctgaaatcagtaataatgaggatgatgatgacgaagatgattatacgccgtcaatctccgattcttcattaatgaaaagtgaagcaaatggtcgtaacaacagggtggcttctcataaccaaaatttcagtgctagtatatacgacgatccacaagtttcgcaagcaaagcagacgcaggtacctgctgctattacaaaacacagaagttcaaatagtgttttatccggtggttcttcgaggatcctgactgcttccgattacggtgaacccaatcaaaatggacagaatggagcaaataggacccactctcaacatgtgggtaatgcgaatcaatactcaacggctcctgtgggtacaggcgaactgcatgaaactctgcccgcccatccgcaagacagctatcctgctgaggcagaagatccatatgatttaaaccctcatccgcaaccacaatcttcagcattc

SEQ ID NO: 80770 - DNA, 150 bp, Saccharomyces pastorianus
atgtataaatcctttaatgtttttaaatcaagaggcattattataaaagaacgaagcaaagcctttaatatttgctttattaaaggtactattcaaagaaaagtttttttagattcttttttttttcacgtattagctcagctgccataa

SEQ ID NO: 80771 - DNA, 132 bp, Saccharomyces pastorianus
atgctgtctcatcaatatattgtgtgctcattgttccgtaaggattatcactataaaaattttccgcagatttcttttggactccacctttcttcctgttgtaataaatacaaactatttgaatcaatttga

SEQ ID NO: 80772 - DNA, 726 bp, Saccharomyces pastorianus
atgaatatcaaattgattcaaatagtttgtatttattacaacaggaagaaaggtggagtccaaaagaaatctgcggaaaatttttatagtgataatccttacggaacaatgagcacacaatatattgatgagacagcatttgttcaggctgagcaaggcaaaaccaatctaatgttctctgacgaaaagcaacaggcacgttttgagctcggtgtttccatggttatttataagtgggatgcgttggatgttgccgtagaaaacagttggggtggtccagactcagctgagaagagagactggattacagggattgtagtagaccttttcaaaaatgaaaaagttgttgacgccgctttgatcgaagaaacgttactttatgcaatgatagatgaatttgaaactaatgttgaagacgactcggctttaccgattgccgtagaggtcatcaacatatataacgactgtttcaatttaaattataataaggtagaaaaattgtatttggaatggcaagaaaagcagagaactaaaaaatcaaaaagagttgtgcatattgagggtgatgatgatgaagacgatgaagatgaagaggactatgatgacgaagatgaagatgaagagatggacgaggttgtacctgacttagtatcgtctaaacctgaaccaattgttgacgaagacggttttgaattggttcaaccaaagggaagaagaaagcactag

SEQ ID NO: 80773 - DNA, 114 bp, Saccharomyces pastorianus
atgaaaaattttgaaatagatatagatgaatatcaaattgattcaaatagtttgtatttattacaacaggaagaaaggtggagtccaaaagaaatctgcggaaaatttttatag

SEQ ID NO: 80774 - DNA, 3120 bp, Saccharomyces pastorianus
atgcatcatcagtggcatcttttagccaatagactgcttcttttacgtcttttggcagctttattttcttcggacttgtacacgagcggcggtaaacaggacataaacatgtttcttgtctactggtgtactcaaatgcctaaggacaaaagcattcaattcacttcctcgctattaaattgcacgatgcggtttatacttaacagtaataaagacttccagagcttgaaggctaattttttcagctccgacgccaccgcaagtaattggcagacgctttattttcaatttgtgcagtcttgtctgcacgttttaaatctctccatgtcatataaggcccaagacaatgtcattaccattttcctcacccaattacagcgagagtacgatttaaaattaattctttctagtttcattaaaattttcaaataccccatcgatctcgccatagaacaagaatcaaacatttttaacttcacaaacaataaacatattgatgccagcagaaggagagccgtgtcaacgagctctcacgataacagttcatcttcgcatgcttcgttgcctagttcatcatcggcggcataccatacgaaaccgcaaacaaagccacaattaccagagattcatcctttgttgatacctatgactattctcatgacaaacttgattgattgcaataagtgtttccaaaattattttgcagacaagtttgcaagtagattcatcattttttccatctactatttaaagtattatgattattcatcgttgtcgtcgtcttcatcaacaacacgctcgaattcttccaccacgagcaatggcacatctaacgatacgagcgacgagcgttctattgtggaactgaacgaaaatagcgtttcacagatcttgttacctttactcaatcatcttctgctgattttgacttcgaaaaaacttgttctcttcaaaatgctccagactttcaaccttaattattatacaaataatttgccaaatttttacaaactctccaacatcaacggcgatattaataatttgacgttcagagattttacaatcatacaattatcgaatttgattttagacaacattaaattcaatttacaaccgaatccgattttttatgaattgatttacaatctgctgccaattaatgacgaaattttgaccagttctcacaaaaatgatgattcacatgacgatttaattctattatcagcaaagaagaagtccgcatcaccaagtgcagccacctctagtcatacatcctcgtccaaactatcctacaatgctgcaatgtccctactttacgttctttctaagtcatcaaataaggtttatctgacaacttacgctacacctgtcttcaagacaaaagatataccgtatatgatctcaccgggtttcaaaatggatttgttggcgttattattaaggtcaatcacaatatttttcaccttatattttgacgatgcggaaaatctactctttgcaatggtgagacatcagtccatcactcaccaaataaatgactctataaattctatatccaaggccttagacatgaatccaaatttaaattcgcatatcatgaccttgaagcaaatgggattcaaccggaaagttcaatggaaggatttctatcaatttgaagagataacaggtttgcctcaagtcaatctttattcttcagcaaaccaacaacatcaaaatcagcaacaaggccaaaatgacaatcgaggccaaaaccaaaatgaggacccaggtcaagaaaacgaatctccaactccttatttgcttttcaatcctgcgtcattagaaaatgaaacatctgggacagtcaagcatttttcaagtacgaatcatgataagaactaccaagtcattgcattcattgatttcaagtcagattcaaatctgaatttgcaacatcaattagggtattggccacatagacctcaatggcctacaccactaacgtttactcacaaatgtaaaaatcccaaatatgaaaattttaatgaagtttggtccggtacagtttatttacaaattcttttgcgggttattaagcaaattttgtcgaaggttcctgaaattccgagaattaaatcggtgcaatatttcgaaactttatcgaaactttcggctcttagatctgatatattgaccacaattcatccccggttaccactggatgttcgacgattgacaacttttcagcctttgtctatgcatactaatgataagctgttgatgtggttccacattgccacatgggcaaatattttcacgcagacgtcgtttaaatacgaggaaactttttcgcatgaattgaggcaatttgaatctcttttggatattagtattgacgaatgtgaaagcaataccatttcaaagcctacaacagatcgtttgggatacatacgaagatcaagaggtcaatcttctgtaagcttagaaagaacaataagcgctggctcaggcgtaagtaccccaacaatggcattaaatagaacaaaaagtaacggaagtggcaacttgatgaattatttttttcagaacacagcgcaaaatcactttcagcatttaagatcgtcttcgtcttcgtcctccattactttagagaagactacttctaatagttcttcaataagaactagaccaaattctcatcatgttgctcctgagactaataacaataattccactaatggtaatagcaacaacagtagtaacggcggattttcatttttcaaatggaaatggggtggaaataacagtaatggtggcagtgatgataccaaggctagtcaaagagatccaaatgtcaacacgtcaatcattacagataatttgaatagttatatgtttgaagaagaaattagtcccggcgttgtaaacaacataattgaaaataacatttgggttggaaccgacatccgactatttaagatcgcaaacttcagaaaagaatctttttcatttctggaaatgacatcttcttttttcaagaaatttaaattcattaatagcgataatgacaattataataataacgaatttgatgataatacacagttaagatatacctctagagggttgtatagatag

SEQ ID NO: 80775 - DNA, 678 bp, Saccharomyces pastorianus
atgggaaatactgactccaaatccagttcgatcctgctgaaccactgcatcgctctggttcgaccggaggacgcatctgcgtcctccccttcacgtacgtcgtcgccctcgccctccctttcagttgatgctgatccgttgagtttaaacctgtcaatttttaagctggattctgggcctgacgttgaagcgttgttcagcgacaaaccaaatgtcccgctagataccgtcttcaacgatttttacttggacttcatatcagtggacgtgcaggacttcagcattaactctagttttaaaaaaatcctgcacattatctctagtttgaacccacccaacttcaacaacttgattgtcttcctttcgctctacattattctttccgcgaactccttgcccgcttcccgtacgggacttcattcttcgcggcttatcaacgccataaagaccctttccatcctcatacctatttattttgaccgggtcaagtctagcacgcaggaccactacgatgtcttttgggccacgcaacatgaaattgagggtcttcccttgcaaaacatcccactgggagaaagactactgttggcgatcttgaaactggctttccaagataatttcacaactgccgtgaccgcccacccaagcgaattcgtgggaaatcggcatcttgactaa

SEQ ID NO: 80776 - DNA, 288 bp, Saccharomyces pastorianus
gcaatcggcgtcgatcaagttctggggcaacttaaactacagcgtgttcatgactccaacgacctcatatccgaaatatcacatgaaccgatcacagacgtgggcgagtcgttcatcttattcactttcgaattcgaacctcatgccgttcaagaggcttgtgtcggcctccaagacctgagaaagtccccagataataaagtccctaaattagacgaactccccaccgtgagaaaatacttgaaacagctaattcatgcaagctccgtggagcaagcaactgcatga

SEQ ID NO: 80777 - DNA, 312 bp, Saccharomyces pastorianus
  modified_base (125)..(125): a, c, g, t, unknown, or other
atgatgaaggctttggccgatgagcattggttaacatgttatcaaatggggaagtttgtcgatccaaattggttggataatgcaattcccacagagataattgtattgcagatgagcatcttggnccgcttactggaggtttgcccccttgaggaagtcgaaattgttacatcgcaatggagcacactagaattggagctaagcgcccgtgacctgctgacagacaagtacgcactggacggacagaacgacaataagagtaaggtaggcggcattgctagggagattttccacaacgtgactaatttctga

SEQ ID NO: 80778 - DNA, 732 bp, Saccharomyces pastorianus
atggaatcccaacaattacatcaaaattcaccaaatcttcagttatttttcatgatatggtactactacataaagggaagatttatgaacgccctcaaagaaagggcacttgttcatatcaactctctattatcgctagttgttttcattgggggcctgataagtagcataagtcttgcctgggttaactacactattcagtctagaattaatacagaattagaggccttcgggttttcttaccatcttggagttacatggtttgcgcttctgtggtgttttgcaggtttgatttctgtgtcatacttagcttggtctggcttagaatggtgtatttccgataatggcacgtcctatggaggtggaatcgatgataaattcttaggctaccaagccggtttatttactgatgcagatctagacgatgaaacttcttacagtcaacgttatccgcaacgacagtctacttcgggcgaggctgaactaatgagaaacagtgatactatggcaacaataagaaaaacatctgatgttgacttaaatagtgaaaatgatgctaacaccagtttagaccatggaaatcacaccgcaaatataagcaatggcggcaaacacgaaccatttgctactagagaggaattcgaattgcaggacataagattccggtcaagcaacgacagtgaagaaagtatgcaaagggttatcaagccttcgtcagcattacagttttga

SEQ ID NO: 80779 - DNA, 2073 bp, Saccharomyces pastorianus
atgaagctggaaattaacatcattcacagatcaaccgtcatcagacagactttggaagaggacggagttgtcccaactacagcagatattatatataaggatgaaactgcctcagaaccacattttttgagatctaacgtggctatcattctgggaaaagcatcagttattggtcttttgcttctgatcaacctttatgttttcacagataagttaaatgctacaatactaaacacggtatattttgactctacaatttactcgttaccaaattttatcaattataaagatattggcaatctcagcaatcaagtgatcatttccgtgttgccaaaacaatattatactccgctgaaaaaataccatcagatcgaagattctgttctacttatcattgattccgttagcaatgctattcgggaccaatttatcagcaagttacttttttttgcatttgcagttagtatttccatcaatgtctacttactgaatgctgcaaaaattcacacaggatacatgaacttccaaccacaatcaaataagatcgatgatcttgttgttcagcaaaaatcagcaacgattgagttttcagaaactcgaagtatgcctgcttcttctggcctagaaactccagtgaccgcgaaagatataattatctctgaagaaatccagaataacgaatgcgtctatgctttgagttcccaggacgagcctatccgtcctttatcgaatttagtggaacttatggagaaagaacaattaaagaacatgaataatactgaggtttcgaatcttgtcgtcaacggtaaactgccattatattccttagagaaaaaattagaggacacaactcgtgcagttttagttaggagaaaggcactttcaactttggctgaatcgccaattttagtttccgaaaaattgcccttcagaaattatgattatgatcgcgtttttggagcttgctgtgaaaatgtcatcggctatatgccaataccagttggtgtaattggtccattaattattgatggaacatcttatcacataccaatggcaaccacggaaggttgtttagtggcttcagctatgcgtggttgcaaagccatcaatgctggtggtggtgcaacaactgttttaaccaaagatggtatgactagaggcccagtcgttcgtttccctactttagtaagatctggtgcctgcaagatatggttagactcggaagagggacaaaattcaattaaaaaagcttttaattctacatcaaggtttgcacgtttgcaacatattcaaacctgtctagcaggcgatttgctttttatgagatttcggacaactaccggtgacgcaatgggtatgaacatgatatcgaaaggtgtcgaatactctttgaaacaaatggtagaagaatatggttgggaagatatggaagttgtctccgtatctggtaactattgtactgataagaaacctgccgcaatcaattggattgaaggtcgtggtaaaagtgtcgtagctgaagctactattcctggtgatgtcgtaaaaagtgttttaaagagcgatgtttccgctttagttgaattaaatatatccaagaacttggttggatccgcaatggctggatctgttggtggtttcaacgcgcacgcagctaatttggtcactgcacttttcttggcattaggccaagatcctgcgcagaacgtcgaaagttccaactgtataactttgatgaaggaagttgatggtgatttaaggatctctgtttccatgccatctattgaagttggtacgattggcgggggtactgttctggagcctcagggcgccatgcttgatcttctcggcgttcgtggtcctcaccccactgaacctggagcaaatgctaggcaattagctagaataatcgcgtgtgctgtcttggctggtgaactgtctctgtgctccgcacttgctgccggtcacctggtacaaagccatatgactcacaaccgtaaaacaaacaaagccaatgaactgccacaaccaagtaacaaagggcccccctgtaaaacctcagcattattataa

SEQ ID NO: 80780 - DNA, 3126 bp, Saccharomyces pastorianus
atgatcgcgccgcgccacaagcagaatgacaaagcgcgcactgggaggatgaatgtcgaacatgattcatatgctggctttagaagtgactttatacatatgtctttcgggctatcatctaactcaaactccgcatataacgctatgcaactaagtcccaacgggttcaaggcattctttgtttggtggaaatcattttcaggaaactttcccgtaaggagagggccattatttggtctccaaagtatcagtcctaaatttggtgaacatttatataccatttcttaccacgcagatgtctcaccattattcattaattacatgtaccacaacgctgatgccgatcaaattttgcgtaaaaactacttagaagttgccgaatttgctggtttaaaggctaaatcttctcattttattatggatcttcatcaaaggaaggaagtattgactgaatatcaagccggcttgaacgtcagaaggagagttatgaaattaaaatttctggctggtgatgttgtatgccaggacgtggacatccggactgtaagtggtgagttcagtaaattaaactacattgaagagaaagaggatgctgaatatgatatttttgataatgatatgtcgtggcttgatataacagattttcaagatgcatttttcattaaccctgataattatcttccaaaaattaagattatgccatttgccttttctcctcagttcgcttatcaaaaaagagctagttatggtgacaaataccaagttgatccgaaaacatgcaagccaataacgccgtttgataatcgtgtctcccatggctgtacactagggcacaatgtttctttacgtactgacctagttgagaaacgtgttacagttttgaagaagtttcgagagaaattgcaggagggtattagaaaaaacaaatcagccggtgtatcagaggagaatttgaatgatttactctcaaaagcaaattctagtgtggaaaatgcagaattactactgaaagacttccagaagatatttaaacaacatgaagccggacaaacagaacagcctttccatttcgactctttaaatctattgaaaaacaccaaaaagaccctgaaacaatttgaacatagattttttatttttaacgtactgttgaaatggaacgaggacgcaagaagtgctattttcaaatttttttactatgctaacctatccaatgaatttgcttctttagcaagtggcaagggcctaagggaatttgaagatgtaataaagcaaagagaaatgactgatgatacaacgagtatggaagcgataccagaaggaacagacaaagcaaacaccgctaaacaatgtcatagctgcgatgatacagagttcaccactgagaaccttttgaatatatttgaaaaaaatattacacaactgtcttgtgacatcaaaaataagatacaccataagttttttgtccaatttataactccacaaattcagttgacatccctggaaaatacagaagcttgtgttttggtttcttcacccttttttatgctaaagacattggaatttgatgcaaacactaccagtaacacgtatatgcaagatatttttttgaaaagacatggcattctattcggaaacgccaatgcctttttatttaataaaaaggattaccaagagttttttgaactatatttcggctccagctcatatggccaagataaaaaagaacagtggccaccatggctaggcttggagttaggattcgaaccttctgcattaaaaaagaaagcagtggttaggaatatttctgctctgcttcatcatcagaaattagcaccgttttctgctaaatatgactccttaaaagataaaatagaagataatatttgcggatacgttcctcaagttaacgtacaagtgaattctgacgagtacctaatgctgacgaagatggccttgaaattattcctttatgtagaacccgaagatgaagaattgaagaaatatattgaaaaactaattattggttacgatatctatgatacagcccaaactagaaaattcgtaaatgatttacacgatagtgaacaaattctagctgttgttgaaaaggagcttttattcaaaagaagcctattggacgacattggaaaactcgatctatccaatattcacaacgaacgcatgcatcagttgttgaggttgtatatcttaaggaaggttttcacttcaaatggaaacaattacattaataggactttagtatggaatatcaaggttaatgaaactatcttgcatttattagacaaaattgacaaaccatttttagatattgccgttgcaaagctaaactttcatagaatccaacacacgatgggattaaggaagaacactgtaaccgtaaaaatgatgcaaatatttgacttaggcgaaaatgttaattatcattgtattttagggcctttgataacatcaagtggtaatgacacagtcggtttggcgagtgatgttccgttagttcaaataacttgggatgttgataagcctgtaggtggtattaaggttgttaaaaacgttgagaccactttgtcgagtttgacgataaaattagaagaggacagactaaataaactttttgagtggttatcgttaaaggagttaatttacgatggaaacggagatgaggatgatggagcttccagtatttttgatatggtgtcatcagaatcagaggaaggaaaaattgagttttcagaagatattagttctgatttcaatgaaatgttaaagagatcaagtgattatatgatcgttgaagatcttaaattgaacagcttcaaactttgtatcagttataagggcaaaggaaagatgagattggctaacgttactaactttgttttcaatttcccgactttaagattgtccaaccaaactttgagggtcacagatctattacttgcccttaaaaaagtgttaatcaaggttttaataaaacatactgggagatttattggtaataaattgaaaagaaactctaaggagaataaaattgctgacgatacttcaccactgaagcaactcacaacttataattcctacacggagcctgaagaacttcgttaa

SEQ ID NO: 80781 - DNA, 81 bp, Saccharomyces pastorianus
atgatgtttccgattaatgttctactgtacaagtggcttatatttgcagtgactttcttatggagatgtaaattttactaa

SEQ ID NO: 80782 - DNA, 1305 bp, Saccharomyces pastorianus
atgaatcctctgaaggatggacttcaagtaggattagatttaaaactaggtgatttaaatattcccatgaatttattgaatttgtttatcaacaaggagaacgttgatttgatgtccaatgaaaaacttctacaaagattggcagatacaacaaaggcgaataaagagctaaaggatgaagatatcgctaagatgaaagatgatctcgtgtatgcaatggaaaaatttgtagatcggataaagccattgaaagaaatgaacgtcaccattgataaacttcaaatcaaagattttccactcaccaatcatccagaactgcttggaatgaacaaatatatcagttataatgttttggtttctaatataaacttcaataccaacaggttcagaaatgagatgccaggttatacgttaatttttgaggagcgtgattctcccttcaagtttagtattataatggcaagatttaatatatatttgaatctaaatcgaaaacatcaaagccacgccaaacagttgaaaattattgaaattccaaatgtttcgatatttggcgaaaccaatttgttctctcaaaaatttcgtctttctaataacctacacgcaaaggaactagagaacgctatttttaacatcaaaggtaatatatcctccttaactattgacatggatccagtaaatatttcctttatcaaatgcttcctatcaaacattaaagtctttacgtcctcttgtccgaaaaacaagattttaaaggaaaattctcatgtaaagttcttaacaaggcgtagagtcctatttgactattttaagtgttttttgcctctaatcaatatgaaattcaccctggatgatcccaaatttgttatcaatgataaagacgatctgatcataggcaagttttctgtcttcatgataagccatcactctaaaagatatacattgggtaacaatcttatggaagaaaaagaagagacgcaacacattttttatgaaagccattggaatgttgaattactagatatgaaattacagcatattataaaacatcaaaaatacgagcatacaatactaagggtggacagcattgccatagaagaaaaagttcaacttttaccggatatattatgttctgcaaacgctgatatcgacacgctaatgctagatttatctgaacttccaacaatggttatgttgagtgaattagtgcacaacttagatagtcagttggcaaatgtcgaagagaattatttcaaagagtgctatgaaaagttcgcatctaatttacaaaatatgacagctgaa

SEQ ID NO: 80783 - DNA, 2760 bp, Saccharomyces pastorianus
  modified_base (2094)..(2094): a, c, g, t, unknown, or other
atggttaggtctggtcagctcacaaattttagtaaagataataaacagaatcctaaccataagtccagtattgccgatttagacgatatatcgactagtgatgcgacagaggtaaatcatctttggaacatcaacttactagtaaatgatataactacgtcagtaatcggagagacacccgaagtgagcgaagaattgtccactaaaactgtttccaaagtttctaatttatcaattaagctatttccagacactgagtcatttagtagcaatgaaagcgattcgaagataattttgcaaataaatcactccagaggaacatcggtagtatcactgatgagtatctttttggccgtctcaggaatacacacattgaaccaaatatttggacattgtatacaccaaaagatgcgacagtctaaaactaaacaatactttcttgccctctcagaatccaaaaaaaaatcatgtatcaaaagtataaaatggggccaactaaaggagttactcgaaataaatttctcttctgaatatatcagccaaataatcgcactcccaaatggccttagaacaaaatttgaaccaacttcgacatttatcacagtcaaaaactgtaatacaatttcagtttcaggtcagtacttcagaatgatggtagaatctccaacgcagccaaacttttgggagagaatgatctgtatcaatggatttaaagtaatgatacacattgatttattaaaacagcaaatgaaaaagttaaactctttacagaattgggaaaaattaccatccgccataaccttagaaaatgattcatggcacttttccataccgcatcatttcgagatgtttaaaataatagattctattccaactatatttaagagtattaaacaaatgttatattcgttgaaaacatcaaaagacgatttgataattttcccccacaaaatagagactcctttatcactgccaaagattaaactgaaatctaaaaggtggttatttagcatttctgatgatccactagaggcagaattgaatactatctttcagatcggtttacaagaacaacgggagagacttgcgaaattacaggaattcaataaacgcatctctgaagatttgattaaaagtcaaaagaacgctaaagaaatgaaggacgacttcgaggcaattgataacgcaatactaaagcaccgtacaggattgtgggcaaaggatgggaaaaaaagattgggtaaatccgcaacagattctgaaatacctcttaccccagcagctttgaacattaatggaaagcgtgatgacaggcctgatagaacgcagtttatttctcccgagattgaaaatgcgtacaatactttattagcgaacttctccgattcatggattaaaagggtgaaagaatataaagttaaagaacgtcgtgagttcgataagaacttttctttcttatggggtttcattgattatactaagctccccaaagatattaacaaaaaagttttacctttctcaacaaatccttttttaatgaatttgataattgagaatatcgatattgatataataaggccttcatgtggcattgaaaatattccaaacttcattcacgatgttggaaaaggcgttccgaagaatacagaatattcgattatgattccgatgcatttagatgcgaaatttagtgaagtaagatggcatttgagagattatcccctgccttttgttagtatacctccactaagctctacacaaagtaaagaaacaatacctatgagaatttatggggattttatgataacagaggatatgcttcaatccgacagagagcttagaactttatttgttcctttaataccatcggtaactgttgaaaatacagatagatattactcgttgttcgtgcccagaacaatgactagcgctaagatattcaccgatctaaattttgaaataaactctaaccatacaacacgagtaacttggggtggttcttatcaaccagccattcaacaaacaatgcaatgtttggataacttttcaaagcctccattagatccttctgttaaactagggttttgggataanacaagatatcttttccatggaaagatcaatatagtttggaaaaagaggggaaaattcgaaatttcccttaaaggcgcaaaaagtccctatatgcttggcggcgaatcagctggtttcatagttggttttgatggtaatgttaacttaaaatgtaacgaagataatgatcccaaaaaatttttatcctgcagcgcagacaaggtccatttcagcattcccaattattttgcaaagccgttactggtatggtctagacctagtaccaatacaatgttcattccaaaccaggacgatacgaacatgcagagatatgcttcattttactatttattgaacactacatcaagtaaaaacgaaaaagcagacaaggaaattatgggaaaatcgttcattgaaaagacaggaattaaactatctgggggtatgacactggatatgggtattctcttcgaaaggttggggcctagtttgaatgagagaacttttgagtccaaaaagcattatttgactcgtctatgtaacccaatttacgttcaagatccctctcaaaacatagatatcatatgcatggctattagaaacgtgacatttatttacatagtgtcttttcagggcatatacatcataacgtcaagactcacgcatattaacgcgtatgcaacttaa

SEQ ID NO: 80784 - DNA, 312 bp, Saccharomyces pastorianus
atgttgatagtctgtggtgctataagtgcctataatgatccatctaaatttgtctttaaggggtatagctttattctgactaaacgattggtcgttaaaggagtactagtgacagataatattgatgattttccaaaggcattagataaattgggttctctggttaagcatggtaagattgacctcttgaaatccgctacccttgaagatggtaccggtgataagttcaagaatgttccattgatatggaagggtctatttagcggtgttaataaaggtaaacttattaccaaggttaacaatgaggagtga

SEQ ID NO: 80785 - DNA, 735 bp, Saccharomyces pastorianus
  modified_base (713)..(713): a, c, g, t, unknown, or other
atggtattggctaaacaatgggttttgaaaaacctaccaactcctggtgaaccatttaactttcattttcacgatcctgcatgtactttcgagctcattgaaaaggaactctcttcagaacaattaaaggacggtgaattactactggaaacaacttatttatctaatgatcctgcccaaaaattttggatatcatcaatggacaaaaattacgccaaaggtgtccagcctggtgaaattattcctgcaagaggaattggtaaagtcttggcctctagaaataaagcattctctcctggcgattatgtctctgcagtgaccggctggactacacatgccataatttcgcaagaaaatgttcaagggctgagaaagcttgacaagaacaaagttggtaaattatggtggtatctctctgtcttaggtggtacgtctttaacagcttattttattttctttacttatgctcaattgcaagaaagagaagaggactatggaaaagtttacctaatctccggtgcagctggtgccgtcggtaccgtttgcattcagctggccctaaacgtttttaaggcttcaaaggttatcgctatcgcaggtggaccagaaaaggttgcttttgttgaatcctttggtgataatgtagtcggtgttgattataaagatccaagtttcaagcagaaacttatggtggccgcttgggttgaaatccnctgttggtgcactaattgttag

SEQ ID NO: 80786 - DNA, 1386 bp, Saccharomyces pastorianus
atggggagtgatttttgtgtcttcttcttcggaggattgctggaacttttgttatttttcttttttacaacagttggtcaagcaggttgtcaaataggtaatgcatgctgggaattgtactccctagagcatggcatcaaggaagacggccatttggaggatggcttgtcaaaacctaagggaggtgaagaaggattttctacattcttccatgaaacggggtacggaaaattcgtcccaagagcaatctacgtggatttagagcccaatgttatcgatgaagtacgtacaggacgtttcaaggagcttttccatccagaacaattgattaacggtaaggaagatgccgccaataactacgcaagaggccattatacagtgggtagagaaatagtggatgaagttgaagaaagaattagaaagatggccgaccaatgtgacggtttacaagggttcttgttcacccactccctcggtggtggaactggttctggtttaggttccctgttattagaaaacttatcgtatgaatacgggaagaaatccaaattggaattcgccgtttatcctgcgcctcaattgtctacttccgtcgtggaaccttacaacacggttttaaccacgcataccaccctggaacacgcagactgtacgtttatggtcgataacgaagccatttacgatatatgcaagaggaacttgggaatttctagaccaagcttcagcaacttgaacgggttgattgcccaagtgatatcatctgttacagcctctttgaggttcgatggttcattaaacgtggatttgaacgaatttcagaccaacttggtaccatatccaagaattcatttccctttggtttcctacgcacccatcttgtccaagaagagggccacccatgaatccaactccgtgtcagaaatcacaaacgcttgtttcgaaccgggcaatcaaatggttaagtgtgacccaacaaaggggaagtacatggctaactgtttgttatacagaggtgacgtggtgaccagagatgtccaaagagccgtcgaacaggtgaagaataaaaaaacagtacaaatggtggattggtgtccaacaggatttaagattggtatttgttatgagccaccaagtgtgataccaagttccgaattagccaatgtggatagagctgtctgcatgctatccaacaccactgccatcgcggacgcttggaagagaatcgatcagaaattcgacctgatgtatgccaaacgtgctttcgtccattggtatgtcggtgaaggtatggaagaaggtgagttcaccgaagctagagaagatttagctgccttagaaagagattatattgaagtgggtgccgattcttacgctgaggagttctaa

SEQ ID NO: 80787 - DNA, 1797 bp, Saccharomyces pastorianus
  modified_base (53)..(87): a, c, g, t, unknown, or other
atgtcagggtcatttaccaacgaaagtcttcatttgaacggcaatcacactgnnnnnnnnnnnnnnnnnnnnnnnnnnnnnnnnnnngaaactggacttaccataccagagagatcttctctaaggaggtctaaattcaacacatataagatcagactagagggtagtagccttccacaggcggtaaaactcaatagcctaatgaatatacaaactaatgacaattgcagaagtgcatcatcgcctgcctcatacacacaagtgcctcaggagcaagcatcattgaatgattttcacgagattttcgaccattacagaagaacaagtactgattggagtaccgaaaatgagaaatacgttgatagcaccaactactactcggatgaagaagatttgacgcatgcatctatttctcaagagagcagtcttttatctacagatagttctaacaacagcgttttaataaagccgcataacactggttcgatgatttctgaaaaattggatcagcacgttagctcgagtgaaaaatcaaataccaataacagcgaaccaaatcatggctggtcatggttgaattctagcaatggaagtttgaacggtaatgaacaaacttatcaacagcttacagatgatgaagacgatgaagaatgtgtgaacaatgaaaaagctgactttgttaacttgagtgtatcgaggagagcgaaatctaccaaacgtgcctctgaaagaataaaccattccaaaaatagacattcgccaattttccagatacattctgaagaagcaaaatccgtggtaatcactccttcagtcgtttcttcgtctgaatcccagccatctaagcctactgcaccagcagccgtggagaaaaaggtagaactgcctactgacacccaagccagtacacataagaaaaattccttggagaaaaggcttgccaaattattcaaaagaaaacaacatagtggtacctgcaaatcagatgtgaaagtaatcaaaaaaagtgttaaaaaagaactgaaaaagaaggcttcgcattcgagtttatcaaaattcaggaaaagtcccaagaaaaagccccaagaagcggaagtgaactgtgaacgcccttcatcccccaccaaaacaattaccgaagatatagatacagaaagcgtcattgaaccggaagtgagaagttcaaatgcttccacccttcttcctgacagccatactagccacagttctgaatttgtggtggaaactataagcgagttagacggcgacgattcatttgatattagtggtggtgatgtaaactacgacgtggaagtgcattctagtatcagtagagatacgacagctggactagaagaggatataggagcagagagagaagacaacacttcacctactgcccctcaaatctcaactttgcctccaagaaaattgacatttgaagatgtcgttaaaccagattacccaaacgctccaataaaattcacagacagtgcttttggattcccattaccaatgatcaccaactctacagtgattatgtttgaccatcgtctaggaattaatgttgaaagggctatttacagactcagccatctgaagcttagcgatcccgggagggaattaagacaacaagtattgctaagtaacttcatgtactcctacttgaatttagtcaatcataccttatacatggagcaggtgggcactggagatatagccttcaatggtgattctgccttgggaatgatggacaaaaatgattctgatggcacaatcttaattccagacatttaa

SEQ ID NO: 80788 - DNA, 1308 bp, Saccharomyces pastorianus
  modified_base (1088)..(1122): a, c, g, t, unknown, or other
  modified_base (1259)..(1259): a, c, g, t, unknown, or other
atggtactgatggaagatgtgcaaaacaaagatggccataatactgtagaaaacagtagtggtggtacggacagtaataataatattcaaatgaggcgaatgaggaagacgcagctgtccaagaaggagctttttgagaagaggaaatctgacgtgttaattgctgccaagtctttagatactgaaattcagaatgtgaaaaatttgaagcgattgtcgattggttcaatggatttggtaattgaccctgagctagagttcaaaatgaacagtagaaactcatattcttcagattcctcaaaggaatccctacaagaatcgctccatgaagagaacattatacgatcagaacaaaaggaagaacaagggagcgaagacaatgatgcatatgaagagggcgatgctactaatgtcgacgacagtatagatatcactcaaacagagtatttgcatgatgaagaaacattggagaaggaaaaaatcatccgtaatgcttcttcatccacttcatcttcagcaagagtaacgtcgaggaacagaaggctcagtggagtaaagacattggctcacgatgttgtattggatgtggagaacgaccacgattcaaaaatggttgatttaactcaaaaccttttgtgggtgcccgctgaccaacatcctaacgttaagcccgaaaactatttggaattgatccaagacactttacaaaacattcaaataagcacaaatcaagacattgatgaaaacaaattagaactgggtaacaatcatgtaatttcgaatagaaaacgcacgggctctgtagttagaaggccttctcggttgaagacatcttataccaaatttgatgacgagcctccccttgcagacaaaccacaagaaggagaaatacaagtggataagcgaatatcctcatctgacatcaaaaccataagatctgtatctttgaaagaaattactgaagagcttactaagatttccaataatgccggtttaacggactcagatgcggtgactttagccagaagcttgagcatgtcagggtcatttaccaacgaaagtcttcatttgaacggcaatcacactgnnnnnnnnnnnnnnnnnnnnnnnnnnnnnnnnnnngaaactggacttaccataccagagagatcttctctaaggaggtctaaattcaacacatataagatcagactagagggtagtagccttccacaggcggtaaaactcaatagcctaatgaatatacaaactaatgacanttgcagaagtgcatcatcgcctgcctcatacacacagtgcctcagagca

SEQ ID NO: 80789 - DNA, 378 bp, Saccharomyces pastorianus
atggctaagggcaagttcacagaatgtattgatgatattaaaacagtctcccaagcaggaaatgaagggcaaaaactactggttccagcatctgcatcattatacatcccaggtaagattgtagacaataagaaattcatggtcgacattggtacaggatattacgttgaaaagagcgctgaagcagcaatcgcattttaccaaaagaaagtagacaagcttaacaaagaatctgtacagatccaagatattattaaggaaaagacccagtattccttgtccatcgaggcccaaataagacaagccgctattagacagcatgaagcgatgagtaaacaacaacagcagcaacaaaaaaaggagtcgtctacagcctag

SEQ ID NO: 80790 - DNA, 777 bp, Saccharomyces pastorianus
atgatagacccgacacgatatatctttaacgttagaccatctttttcatcccagacgcgtaaatatgggtacaaattagattaccgccttgcacggtcatgtaataacaaggttgtcacctacatatgggtatcaagagctacgaatggtgtagtaattgccacagaaaagaagtcgtcctcgccactggccatgtcagaaacactttcgaaggtatccttactaacaccggacattggtgcagtatattccggtatggggcctgattatagagttttagtggataaatcaagaaaggtagcacatactagttataaacgaatttatggtgaataccctcccaccaaattactggtttctgaagtagccaaaataatgcaagaggctacacagtccggtggtgtcagaccctttggtgtttcactgttgattgctggccacgacgaatttaatgggtttagtttatatcaagtggatccttccggttcctacttcccttggaaagccaccgctataggaaaaggttctgtggcggcaaaaacgtttttagagaaaagatggaatgatgaactggaactagaagacgccattcatattgccttactaacgctgaaggagtcggtagagggcgaattcaatggtgacaccattgaactggctattattggcgatgagaaccctgacttgctaggctacactggtattccaaccgataaaggccctagatttagaaaattaacttctcaagaaataaatgatagattagaagcattatga

SEQ ID NO: 80791 - DNA, 387 bp, Saccharomyces pastorianus
atgaaatcacatttttttaagattttaaggcctttcttgccgcatcatactgatattaggtcaacacttgctactatgaatgcaaaagccacgtgggaagaatgggaggaacaagtagtgaagcctgtcgaaaaagtagtgcaagaaatatttgaacagccagatatcgatattaaggatgaaattactatcggcgaaaagcaatcatggggtggttcatatagaactgttccatactggagatgtcaaccatattttaggcctgttaacggtatcacaggtgataaaagagttatgcaaggcctcatagatgaaagcgtgaacaagaaacgtaaagctgacgtgccattagaatctgctgataaaaagaaggacgtgaaagcttaa

SEQ ID NO: 80792 - DNA, 819 bp, Saccharomyces pastorianus
atgactgaacctgccctgagtagcgctaataacgctctgatgcaaaaactaacaggtcgacaactttttgacaagatcggccgtcctactaggatcgttgcaccaatggtagaccaatccgaattagcatggcgtattctatcgagaagatacggtgcaaccttggcgtacactcccatgttacatgcaaaattatttgctacctcgaagaaatatagagaagataattggtcttccttagacggctctagcgtagataggccgttggttgtacagttctgcgctaatgacccagagtatctattggcggcagctaaactggtggaagataaatgcgatgcggtagatttgaatttgggctgtcctcaaggcatagctaagaaaggtcactatgggtcatttttgatggaagaatgggaccttatacacaatttaatcaacaccttgcacaaaaatttgaaagttccagttacagcaaaaatacgtatatttgacgactgtgaaaagagtttgaattacgccaagatggtgctggatgctggagctcaatttttaaccgtccatgggagagtaagagagcaaaaaggacaaaaaactggtttagctaactgggaaacaatcaaatacctaagagataatttacctaaagaaaccgtgttttttgctaacgggaatatcttatatcctgaagatatttcacgttgtatggaacatatcggtgctgacgcagtgatgagtgctgaggggaacttatacaatcctggtgttttctcatgtagtcctagaataagaacaaggagaagatatttccacgcgtag

SEQ ID NO: 80793 - DNA, 285 bp, Saccharomyces pastorianus
atgacatacggatatatctacaggaagtatagagtccacacatactgtacagcgtcagggctatggtttgttctattgtccgactttaaacagcagtcttacactcaggttttacagtatatttacagccatatttatgtcaaatacgtgagcaacaacttattatcaccgtacgatttcgctgaaaacgaaaatgaaatgagaggtcaagggacaagaaagatcaccaatagaaactttatatccgttctcgagtcatttctagcaccaatggttaatcagtga

SEQ ID NO: 80794 - DNA, 105 bp, Saccharomyces pastorianus
atgacccacaacaggaaacctgctgaaccaacaaaacctaacaatttggacgccactgatataaatcgtttgaaagatgggtccgtcacctgcattaaatcctaa

SEQ ID NO: 80795 - DNA, 2442 bp, Saccharomyces pastorianus
atgccgctgctattcaagggactgaaacagatggcaaagccaattgcctatgtttcaagattttcagcgaaacgaccaattcatataatacttttttctctaatcatatccgcattcgcttatctatccgtcattcagtattacttcaatggttggcaactagattcaaatagtgtttttgaaactgctccaaataaagactccaacactctatttcaagaatgttcccattactacagagattcctctctagatggttgggtatcaatcaccgcgcatgaagctagtgagttaccagccccacaccattactatctattaaacctgaacttcaatagtcctaatgaaactgactccattccagaactagctaacacggtttttgagaaagataatacaaaatatattctgcaagaagatctcagtgtttccaaagaaatttcttctactgatggaacgaaatggaggttaagaagtgacagaaaaagtcttttcgacgtaaagacgttagcatattctctctacgatgtattttcagaaaatgtaacccaagcagacccgtttgacgtccttattatggttactgcctacctaatgatgttctacaccatattcggcctcttcaatgacatgaggaagaccgggtcaaatttttggttgagcgcctctacagtggtcaattctgcatcatcacttttcttagcattgtatgtcacccaatgtattctaggcaaagaagtttccgcattaactctttttgaaggtttgcctttcattgtagttgttgttggtttcaagcacaaaatcaagattgcccagtatgccctggagaaatttgaaagagtcggtttatctaaaaggattactaccgatgaaatcgtttttgaatccgtgagcgaagagggtggtcgtttgattcaagaccatttgctttgtatttttgcctttatcggatgctctatgtatgctcaccaattgaagactttgacaaacttctgcatattatcagcatttatcctaatttttgaattgattttaactcctacattttattctgctatcttagcgcttagactggaaatgaatgttatccacagatctactattatcaagcaaacattagaagaagacggtgttgttccatctacagcaagaatcatttctaaagcagaaaagaaatccgtatcttctttcttaaatctcagtgtggttgtcattatcatgaaactctctgtcatactgttgttcgtcttcatcaacttttataactttggtgcaaattgggtcaatgatgccttcaattcattgtacttcgataaggaacgtgtttctctaccagattttattacctcgaatgcctctgaaaactttaaagagcaagctattgttagtgtcacgccattattatattacaaacccattaagtcctaccaacgcattgaggatatggttcttctattgcttcgtaatgtcagtgttgccattcgtgataggttcgtcagtaaattagttctttccgccttagtatgcagtgctgtcatcaatgtgtatttattaaatgctgctagaattcataccagttatactgcagaccaattggtgaagactgaagtcaccaagaagtcttttactgctcctgtacaaaaggcttctacaccagttttaaccaataaaacagtcatttctggatcgaaagtcaaaagtttatcatctgcgcaatcgagctcatcaggaccttcatcatctagtgaggaagatgattcccgcgatattgaaagcttggataagaaaatacgtcctttagaagaattagaagcattattaagtagtggtaatacaaaacaattgaagaacaaagaggtcgctgccttggttattcacggtaagttacctttgtacgctttggagaaaaaattaggtgatactacgagagcggttgcggtacgtaggaaggctctttcaattttggcagaagctcctgtattagcatctgatcgtttaccatataaaaattatgactacgaccgcgtatttggcgcttgttgtgaaaatgttataggttacatgcctttgcccgttggtgttataggccccttggttatcgatggtacatcttatcatataccaatggcaactacagagggttgtttggtagcttctgccatgcgtggctgtaaggcaatcaatgctggcggtggtgcaacaactgttttaactaaggatggtatgacaagaggcccagtagtccgtttcccaactttgaaaagatctggtgcctgtaagatatggttagactcagaagagggacaaaacgcaattaaaaaagcttttaactctacatcaagatttgcacgtctgcaacatattcaaacttgtctagcaggagatttactcttcatgagatttagaacaactactggtgacgcaatgggtatgaattga

SEQ ID NO: 80796 - DNA, 657 bp, Saccharomyces pastorianus
atgaggatgaaattatttggcgacgacatggacgacttggatgacgaagaggaagaagaagttcgtattgaagaagtccaagaagaagatgaagaagataatgatggagaagaagaacaagaagaagaagaagaagaagaacaaaaagaagaagttaagccagaacctaagaaaagcaaaaaggaaaaaaagagaaagcacgaagagaaagaagaagaaaagaaagctaaaaaagtaaagaaggtcgaattcaagaaggacttagaggagggtccaacaaaacccaaaagcaaaaaggaacaagataagcataaaccaaagagtaaggttttggaaggcggcatagtaatcgaagaccgtactatcggtgatggcccacaggctaagagaggtgccagagtaggcatgaggtacattggtaagttaaagaacggtaaagttttcgacaagaacaccagcggtaaaccatttgcattcaaacttggccgtggtgaagttatcaaaggctgggacattggtgttgccggtatgtctgttggtggcgaacgtagaatcatcattccagcaccatatgcctacgggaagcaagctctgccaggtattcctgccaattccgaactgacattcgacgttaaattggtttctatgaaaaactag

SEQ ID NO: 80797 - DNA, 624 bp, Saccharomyces pastorianus
atgtctgatttgttaccactagctacctacagtttgaatgttgaaccttataccccggttccagcaatcgacgtcacgatgcccatcaccgttcgtattactatggctgctttgaacccggaagccatcgatgaagagaacaaaccatcgactttaagaattatcaaaagaaacccggactttgaagatgatgattttttaggtggtgattttgatgaagacgaaatagacgaagaatcctctgaggaagaagaagaggaaaaaacccaaaagaaaaagaagagtaaaggcaagaaggctgaaagtgaaagtgaggatgatgaagaagacgatgacgaggacgatgagttccaagaatccgtccttttgactttatctccggaagcccaataccaacaatctttggacttgaccattactccagaagaagaagtccaattcattgtcactggttcttacgctatctccttgagcggtaactatgttaagcatccatttgatactccaatgggagtcgaaggtgaagacgaagatgaagacgctgacatctatgacagtgaagactacgacttgaccccagatgaggatgaaattatttggcgacgacatggacgacttggatga

SEQ ID NO: 80798 - DNA, 855 bp, Saccharomyces pastorianus
atggatatatacgtcaacacgaaatgtgattggttgcaaatcaacgtcagagaccaaacaatggatcggaaacatgtattagaggaattgcaattggaagagatgccattctttattccttatgacacaaaagtcaatgatatcaatgaaattattacgccggaattggatgaaatcttaggggaagctatcccagcagaatttagagaaaaactagatactaggtcattttttgatgaaagtgatcctaacaaggcacatcttccggaattcaatgggtgccatgtatttgggtccattccggtaaatagagttagtggcgaattgcagattacagcgaagagtttaggttacgtggcttcacgcaaagcaccactggaagaattaaaatttaatcatgttattaatgagttctcttttggtgatttctatccatatattgataacccattggataacactgcacagtttaatcaggatgaacctttaactacttacgtctattacacatctgttgtgcccactcttttcaagaaattgggggcagaagtggatactaatcaatattctgttaacgattaccgctatttgtacaaagatgtcgctgctaaaggtgataaaatgccgggcatcttcttcaaatacaatttcgaaccattatccatagtagtttctgatgttcgtttaagctttatacagtttttggtcagattagtggcaatctgctcatttttggtctactgtgcttcgtggattttcacactactggatatggctcttatcaccatcatgggacctaagtggtccttgcgttatcagccagatgataaaactaagggtattttagataggtag

SEQ ID NO: 80799 - DNA, 258 bp, Saccharomyces pastorianus
atggctgttggtaagaataagagactatccagaggtaagaagggtttgaagaagaaggtcgttgacccatttaccagaaaggaatggttcgatattaaagccccatccacttttgaaaacagaaatgttggtaagactttagttaacaagtccactggtttgaagaatgcttccgatgctttgaagggtagagttgtcgaagttgtttggctgacttgcaaggttctgaagaccattctttcagaaaggtcaagttga

SEQ ID NO: 80800 - DNA, 2262 bp, Saccharomyces pastorianus
atgagggataaaaatgtcatgaattttattaataaagacagtcctttatcctggaacgatatgttcaaacccagtataatacaaccaccgcagttaatttctgaaaactcatttgaccagagcagtcaaaaaaaatcgagatcgacagggttcaaaaatccattaagaccagcgttgaaaaaggaaagttcttttgatgaacttcaaaatagttcaatatctcaagagagaagtttggaaatgataaatgaaaacgaaaagaagaaaatgcaatttggagaaaagattgctgttttgacgcaaagacctagctttactgaactgcagaatgaccaagatgacagtaacttgaatccccataatggtgtgaaagtcaagataccgatttgcttaagcaaagaacaagaaagtatcatcaagttggcagaaaatggccacaacattttttatacagggagtgccggtaccggtaaatccattcttttacgtgaaatgataaaagttttaaaaggcatatatggtagggagaatgttgcagtcactgcttccacgggtttagctgcttgtaatatcggtggtataaccatacactcgttcgctggtataggattaggaaaaggtgatgcggataaactctataaaaaagttcgtaggtctcgaaagcacctaaggcgctgggagaatattggtgctttggttgtcgatgaaatatcaatgttagacgcagaactgctagataaactcgatttcatagctagaaaaatacggaaaaatcatcaacccttcggtggaattcaactcatcttctgtggggattttttccagttaccgccagtatcaaaagatcctaatagaccaactaagtttgctttcgaatccaaggcttggaaagaaggtgtaaaaatgacgattatgctacaaaaggtttttagacagcgaggtgatgttaagttcattgacatgttgaatcggatgagactaggcaatattgatgatgaaacagaaagagagttcaagaagctttccagaccattgccagacgatgaaattattcccgcggaactttatagtaccagaatggaagtagaaagggccaataattcaagactaagtaaattgccaggccaggtgcatatttttaatgcaatcgatggcggtgctttggaagacgaagagttaaaggaaagactgttacaaaattttttagctccaaaggaattacatttgaaagttggcgctcaggttatgatggtaaaaaatctagacgcaacattagttaatggatcccttggtaaagtcatcgaattcatggatccagaaacatatttttgttatgaggcgctaacaaacgatccatctatgcctccagaaaaactcgagacttgggcagaaaacccttcaaaactaaaagctgcaatggagagggagcaaagtgatggggaagaaagtgcggtagctagtcgcaaatcttcagtgaaggagggatttgctaagagtgatataggtgagccggtctctcccctagattcctcagtttttgacttcatgaagagagtcaagacagatgacgaagttgtgctggaaaatataaaacgcaaggaacaactgatgcagaccatacatcaaaactccgcaggaaaacgaaggctacctctcgtgagattcaaagcttctgatatgagtacgaggatggtgcttgtcgagccggaggattgggcgatagaagacgaaaatgaaaagccactggtatcaagggttcaattaccgctaatgcttgcctggtcactatccattcacaaatctcagggtcagacacttccaaaagttaaagtggatttacgtagagtattcgaaaagggtcaggcgtacgttgccctttctagagctgtttcaagagaaggactacaggtgttaaattttgacagaactaggatcaaagcacatcaaaaggtaattgatttttatcttactttatcttcagccgaaagtgcctataagcaacttgaggcagatgagcaagtgaaaaaaaggaagttagactacgcaccaggccctaaatataaggctaaatccaagtcaaagtcaaattctccagcacccatatcagcgaccacacaatctaatagtggtatcgcagcgatgttgcaaagacacagtaggaagagatttcagttgaaaaaagagtctaatagtaatcaagttcattcattggtttccgacgaacctcgtggtcaggataccgaagaccacatcttagaataa

SEQ ID NO: 80801 - DNA, 285 bp, Saccharomyces pastorianus
atgccaaagtggataagatcaacattgaatcatattataccaagaagaccatttatctgtagtttcaacagttttcttttactcaaaaacgtatcgcacgccaaactatcgttttctatgagtagtcgtggtttcaggtctaataactttattcaagcacaattgaagcatccttccatactttcaaaagaagacctagatttgctctctgattcggatgattgggaagaacctgattgcatacagttagaaactgagaagccaagaaaagaaaattatcactga

SEQ ID NO: 80802 - DNA, 1248 bp, Saccharomyces pastorianus
atgtggcttattttactaacattgctatgtaaatactgttatttttttttcttttctggctgggctgaaaatttcttcagtcttcataaagttgagaaaataaaaggaaacaagtacatctttttgaacacagaagacggtaagtgtccaggtaagttggttgggttagtcacctctcgtgatatacaattcttagaagatgattctttggttgtttctgaagtcatgactaaaaatccagttactggcatcaagggtattactttgaaagaaggtaatgaaatcctaaaacaaaccaagaaaggtaaattgcttatcgttgatgataacggtaacctcgtttccatgttgtcaagagcggatttgatgaagaatcaaaactacccattagcttctaaatccgccaccaccaagcaattgctatgtggtgctgcaattggtactatcgaagctgataaggaaagattaagactattagtcgaagcaggtttggatgttgttatcttagattcctctcaaggtaactctgttttccaattgaacatgatcaaatggattaaagaaactttcccagatttggaaatcattgctggtaacgttgccaccagagaacaagctgctaacttgattgctgccggtgccgacggtttaagaattggtatgggttctgggtctatttgtatcactcaagaagttatggcttgtggtagaccacaaggtacagctgtctacaacgtttgtcaatttgctaaccaatttggcgttccatgtatggctgatggtggtgtccaaaacattggccacatcaccaaggctttggcccttggttcctccaccgtcatgatgggtggtatgttagctggtactaccgagtcaccaggtgaatacttctacaaggatggtaagagattgaaggcttatcgtggtatggggtccattgacgccatgcaaaagaccggtaacaagggtaatgcctctacctctcgttatttctctgagtcagacagtgtcttggttgcacaaggtgtttctggggctgtcgtagacaaaggttccatcaagaagtttatcccatatttgtacaacggtttacaacattcttgtcaagacattggttgcgaatctctaactttattgaaagagaatgttcaaaatggtgaagttagatttgaattcagaaccgcttctgctcaattagaaggtggtgtccataatttgcactcctatgaaaaacgtctatacaattga

SEQ ID NO: 80803 - DNA, 471 bp, Saccharomyces pastorianus
atgagtgctgctccattggattacaaaaaggctttagaacatttgaagacatacagttccaaggacggtctttctgtccaggaattgatggactccacaactagaggtgggttgacctacaatgattttttggtcttaccaggcttggtcaatttcccatcttctgctgtcagtttgcaaaccaaattgaccaagaaaatcactttgaacactccttttgtctcttctcctatggacacagtcactgaagctgatatggctatttatatggctttattgggtggtattggtttcatccatcacaactgtactccaaaggaacaggcttccatggtcaagaaagttaaaatgtttgaaaacggtttcatcaattctccaatagtaatttctccaaccaccactgttggtgaagttaaggttatgaagagaaagtttggtttctctggcttcccagttactggtatgttataa

SEQ ID NO: 80804 - DNA, 75 bp, Saccharomyces pastorianus
atgtggcattctgcccatttttttcacgaaaattctctctctataatgaagacccttgtgccctggactctgtaa

SEQ ID NO: 80805 - DNA, 129 bp, Saccharomyces pastorianus
atgattccctttcctgcacaacacgagatctttcacgcatacatcggaaggatcaccccccactcaagtcgtgcattgctaacatgtggcattctgcccatttttttcacgaaaattctctctctataa

SEQ ID NO: 80806 - DNA, 942 bp, Saccharomyces pastorianus
atgggccctgcatgttcactagatcaagccgaatccatttataaggctgctgctgaacgtggggttcaaaccatcatctctttacaaggtcgtaaatcaccatatattttgagagcaaaagaattaatatctcaaggctatatcggcgacattaattcgatcgagattgctggaaatggcggttggtacggctacgaaaggcctgttaaatcaccaaaatacatctatgaaatcgggaacggtgtagatctggtaaccacaacatttggtcacacaatcgatattttacaatacatgacaagttcgtacttttccaggataaatgcaatggttttcaataatattccagagcaagagctgatagatgagcgtggtaaccgattgggccagcgagtcccaaagacagtaccggatcatcttttattccaaggcacattgttaaatggcaatgttccagtgtcatgcagtttcaaaggtggcaaacctaccaaaaaatttaccaaaaatttggtcattgatattcacggtaccaagggagatttgaaacttgaaggcgatgccggattcgcagaaatttcaaatctggtcctttactacagtggaactagagcaaacgacttcccgctagctaatggacaacaagctcctttagacccggggtatgatgcaggtaaagaaatcatggaagtatatcatttacgaaattataatgccattgtgggtaatattcatcgactgtatcaatctatctctgacttccacttcaatacaaagaaaaatcctgaattaccctcacaatttgtaatgcaaggtttcgatttcgaaggctttcccaccttgatggatgctctgatattacacaggttaatcgagagcgtttataaaagtaacatgatgggctccacattaaacgttagcaatatctcgcattatagtttataa

SEQ ID NO: 80807 - DNA, 387 bp, Saccharomyces pastorianus
atggactacaacaagagatctttggtctcaaccgtgcctaatgcagctcccataagagtcggattcgtcggtctcaacgcagccaaaggatgggcaatcaagacacattaccccgccatactgcaactatcgtcacaatttcaaatcactgccttatacagtccaaaaattgagacttctattgccaccatccagcgtctaaaattgagtaatgccactgcttttcccactttagagtcatttgcatcatcttccactatagatatgatagtgatagctatccaagtggccagtcattatgacgttgttatgcctctcttggaattctccaaaaataatccgaacctcaagtatcttttcgtagaatgggccctgcatgttcactag

SEQ ID NO: 80808 - DNA, 1641 bp, Saccharomyces pastorianus
atgtcatgcgtggtttgccattcctcttctacatgggtaagctacacgtggaaaaatgtgtggaccatacggcagttaaaggaccaacacatgctaagttgctccaaatttgttaacgcagaggttgcaatcaacggtgtttgttcaatatcgagctcaggacgcttaaatattggcaaagtttccaactttccaactttggatgactggtttcacgttcatgaatcaagtgttaacaagcaagaaaacggtggaggagatgaaagcaatgaagaggaagaagaagaaatggaagaagaaatggaaatgttacaagtatctacattccgacctcgtactattttatcatttcctaataatccgaaaagcattttgtttattgataatcacagtggtaagaaacaatgccgtatatcactgcaaattgatggtgaatgcttaaagtttggcagttcggatcatttatacaagatactggacgatatcgattgcgtttccgctgctataatagatttcacaagacaagctgatcatttgatcatttgtgctggcgacaaaaggctgttaacatacaagatattagttaacaaagataaactatcttttgatattgaattacttcaccaaacagaaatcatttcaccaatacatgctatgttgaagtttaaaaacttcttgctgacagccatgggctccactattgtcctttatggtttggggaaaaagcaattattaagaaggtccgtaacacagaccccggtatccataacaaaaattgtgtctatggaccagtggaattatgaaagactggccgttggtgatatacatgaatctgtcactttatttatctgggatcctgcggggaatgtgtttattccgttcgtagatgactctgtaaaacgccatgtgacggtattgaaatttctagatgaggcaactgttataggcgctgatagatatggaaatgcgtggactttaaggtctccaccagagtgcgaaaaaatcatgtcaaatcatgatcccagcgaattatctaatggggccatcaagtacccgctagacgtcatcactttacagcagaaattacccaatacttatgattgcaagttcaagtttcaactactgaaccacttctttgttaatgatatcatcactgatttccatatcctggacagcctttcaaattctgatagacctggttgtatctatatgggcttacaaggaaccgtgggatgctttatccccttattatccaaggggaatgtttttatgatgggaaacatcgagaatataatggctgaggcggatgatacgttttatttagattatgaatcaagaaagaagaataacaatatgcgtaaggaagacgatgaagaggaatctggaagtgttgtgttacaaggacggcatggtatagaggatgaaataatatgtgagggttcctgttccattttaggtagagaccaccaagaatacagaagctattatgcccctgtacgtaaagttattgatggtgatttatgtgaaaatttcctgagactttccttgaatgagcaggaatttttggccaaaaatttaaagagtgtacaagtggaggatataattcaaacaatcaacgaagtcagaacaaattacatgtaa

SEQ ID NO: 80809 - DNA, 2139 bp, Saccharomyces pastorianus
atgtggggaggtggcaaaatggcagtagtaagcttgtcgccccacacggcgaagatgcgtaaactatttgggcaagctagcacaacgatggcttatgacggtttaaaacgagaggctgaaagaagaacaaggagtgaccataacataacaatggttgctaaagatgatgagctatacttgtaccatcttactttaaagaaacagacgaatttcgtgcactcctgcatcggacacttcgtcgatctggaagcagggtccaagcgtgagcagtcgcaattgtgcgtagctactgagacgcatttagaactttatgatactgcagatggggaactaaagcttattgccaagtttcaaaacctgtttgcgacgataacctcgatgaagtcgctggatctgccgcattcagggtcaagggcaaaagcttccaactggcccacttttctagcgctaacttccgattctggtaacctaagtatcgtgcaaatcattatgcatgcaggtgctcttagacttaagactttagtgaaccagccattgacgaggaccacccttcgaagagtctctcccatatcatacatggaaattgaccctaatgggcgttgtatcattctctcatctgtcgaacaaaataaattgtgtttcctcgttgattatgctcaaaaattgaggatttcgtctccattggaaatcatcagaccccatatggtaacgctggatatggcagttgttgatgtaaatttcaataatccatgttttgttaccttagaaatcgacaatgccgctactcaactatcagtacacttgatattttatgtcctcgagttgggtttgaatcacatcgtcaagaaggcagattatttagttaacccatctgccaatttcgtactgagtttgccagatctatcgcgatataatataacaacttcgctaagcgacaacaactatgatgctgactatgatacccttttcaacccttttgttgtcataggcttcgaaaatcatattctggtaaaggatatgaacggatttttcagcctgaaagtggaaatacccaaaagatctatcacaaatagccgtcataaaaatgtaacaatcatatcaggcatagtgcagaaattgaaaaatgattttttcgtacttttacaatctaaccatggcgatctttttaagttaactgtaagtccagacactaatgatagaaatagacctttagttcaattgtcctactttgatacaatccaaaattcacaccaattacacattttcaaaaacggttatctttttgcactatctgaaatgaataacaactttcttttccagtttgagaaacttggtgtagagaaaaatgatttttctaatgtttcaacctcaaaagatccaaataagtcgctagttttcgaaccatccataaagttacagaatttgagcatattatcgcaacaattgaatttgaacccttcaataaaatctcaaattgtcagtgattcgccactgtctatcgccactaaacattttacaaacaacaagataataactttaacaaatgctgtgaattactctaatttgatatctactggtttacccccgaacgcaaccaagttatggctaatacccgatcctgcaacaaccggcgataacaatactcttttgttcataacttttcccaagaaaactatgatactacaaattgacaacgagtccatggaggaactaacaccggatgaagcaacgcgttcggctttcaagctctctcaggacacaacaattcatacatgcctaatgggctcacactctattatccaagtatgcaccgcagaactaagacatatcgtaccgactggtaaatctaggtattctaataagctgacttgggtgccaccagcgggaattcgtattgtatgtgccacgtcctcgaaaacacaactaattatatcattatcaaattacgaattggtttatttcaagatagatgtatcttcggattcgttaatcgaattaaccacccacccagaattggaaacaatgccctctaaagttgcgattgtacaagatacgcagcatgctgatttattagccattgctgacaatgagggtatgatcaaaataatgtctcttaaagaccaaaaggaagatttttaa

SEQ ID NO: 80810 - DNA, 207 bp, Saccharomyces pastorianus
atgggaatattgatagatgatgaggaagaagggaccatatgtggtgacaacaaaacgcaaaaaaaattcgattatgatagtcctgattatggcgacgaaagcacaataccgagttactactgctactcggatgtagaaacgtacgaaagagtatatacgcccataaaggcatatttcccccagaaatacaaacataaatacatataa

SEQ ID NO: 80811 - DNA, 864 bp, Saccharomyces pastorianus
atggaatcaagtttacaaaaattgaaattccaggatattgacataaatcttattcctactgcgaagtggaccacaaaattacagtatattctatacacctggtgtcagtcgatactacatgtggccatgtttttttctgatatatacacgtgtattaaattactggcatttaacacatggtcgaacaatatcatccaaccattcttggaattccgtatttcaaaatggttgtttagcggatgcatattatgctcctcattaatattaatttgggagttggtaattggattgagagtgtataggaagaaagagattacatcgaactacatgaatggcattagcagattaataaattgcttgttcaatttcaaaaagtatcaaattttcgaactaatagtgctgactgatgagaaaaaattcagtaagtggttattcttttcatattttgaaatcagtggatgtttgaggctattgttcggtgactctccaaggcaaataatcaacggattaactttgtggtcagttttactgacagtttcgaatgagaccagtagcggaacccatagtactcaaagcctaggtaatttagatgacctaaatggaataataaacaagataaaacatattgctaagacaaattacgaagaaagtgtgatcttgtccttcatgttgttctcgtttatcatatgggtaattttaataagcaaattaattctaagcataataatattcatcattttcatacgtccgagatttttgtctagtacaaggaaggttaaggggtatgaattgaaactacgaaagtatgtgtctaaagtcattgacgagaatttaagtagaactgtctacgaatgggaatattga

SEQ ID NO: 80812 - DNA, 441 bp, Saccharomyces pastorianus
atgaagtgtcgatttgaaagagaaatctaccaaacgtataaaaaatttcaaaggccaatatggctaatgtttttactgatagtcattagtaaagtaatcgagatcaagctgaagaattattatagaaagaaggcaagaattgaagaactcgttactcaaaccatggaaaaattgaaattccaaaagattaaatcaatgtccgatccgaaagaaaacgcgtatttgagcatagttcaattgcgtgacatctttctttctgatattgtcgatctgaaatacaaaaatcaattatggtcagaagtggtaaaatatttagagcataataacagtaatattaaatcgaacttaactgaaattcgaggtgaaataatgaaatgttgggaatggataggtccgatggaacccaatgaacctaaggattccgctgaaaacaaaatataa

SEQ ID NO: 80813 - DNA, 2004 bp, Saccharomyces pastorianus
atgaatagtgacttggagtatttagaggacggttttgatccgaattcaatgaaagttgcgactttgaggaggatattggtagaaaataatgtcgatttcccatctaatgctaggaaaaatgcgctggtggggctgttcgatgaaaaggttaaaccgcagatcccgcagttacggaaaatgtatctgaacgttcggcccagcgatgaaggtattgtgaaaatggaccgtccctcatcttccccatctatagcttcacctcgtagaagtagacgagctcgcagggagaaatctgcttcccccatggccaaacagtttaagaagaatagaatactggatgatgtaagtaatgatgatgatgatgatgatgatgatgatgatgatgatgatgatgatgatgatgatgatgatgatgacaatgataaaaaagacgatcctttaattgtatctagtggaacggataccgatgaagtggacgatgaagaggatgatgtgataacatcaagctccaacaaatcagacaccaatgatttccagcaaaattccgatactcgtaagaaaaggaaagaccctgattctgacgactggtctgaatctaattcaaaggaaaataaaatcgataataagcatttgaacctcctatcatcagattcagaaattgaacaggattaccagaaggcaaaaaagcgtaagacgagtgatttgaaccaagagcatggaaatggctctgccattttaggaaaactttccgtcaaaacaccaataaagaacacaaatagaaagccagtaatcatggataattttaacgattcgttgacttcaagcggtacggaaaatgatccatttgtaccgaacatacgacacaatccaaaagagctcggaactgccaatggaacaggccatagcacacccttgagtaagttaaaagtttctgcctcatttgcggataaattgcctcaaaaggaggtaccatctacaatactggttccagaagtggaacagcaagaaccttctcagagtgaaagaacaccgtctttgttttcgtccgaaggctctggctcagagtcggaagcacccttgcttccagagatcaccacgccaggtcctcatcagcctatgggtaataccagcaataatgtggtcgaaatgatagatacagatagtagtaacttggtatgggatgaagatgaagttttagtgcctacaaggatcgagactccccaattacccacagagaaagacgtcgaaaagtgtgaagcaagagtgcaagaacttcaaggggaagtaaatgagcaattagagcatgaaaatgggagtgaatttgatgttaagcaaggatctgggaaggtcgggaacaggcataagttcaaaagagcactcaaatttttgagcaaatcattactggcgctatttttattttgcatattcattgttattcctctcttatttggcctctggtatagagagcaaagactgctcataggttactgtgggcatgaagtaccatcccatcgagttagtggcaattccttcgagtttattcaaaaactggataatttgttgcaggactacagaccgaaatgtatcccttgtccacccaatggtatttgttatccttatttgaaacttaaatgtaagccagattacaagttagcaccatctagacttgactttttggaaattattcctgcacaaggcaaatgtgttaaagacgacaaaaaacagcagttagtttccgaagtggttgaaaaatctatagagtttctgagagccaaaaatgcacaaatttcatgtggtgacggaaaagacgacatcgagagtggtatgacggaagatgccctctatcaaatatttaatgaggctagagctccttggattcgcgacgatgaatttgaggacctgtggatccaagttatcaaagatttaactgaagaaccagaaatattatggaggcaagtgagtacaatttattatcttacaaaaattattaaacctgttattatatga

SEQ ID NO: 80814 - DNA, 1515 bp, Saccharomyces pastorianus
atggcgtttttaagctattttgccactgagaatcaacaaatgcaaacaaggaggttgtcaagaactgctgaaggttctggtggctttggtgtgttgttgatgaatgaaattatggatatggatgagaagaagcccgttttcggtaaccattccgaggacatacagaccaaattggacaagaaattaggacctgagtatatctcaaagagagttgggtttggaacaagcaggattgcatacatcgaaggttggagagtaattaatcttgctaatcaaatctttggatataatggctggtctacggaggtaaaaagtgtagttatcgattttttggatgagcgacagggaaagtttagcatagggtgtactgcaattgttcgtgttacgttgactagcgggacttatagggaagatattgggtatggtaccgtggagaacgaaagacggaaacctgccgctttcgaaagggccaagaaatctgccgttacggatgccttgaaaagatctttgagagggtttggtaatgctctaggaaattgtctttacgataaagattttctggcaaagatcgataaggtgaagttcgatccgccagattttgacgaaaacaatttgtttaggccaacggatgaaatcagcgaaagctcaagaacgaatactttgcatgaaaatcaagaacaacaacaatacccgaataaaagaaggcaattgactaaagttacaaataccaatcccgactcgacgaagaacctggtgaaaatagaaaatacagtaagtcgaggtaccccaatgatggccgcacctgctgaggctaacagtaaaaacagcagtaataaagatactgatctcaaatctctcgatgcttccaaacaggatcaagatgaccttctcgatgattctcttatgtttagcgatgattttcaagacgacgacttgataaatatgggctacacatacagtaatgttttaacgacagagaaggatcccgttgtagctaagcaaagcccaactgctagctcaaacccagaggcagaacaaatcacctttgttacagctaaggctgcaacttccgtacaaaatgaacgttatattggtgaagagagcatttttgatcccaaataccaggcacaatccattaggcacaccgttgatcagactacgtccaagcatgttccagcgagtgtgctaaaagacaaaacgatgaccaccgcgagggattctgtctatgaaaaatttgcaccaaagggaaaacaattgagcatgaagaacaatgataaagaactggggcctcatatgctagaaggggctgggaatcaagtaccgcgtgaaaccacaccaattaaaacgaacgctacagcttttccgcctgcagctgctccacggtttgcgccgccttctaaggtagtacatcctaatggaaatggtgcagtgccagccgttccgcaacaaagatcgacacgaagagaagttggaagaccaaagatcaatcccctgcatgcacgcaagcctacttga

SEQ ID NO: 80815 - DNA, 867 bp, Saccharomyces pastorianus
atgtatgagaacgggaaactaacaagcgccaacgaaagactcttcgggaaccgaccctctatgatggcgccattacgggataacggcttattagatgaatcaccaaacaggctgagggtaagaactgacgatagtgtattgcttaaccgcggaaacaagaaaaggcataggtcctcgtattacgacaacgatttagatgaaacgacacaaacttttaacggctctattttcacccacgaaacaacatttatgactgctatgcgtctgatgttaaaaaaactgaaaaattctataatgtcgtttatcttcccttcctacgcagaaagacaatcatctgatgaaagcgacaattacagactattaccaaatggctccaacaaagcccaaatctcgataattgacatatggtccatttccaagaaaaggcaagctgagaagctggttccattgcccatatgccacgcaaatagtgtggtagcactgacaggactgctgatccgatcaaagacagaagatccaaaaggcggtatcattgcatccgttggggatattcttaagactttggagaggtccatctgtgcactgggtgaatttgccgattgggatccggaatcgatggcatacactgccttccaaacacaaaggacagcccaagatagagtacaacaagacagtgaagacgaagatagcatgaaagacactaccgacatgatcagtgttctttatcagctgtccactagtgcttttatggagattgtacttgaatacaatgttgctctgaacgacgtatatttggatgcagacgtggccaagttagcgaactggtttctagaagtgtacgcctcaggcaaccctaatgctacgtaa

SEQ ID NO: 80816 - DNA, 828 bp, Saccharomyces pastorianus
atgatacagacgccaagggagttgttgaatccacggtacacgtaccataccatctttagcgacgtgtgcaagacccgattcaaccatttagttacgaggttgtttttcatatgttctattatccaaactgtggtgatttcactgctggcgttgccacactcaccgttatggaaactggcattggcatttgttcccaatattttagctcttaacctagtttcccttttgatcattgtgacaagaaaaaattacatgcatgtaaagaattttgggttcgctaattcacttactttcattctaggccaattgttatcagtaaagtttcttgtataccagggagtctatagcatgggcagcatccttttatcattcgtactgggtgtggttttcggacgtggcggatctggatggaagccatactataagctgtttatttggctagtcgttcccacgatttacaacctacaacatcatgtcactgacgctgacaaattgtcgttcaactgcgaaaacttttttcaggccccacaagactacgtattagagcgtgtcaagaggattatggagaagtcagtcattctaagtgtaatcagcatgttcgtattaccaatctttaccacagtatttttttccaggcaaaaatcgggattatttgattcatttacgaatggcgtgctagctgtcacaaatttactaataatctcctgcattatcttcatcactttcgaattcataaatatagcatttgacgcacatatgtccataggttgtctgcacaagggcaagctaatttcgaatttgtcgtcgacgccgatggaacctgcttag

SEQ ID NO: 80817 - DNA, 111 bp, Saccharomyces pastorianus
atggaccgacaagaacggtactgtctgccatgtaactggactccaggtgctgctaccatcaagccaaccgttgaagactccaaggaatacttcgaagctgccaacaaataa

SEQ ID NO: 80818 - DNA, 615 bp, Saccharomyces pastorianus
atggtcgctcaagttcaaaagcaagctccaacttttaagaaaactgccgtcgtcgacggtgtctttgacgaagtctccttggacaaatacaagggtaagtacgttgtcctagcctttattccattggccttcactttcgtctgtccaaccgaaatcattgctttctcagaagctgctaagaaattcgaagaacaaggcgctcaagttcttttcgcctccactgactccgaatactcccttttggcatggaccaatatcccaagaaaggaaggtggtttgggcccaatcaacattccattgttggctgacaccaaccactctttgtccagagactatggtgtcttgatcgaagaagaaggtgtcgccttgagaggtttgttcatcatcgacccaaagggtgtcattagacacatcaccattaacgatttgccagtcggtagaaacgttgacgaagccttgagattggttgaagccttccaatggaccgacaagaacggtactgtctgccatgtaactggactccaggtgctgctaccatcaagccaaccgttgaagactccaaggaatacttcgaagctgccaacaaataagacgcttgcagagttgtctaaatga

SEQ ID NO: 80819 - DNA, 225 bp, Saccharomyces pastorianus
atgcaaaacccaactcattacaagatcccagcctggttcttaaaccgtcaaaacgacattactgatggtaaggactaccacactttggctaacaacgtcgaatccaagttgagagatgacttggaaagattaaagaagatcagagcccaccgtggtattagacacttctggggtttacgtgttagaggtcaacacaccaagaccactggtagaagaagagcttaa

SEQ ID NO: 80820 - DNA, 546 bp, Saccharomyces pastorianus
atgccccaaaagggttctggtagggcaagagtcggggatgctaactctccaacaagacataatggtggtagggcattggcaagaactgcaccaaacgactatactacagagctaccatccaaggtttattccatggctttcaacaacgctttgagccaccaatataaaagtggaaagttgtttgttattggtggtgaaaaggtcgacttaatatctcccacaccagaactcgacttgaacaggctggatcttgtgaatacaaacacagttgagggcaaagagatttttgagggcgaagtcatcttcagaaaattcttggaggaatttcaacttaaaggtaagagattacttttcattacagacaagactagggaagggctgataaagagttctgatccatacaaacaaaaagtagatgttatacagaaagaacttgttgaggtaaatgacatactaagagcgcaagctgtttttatcgaattggaagctcttgaatatctagcaatggcccatcagaaagaaatccttcactccgtgtctaactga

SEQ ID NO: 80821 - DNA, 240 bp, Saccharomyces pastorianus
atgaagagaatccaaaagggtccagttagaggtatctctttcaaattgcaagaagaagaaagagaaagaaaggaccaatacatcccagaagtctctgctttggacttgtctcgttctaacggtgttttgaacgttgacaaccaaacttctgacttggttaaatctttgggtttgaagttgccattatctgtcatcaacgtttctgcccaaagagacagacgttacagaaagagagtttaa

SEQ ID NO: 80822 - DNA, 219 bp, Saccharomyces pastorianus
atgtatccaattgagtactcaccatataaattgtctgagttaggagccaacccctatcgtctgccatggtgtatgaggggattgatgtacgagtccaacaagcatttcagtaatgaagaaatcaagatgttgtttaaggaatttgaggaatgggagcctgagacaaagcaattgaaggacataaaaaacaggcttaatggtttgaaatatcgactctga

SEQ ID NO: 80823 - DNA, 108 bp, Saccharomyces pastorianus
atggtccattctacggttgcagatcatactttgtttgttcgtgcttaccatacgagtgataaagactcattgagggagttattcgagtttcataagtttgattcctaa

SEQ ID NO: 80824 - DNA, 1143 bp, Saccharomyces pastorianus
atggtcacgactccattgcattcctcgccgaaaagcagtctgaaatcttcaacgacctcactgcgctcagtacatactcagtctggtcgtatggggcctagtgagcctaagcacagaacaaccaaatcctggtctatatgggggggtaatgacgaggaagaaccggagttatctaataaaaataaaggaaaggaaaccgcccaagacaacagtcaagaaaatgacaatgtttcgaatgagggcacacgcttgcacgataatcaacaaacaacgattttaaaggaaaccaccaggatcgagaagggtgagaaggacaaaaaagacagaaatgcagctatagtagaaaaaaacacaagatcacgagcatggccattcttttggggccgtaacaaaaaagatccggagccgacgcataacattcccactgatgcggataataacactttatcacgtttagcaaatagtctaaatccggctcctctaaccaacacttacataccttataaacctgatgctatattgatcagagataaaggtgtcaaaactgctaagaaattaacagatgacataggcaatcagtttccgaacattgttgtaccaagtttcgatattttaccgaaacaaaccatatggaatacagtcacatccacaatttggaagtggaagactgaatactgggatagaagaccttcatcaagggtacgagagggggaagaacaggtgcagcactcacaaaatcagttaaaagaggaaacaaacacagttgcaaacgaggcaaaagatgaggagcggttggaacacaacagaggatctctatttagggttgatccatggaaaaaaataaaccttctatcagattaccaatctaggcccatcagagttctcattgtcggcgttcatgggttctttccaacaaaaattattagaccgtttattggtgagccaacgggtacatctaccaagtttgtcacagaagctgaggaaatagtgaaggaatattttgatcaacataaagtacccattgaaataagcaagattgctcttgaaagagaaggagagatatttgatagagtagatttcttctacgaagttatgaagcattggagcaaagaaataaccattctgatttatcaatctcgttag

SEQ ID NO: 80825 - DNA, 921 bp, Saccharomyces pastorianus
atgatctatttgaaatgcgtacacgagttggaaccttggctggttgctcgccaactaggtgtcagaaacaccccggagatattcctcattgccaacgtggctaataaggcttcccattcagaaactttgccctcacaaaggctctccattctcggcaagttaaaggtcaattcactgaacagattcttgcagtcgttaacaaacgtggtggaaaagtacactccagaattagttgttaataaaactgaaatgcacgagctacgcatgtcaagagaaataaaaaaactgcaggaggatgcgtacaaaaagtcgctagaaatggacagaattaaagctatagaaaaggaaaagagcttgaaacacgctcaggatttgaaattaaactcaactgctcggcaattaaaatggttaaaggcttgcatcgatgagatacagccgttcgagacaacggggaagcaagctactctgcaatttagaacttctagtggcaaaagattcgtcaagaagttcccctccatgactacactttaccaaatctaccaatccattgggtgtcacatatacctcgcggtatattctagtgaccccgtagaatggtctaacgccctccaggacaaaatcaggcaattatctgcagacgatgatgtgctctgctttaaagaaggacaacttgaaactgctactgctaccacgatcgaagagctcggccacatcatcaacaacgagcttacctcatttgatctcgaacgtggtaaacttgaattcgactttgaattggtatcgcccttccctaagtatactgtgcatcctaacgagcacatgtcggtggaccaagtgccccagctatggccaaatggcagtcttctagtggaagcactggatgaagaagatgaagaagatgaggaaaatgaagaacaatga

SEQ ID NO: 80826 - DNA, 435 bp, Saccharomyces pastorianus
atgaaaaaaaaagtaaactccagaaactctttgtacgcgtttgtcgtttttaacgatatgctattttatcattgttcttcattttcctcatcttcttcatcttcttcatccagtgcttccactagaagactgccatttggccatagctggggcacttggtccaccgacatgtgctcgttaggatgcacagtatacttagggaagggcgataccaattcaaagtcgaattcaagtttaccacgttcgagatcaaatgaggtaagctcgttgttgatgatgtggccgagctcttcgatcgtggtagcagtagcagtttcaagttgtccttctttaaagcagagcacatcatcgtctgcagataattgcctgattttgtcctggagggcgttagaccattctacggggtcactagaatataccgcgaggtatatgtga

SEQ ID NO: 80827 - DNA, 1377 bp, Saccharomyces pastorianus
atggtagagcaaggtcaagtgacatttatgtcaactcaaacaagcagagaagttaccattacagcaaataatctgtccaaatccatcgacactacagctacatcaagtgaatatgcgctacatgacatagtcgaattgagtgctaaaaatgttgcttgtattattcaagctggccacgatatcttcaaggttattgatgaaactggtaaagtgtcgacaattacgaaggggtctatcttgagtaaaataaatactgctcgtgcacgcgtttctagtgtcgatgcaaatggtaatgaaatcaaaattggtgataccatagtagagaaagtaggttcacgcagagaaggtcaggtcctgtacatacaaacacaacaaatttttgttgtttcaaagaagattgttgaaaatgcaggggtttttgttgttaaccctagtaacgttgaggccgtggcatccaaggacaatatgttaagtaacaaaatggatctaagtaaaatgaatccagaaatcatttctaaaatgggacctccatcatctaagacattccaacaacccatccagtccagaggaggtcgtgaagttgcactcggcaaaacagtaagaattcgttctgctggttacaagggtcaattaggtattgtgaaagatgtgaatggtgataaagctactgtcgaattacactcgaagaacaaacacattacaattgacaagcataagttaacatattacaaccgtgagggaggtgaaggtatcacgtatgatgaattggttaatagacgtggtagagttccacaggccagaatgggcccaagttacgtcagtgccccaagaaacatggccactggcggtattgcagcaggtgctgcggctacctcttctggtcttagcggtggtatgacaccaggatggagctccttcgatggtggcaaaacaccagctgtaaatgcgcatggaggctcaggtggtggtggtgtctcctcatggggtggtgcttccacttggggtggccaaggtaatggaggtgcatccgcttggggcggtgctggcggcggtgcctcagcttggggcggccaaggtactggtgctacttctacttggggtggtgcttcagcctggggtaacaaatcaagttggggcggtgcatccacttgggcgtcgggtggtgaatctaatggtgccatgtctacttggggtggtaccggtgataggtcagcctacggcggggcttccacctggggaggaaataacaataataaaagtacaagagatggcggagcttctgcatggggtaaccaagacgatggaaataggtctgcttggaacaaccaaggaaataagtcaaactatggtggtaacagtacatggggaggtcattaa

SEQ ID NO: 80828 - DNA, 3273 bp, Saccharomyces pastorianus
atgtcagtttaccatttaccaacgctgttgaacccgctggttaatgctatatttaactgtcccgaaccagaaagatccccattgaaaaagcttttcgctaatttaaaaacccgtaggtttatcctcctagcacctccttcagaataccttttgaattaccacgatgtcaagagcaaactgccgtcacatgacctctgttataatgcagagtttattaactcttacatattgttaatgactgaaaactcttacataaatacgaattcaagggacagtcattatgaaacgttagatggtaagaccgttgttattcaatggaagaataatgtgatccatgccttaaatggatttcatataaggcgaagactaaagattctagagacaaaaatattacccaattttaatgactactttgaaggggcggctgattttatcatactattcatagatcaacctttaaattgcgaatttgtacctaacgactacttacagtgttttcacaattatgagaaaataccaaaaaatgcacatgctatgccaaatctgtcgatagattcttttcagcaagaaagatcgtcattcgagaatatattgcacattcatcctgctcgattaacacagcttggccaattgttttcgagttacagaacgctcgctcctggtgatgatccatctagaagtatttttgaaagcattgtgcaacaagcatttgatggaatgaaatcggattcacttttcaagaacttttctaatctttacgatcttatacacgactattttgaactaaatctttacgatgatatatggtctaggcttactacacatttcaaaggccacgaagtagacactgaaaaatataaatatttttcagtgaaccagttgttgacagatttttactcaaaagattatggggaatttgaattacacgacatcactcttattgaaaggcgtctccatctagcgtccaaacatcttcaaaagttggctttgacccattcatacgctgaaaaatctaaaatattagttgaaactctacagaaattatcaggtactaccgaaatggattcacatcaactagaactaccagacggattgaataacatgacgatggatgcagacactttaattagcctttttgtgctcgttgtttgcagaagtgaacaaaagcaccttaaaagtcatctttactatttgcaaaatttttcgaataactcttcttctacaaaattcggcattctagggtatgctgtatccacactggaagcagtggtttgttatttcgaagacttcaacaaaaatacaggcaacgtggcgaaagctaacacattatgtgagaaaactaagaatttattagataagttgtcatgtgaaaaccccacaaatgaaatagaagatctggcaacatacaaggatattttgacctacagaaatgagcaaggacaatccattctatccatatgtataacaaatcataaaaactacatcttattagatattctttctgaatatgaaaccgactttccagtagaagaccttttagaggacgaaacgattgatggttctacgctgcttatagaatcgataaaagcaggaaatttagaagccgcgaaagttctcataaagatcatgctgttcaattgtactgaagaggagctggtttcttatatcaataaaacagatagatatgcacgtaccgtggctcattatctaacccatgaaatggatatacttaaaagcatcggaaattatattgattggaaacgaaaaaactccagtggacaaacgcctttattttccatctttagaagttatgatcaaccaaattatgaagaaatggtgaagaccgcatttgatatcgcaaatacttggtatagaaagcacaacagtttgtttgactatctagaccacaccgataataagggcaatagcttgttgcatgttttgaaaacaaacattccaatccttttacaactgattaagctagatattaatgaggaaaattataagggattgacgccattaatggtatatgtgaagtacaaaagactaagtaatattgacgccatcacgaaagaccgtcgacttatattagagaaggttcaaaactcgaccttcttcacttgttttgattatgcaaaagatcactcggtactaagcaagataggagaaaggggtgtcaaagattcactttttggattaatatatttccattctttgcgatatcataatttaaatgcgacaacaaatataacatccgtttcaaatgcagagaaacctttcgccactactgttattaacatgaaaacaattcaaggcttactacgctcaattctgaaagacaatccgttcacctttttgccattaaatacctatatcgatgaaatatcgcacttaaaccgttctgatttaacaataatcgggaaaacagatgtcacatcgttacttcaccaattaactaactgcttcaacgttcttttattcctgaaaaaaattccagaaaatttgttcactgatgaggcttctatctgttattggatgcgcataaacacttctaaaagaaaccagaaaccctcaggaaaagaaaatccaaaaacaatggaacccgaggagattaatatgatacaaagctttttacgttttaattttgatgagatttcatcatttaaggcaagcttgaatattttaaggaaagtcttaatatttattaatttgaaatccgatgatttcgaggatgcttataagggtcttaacgaaatgggtagaaaattaattaatagtgaagcatccagcgcatttaaggggattataacaaatcataatatgttcagtgaattatcgctagcagaactactagaaaacgtgcgtttcttggaacaatgtactatccaactatctagtttcgttcagataattttatttgaaaaaattccgaactggtggaaacattatggtgagtttttagctttacataaaagctatcggaaggcttttcctaacatggttaagccaaaaagtgcatcagatacctctagtcgtgctccacttggtggttttattgaaacgaagcgtgaacaatcggagcaaagactagcggttcagataaaggcctcttcaaaaatgctcaaagaacttggaagcgaaatttttgtagctcacgaaaggttggccgaggaactaagcaattatatggagttcaggaaggcgtgcttagatcagcgtagtcttgtggcatttgccacaaccaacattagcgttcttcaagaatgtgtttaa

SEQ ID NO: 80829 - DNA, 189 bp, Saccharomyces pastorianus
atggcaatatccgacggaggtaaattggtgacctacatttctccctcccatgaaagcaccacatatcccttagttgaagtactaaaatatggcgagatcccaggatatccagaaagtaactttagagagaaactaactttgataaaggaaggtttgaagcagaagtccacaattgttaccgtagattaa

SEQ ID NO: 80830 - DNA, 1212 bp, Saccharomyces pastorianus
atgtcgttgggtcctcttaaagctatcaatgataagcaattgaatacccgttccaagttagttcacaccccaataaagggaaataccgcagacctcgtaggaaaagaaaatcactttaaacaaacaaagagactagatccgaataatgatcatcaccaccagccagctcaaaaaaagaaaagggaaaagttatcagctttgtgtaagacaccaccttcattaatcaaaacaagaggaaaagactatcaccgaggtcattttttaggtgaaggtggatttgctcgctgtttccaaattaaggacgattcaggcgaaatttttgctgccaaaacagttgctaaagcctcaattaaatcagagaagacaagaaaaaagttgttgtcggagattcaaattcataaaagtatgtcccatccaaatatcgttcagtttattgattgttttgaggatgatagcaatgtctatatcttattggagatatgccccaacggttcattaatggaattactaaaaagaagaaaagttttaacagaaccagaagttagatttttcaccactcaaatatgtggtgcaattaagtatatgcattcaagaagagttatacatagagatttaaaacttggtaacatcttcttcgattcaaactataacttaaagattggtgacttcggtctggcagctgtgttggcgaatgaaagtgaacgtaaatacaccatatgcggaacacctaattacatcgcacctgaagtgttgatgggtaagcattctggacattcatttgaagtagatatttggtcattaggtgttatgctttatgctttgttgattggtaagccacccttccaagcaagagatgtaaacactatttatgaaagaatcaaatgtcgtgatttttcgtttccaagagataaaccaatctcagatgaaggtaagattttaataagagacattctctccttagatccaatagaaaggccctctttgactgaaattatggattatgtatggtttaggggaactttcccaccatctattccttcgacggtcatgtcagaagcaccaaattttgaggatattcctgaagagcagtcactggttaacttcaaagattgcatggaaaaatctctactattagaaagcatgagcagcgataaattcagcgtcaaaagagggattatatttcttcaattaaatctagtatcgataaactag

SEQ ID NO: 80831 - DNA, 348 bp, Saccharomyces pastorianus
atgggaggtcttccgaaatcaagattgcctaaaattaaacacccaatgatagttaccaagtgggtcgactactccaacaaacacggattctcctatcagttatcaacagaggatattggtgtcttatttaataatggcaccacagttctccgattggcagatgcagaagagttttggtatattagttatgacgatcgggaaggttgggtagcaagtcattatttattgagcgaaaaaccacgagagctaagtagacatttagaagtagttgatttttttgccaagtacatgaaggcaaatttgagccgagtatctacgtttggcagagaagaatatcataaaagataa

SEQ ID NO: 80832 - DNA, 423 bp, Saccharomyces pastorianus
atgtcatactccgattcagaacgtcttggtatgattaagaatgggtttgaagctgccacaatgggtaattttactgatgattctgatttcttgggctgtgttggttgcgccattatcagacgtaagcaacaaaacttgaatgctacattgccctctgaatgcagccagtgttttaccaactactgctggaacggtactattgacagcaggtcagtctcaggtgtaggaaatgatgattattcttcttctgcttccttgtctgcctccgccgctgctgcctctgcctccgcctccgcctctgcttctgggtcttccactcataagaaaaatgcgggcaatgctttggtgaattattctaacttaaacactaacacttttattggtgtcttaagtgtcattagtgccgtcttcggtctaatttag

SEQ ID NO: 80833 - DNA, 1680 bp, Saccharomyces pastorianus
atgaagttgcagagtttgttggtttctgctgcagttttgacttctctaacagagaacgttaacgcttggtcaccaaataacagttacgtccctgcgaacgtaacctgtgatgatgatattaatttagtcagagaagcatctggtttgtcagataacgaaacagaatggctgaaaaaaagagatgcatacaccaaggaggctttgcattcttttttgaatagggccacttcgaatttcagtgacacttccttgctatccactctttttggtagcaactcttccaatatgcctaagattgccgtcgcctgttctggtggtggttaccgtgccatgttgtctggtgctggtatgcttgctgctatggacaatcgtactgatggcgcaaatgagcatggtcttggtgggctgctgcaaggtgcaacttacttggcaggtctgtcgggtggtaactggttaacaagtactttggcttggaacaactggacgtctgtgcaagctatcgtggataatacaacagaatctaactcaatttgggacatctctcattcaattcttaccccagacggcattaacatctttaagactgggagtagatgggacgacatatcagatgacgttcaggataaaaaagacgccggtttcaacatctctttggcggatgtttggggccgtgctcttgcgtacaatttttggccaagcttacaccgtggtggggtagggtacacatggtcaactttaagggaagctgatgtcttcaagaatggggaaatgcccttccctatcactgttgcagacggtagatacccaggtaccaccgtgataaacttgaatgccactcttttcgaatttaatccctttgaaatgggttcatgggaccccactttgaacgcatttacggatgtgaagtatttaggtaccaacgttacaaacggtaaaccagttaataaaggccaatgcattgccgggtttgataacactggtttcataacagccacttcatctacgttgtttaaccaatttttactaagattgaattctaccgatttaccttcatttattgctaacttagccaccgatttcctggaagatttatccgacaatagtgacgatattgcaatttacgccccaaatccattcaaggaagctaattttcttcaaaagaacgcaacctccagtattatcgaatcagaatatctatttttggttgatggtggtgaagataaccaaaatattcctttagttccattgttgcaaaaggaacgtgaactagatgttatttttgcattagacaattctgctgatactgacgactattggccagatggtgcttcattagttaacacctatcagcgtcaatttggcagccaaggtctcaatttgtctttcccatatgttccagatgtgaacacatttgtcaacttggggttgaacaaaaagccaaccttttttggttgtgatgcaagaaatttgacagacttggagtacattccaccattaattgtttacattccaaattcaagacattcatttaatggtaaccaaagtacttttaagatgtcatactccgattcagaacgtcttggtatgattaagaatgggtttgaagctgccacaatgggtaattttactgatgattctgattttcttgggctgtgttggttgcgccattatcagacgtaa

SEQ ID NO: 80834 - DNA, 159 bp, Saccharomyces pastorianus
atgggtttgaagctgccacaatgggtaattttactgatgattctgattttcttgggctgtgttggttgcgccattatcagacgtaagcaacaaaacttgaatgcttatttggcctctgaatgcagacagtgtttaccaattactgcggaacggtactat

SEQ ID NO: 80835 - DNA, 1839 bp, Saccharomyces pastorianus
atgtcgaactacttacaaaaagaagttattcccagcgttattcaagattatttatctggaaatttgagcactccttataatggtgaacatttagccgatactttacataagaatggtatcaacatgcgttacttgggtaaaattatcgagctttctcaaaaggaattggactcccaaattgtccactacgaacaaaatttgaaagctgttgaacaaggcaacaaagaatatgaggattgggaaaaatcttatctgcaaaaaattgagaacatgattaaagagagacaagccaagattaataagctggtacaagaaggcaaagaggttccaaaagaactaactgaagatttgaaattaaacgatgaagaaatcaaaaagcccaccgatggaaaacctgtggtcgttgcctacgatgagctagtgccattaattaaaatttccgaattagaaattgtttcgcgttctttgaaacatgttttaaaagatttgggtaaagatgttccggtcttcttggttccatcactggtagcatacgttttcaatatgttagttggtatcaactacaatgctgatccgaagccagaaccagtcgacgaattttatccagtcaataagtgctcatttgctaaattaacacgctccgaattgctggaagctgtctctaaacaagccttcttgcgtttccgtcatcaattaccatccaattggatcgaagcttacatggaaaatcctttcaccctcattagaagtgtttcttacaaatttggtattcaattgctcaataaagaatacttctttactaaagaacaattggaaagttataagcaaagtcttgacaagaaaattaggaacaagtttgtcgaaccaccaactaccttcagtttaagcgatttgaccattattccacgtgttaagttctcagaatatacttcttcagttagtgaggaattttgggctcaaggtgcttctatgatcaacgaagacaaacaaagtgctttgactttgctcgctcaatcaattacagtcttagaagatgtcaacaatattttacatcccgccgttgctgaaaagtacttgtcattatctgccatttataataagttagcattataccctgaagctatcgcgttctgtcgtaaagcatgtactatttatgaaagagttagcggtattgattcttttgaaatgatgagggctttaactaatttagcaattctagaattctctaatgaaagtccttataacgctactgtggtttataataggctcgcagaaatcctaaaagtttatgagttaccaaaaatccatcacccagcccccacaagcattttcaaccatttggaacaattagccctaggtgttcaagataccaaattggctattgaagtcttgggacaactaagctcctatgttgtggaactagaaggcaaagattcattagcatatggctataccgagtcacgtttaggtaatttgtttgcagcattgaaggatttccaccgtgcattagagcacatcactgtaacccaagggattttcaccaagcaattgggtatgaatcacacgcactcagcccaatcaagacagtgggttaatggtttaagctcattaataatggatttaaaacaaaagaagcaacttgcacaagatcaaatgtcgacaacgggatcaaattcagctggccataaaaaaaccaatcaccgtcaaaagaaggatgacgttaaacctgaattggctaacaaaagtgtggatgagttgttaacatttatagaaggcgattcttccaactctaagagcaaaaacaaaaccaacaataaaaagaagcatggtaagaaatag

SEQ ID NO: 80836 - DNA, 1881 bp, Saccharomyces pastorianus
atgagcgagaaaaaagaagaagttaaaaacgccaccgttaaggtgactgtcaaacttccaaaagaagataaccattcgcataatacgaaacatctcaaaaagacccaaagttcaaaaaataatgatatatcttttgaaatcggcaaggaatccaaaattcaaactgttctagatgtgttggctatgattccaagttccaagtacctgacaaacgttgggctgaaaacaattgaaggtgactcccagctatctgatgaagtgtctataaaggaaattgtcggtgagaaaagcgagttaaaacttcaattgatactgaagccatatagcgcaagagaggctttgaaacatgtgattactgttcgcgatttcatcggatttgcccaagaaacctcagatggattatctgaatttgctatttctactggttcaagcttttcctcgttaccattgggtcctatcaaggaacgctcaaaacaagaagaaaaagacgagaagagcgatccagaagaaaagaaaaatactttcaaagatgtgactgacgaggaaaaactaaaatttaacgagatggttcacgaagtgttttctagctttaagaattcttcaattaacaaacttctcacctctgaatccaacatcatcacgccgtgcgtcaggtctttgagtttcgcaccttacaatcctgtacctccattttatagaagtaaaggtcatctattttacctacaaattgtcactttggaaggcgagagtttctatatcactgcaattccatctggattctatgtcaataaatcaaactcaactaagttcgatccttctccaaaagaaaacactgacgagaacgcgcactcatccccgatctattacagtctatttgacttgattgcttctcgctctaaaaaattcatttctcatgtccaagcatttgagaaaaaactatctgctttagattctacaagctatgtaagaccaagcaatactttcttgcataaaccatggtttgtttcttcattgccaccaaataacccagattatctgaggttacaaactgccgccttggataccacgccagaaagaaactttaatgatgaatttcaagccattaaagatttgactacgtcaacattacaagatcgtattgaaatggaaaggttgttttctaaagttgtacatgaattttctgttactgcagcatcaggcgctatgtcaattttttacagtgatttcgttgcaatgaacccagaatctccaactcgggatcaaattttcttaaaagacaatatcttttattcctatgtttccgacgttagtggcaattatgaagggaaaggtggggatgaagctgcaatcgctgcttccaaccaagacttgaagacaatcaatattttgaatcgcttgcatatgcacgaagttcgttatcttttaacaactgtagtcgaatttgcaggcagaagaattttggctcaaactccagtacctggactcttagctaccatgggtaacaaaattgtaaaagatgctaataccggcgaagaggttaccgaagattttgtcaatgatattaatgtaaagtacggccttgatgaaggtttgggaaagattgtttatgatgctgactttgattctgttttagaaaaaaagtttgtcaaggcattccatttgaaaaagcacaaagtcaacggtactgaattagcattttcatcgcaatccaagggaattgttggattcgataagaggcgctatattttggatttagccaacacgtatcccttggacatcaactttgctagacaaactttgacaacatcgaagagactgaaaaccgttacccacacaggcaaacttgttacgtccggagttagtagaaaagtggtggaataa

SEQ ID NO: 80837 - DNA, 804 bp, Saccharomyces pastorianus
atgcactttaaaccgtttatgctgtcaatatcttttgccatcgggcttccactttttgccaataccttcattcatttagaagacggtgaaaatccgctactttggctggtaaaatatatcttagagtctactattcgtcaaaagattttgtttgcttggtcttcaattcttatactgtccataccaagtatattgatcgagaaggacagtctatcgttgaacacctcccgaaaattgtggcatttcatcattttcttactcataataccgtcattccaaatggattcaaactttgtgaaaattgcattgtccggaacaataccagtcttcttatcaattgagtacataagatttcaaaacctaccgccgttaggatctgctattgaattacaactaagaaggtttgctgatgatagggaccacagcgggccattgatcatatcatacctttatttactcttcggaatatcaacacctttattaatgaataactctccaatgggtctaataggattgggaattggtgattccttagcatctattattggtaaaaggtatggccgcattcgttggaaaggtacacaaaaaactttagagggaactcttgcgtttatagtaacgagttttatcgtttgtttgatattgttacgttttgataaagctgcaatttttaaccacctaactactttacaattgcttaccctttgtacactgagtggagtgctagaaggtaatagtgtgcttaatgacaatattttgatacctgcatttatgatgatttgtgaaaaattaattactctttga

SEQ ID NO: 80838 - DNA, 324 bp, Saccharomyces pastorianus
atgccaactgaggagatctgcaaaatcaatatgaggactcgtaaatttgatgtgggcgggaattctcgagattttgagtgcttttattcgaattttgttcaaactgttatattgttgggcacttttttttactgtgttgaaaggcttcagccgtggtccattgttaccgctgatatatcttataaacaaatctttgtaaatgtctttgtggtgtgtttgataatggttggtctgatattcacaaaatattggcaacatggttacaaaagcctacccaagttcgataccatttacagtttatatttaccgtttatggtttcgtag

SEQ ID NO: 80839 - DNA, 153 bp, Saccharomyces pastorianus
atttctccggaaagtgcagtagcaaatctaggtactgatactggattgccctcagatgttcttgatactgtcagtaaaatagggaactctcctaatgtgtttgatgatgatttattttccaatttattatggtttgaccaaaattttgcataa

SEQ ID NO: 80840 - DNA, 498 bp, Saccharomyces pastorianus
atgttaatttctcattgtcaaatggctattgaaaatttggctgaaattacgagaagtaatcttttctttgttccgtggtggttaaacctttctcaactattcacggtaaatttaatatgtattatctacctgcacgcagggattgccgtaactcaaaataaagctatcatgcaaagctgccaagaaatatggcgaaccttagagtgctctaagccaaaaaatcggccttcaatgcttcctgagtgcttatggtgtttgaaaatgctgaatcatatgttctgcatacgactgagagattctgctttgcaattggaagctactctcggaactgatcatggtgatgacacccctaatagaaataagtttgagcagttcaagaaagttggcgataatgatgcggatgttgaagttgatgctggtgaaagagaagaaaatgctgatgaaagacagaaaatccacgtaacaatagcgaacagagtaccattcgctactagatct

SEQ ID NO: 80841 - DNA, 2160 bp, Saccharomyces pastorianus
atgaaaatatattatatacttgtatttgagcatcgttcagtagcaatcaagctcatcatcgtagtgattgttctccttcagttttttttagcacgaagtcggcaaattgataggacatgggcccatactaatagaaaggaacggttcagagaaatgacagctatcgggaatactgatgatgcacttgatactagtacagccgcaagtaaagaaaatggaaaaggtagactcagggttcaaaaagcttgtgaactttgcaagaagagaaaggttaaatgcgacggtaacaatccttgtctgaactgctctaaacatcaaaaagaatgccgttatgatttcaaagctacaatccgtaaaagaagaagacgacaggtcgcatcagctgttcgggacgttagtaagacatatgcagaaaccagtgagtcttttcctagggacttgttaagtaaatcaaatattatcataaatgccccctcagatggtgtatcttcgtctgctagcaactctcccaatccaaattcacattatcataatatatcatccactttacccttcatgagcggtaggccaaaccatacattccattccggaagcaacttaaatggagaaaataacaataacagttttccggaggatcacatggccaaattacttctgcaattgagttcaaaattggggaatacgaccaaggaatcgtcaattagaacaactagaaccaatgctaatgatgtgaatgcaaacccgacagtggtaaacatgaaaaatagtcaggaagactgtgacacgaatcacaggtctgcaatatatgactctgcagaggctcttcataataacaacatcaattctaaagagaataagacaatcaactctcaaataactaacattgttaatgatcattttgaatcaccctggcagacattttctttagataagtataggtttcaccgacgctaccaaaatattctgccctattaccttggtgtatctattttaaaggatctatctccgcagacaatagagtacgcgaagttgaaaaggccaagagttcaaaactatggttggaacttgtcaggaggccattacttaaagtataagggtgactttagaagccaagaaaaaaatataaggcatgagtctaaatttttcgactttgatgaccctattcacttatccttaatcaataagttactaaggtattattttgatgagatcaatcctgttttcagtatcattcacgaagcgacattttggcagcaatataacaataaatttctacggcaaggtaaacaaaataattcatctgcgaatctattcacttccatgctttatctaattttgtctactacactaagattcagagaagggcatctagatggtcagaaagggcaaggaacctacagtaacacatccttaaatatcacattcgaggaaaaatctattttgatcaaaaaaccctccatagaggaaaatttattcaaatacgcttatttaataatcaacacgctgacctttgagtgggaatcattcgaactaatacaatcgtggcttttgataaccttctatttcagaacctgttacagacagacggcgtgctggaacgcgttaagtcaagcggtgaacatgtgtaatgggatgagtctatatttaaacaaatttcctgagatccattccacttatgatgaatcaaaagcatggcattgtttctggtgttgttttataatggataagttgataagttttcaaatgggtcggttctaccaactatcactacccgcgagcgagatgtgcgaacagatgaatctagtgaagtcaaagaaatttttacaagaagaagatgattggtttcacgaagagacttttcaaatgcttgatttgtccataatagtgacacagtttttaaaaagagacgcacaggatttaaatttgaacgagaccgtgcaattgcgcagccaacttggtcaatggtatgacacctttatagttggaagtcaaaccaatgcgtacgacgacaactatcgttacttctatcaagttcaaccattcatgacatacctggatataaggctgactttcgaagtaagacaattattttgtctaatcgccccctcatctaccgcaaataataaatccctagaatatgtcgtcgatactgaatgttaa

SEQ ID NO: 80842 - DNA, 636 bp, Saccharomyces pastorianus
atgataaacgtgaatggctataaggttattatctgtgatacggcaggtataagagaaaagagttctgacaagatagaaatgctaggtatagaaagagcaaagaagaaaagcgtacagagcgacttatgtttattcattgtagatcctactgatttatcaaaacttttgcctgaggacatattagcacacctatcatcgaagacgtttggaaataagagaataattattgtagtcaataagagcgacttagtttccgatgatgagatgacgaaagttttgaacaaattacaaactagactcggatcgaagtaccccatattaagcgtgtcctgtaagaccaaggagggaatagaatcgttaattagcactctgacaagtaattttgaaagcttgtctcaatcaagtgccgatgcaagtcctgtcattgtttccaaaagagtgtcagagattctcaaaaacgacgtactgtacggcttggaagagtttttcaaatccaaagatttccataatgatatagtattggccacagaaaatttgaggtatgcatccgatggaatagctaagataacaggacaagctattggtattgaggaaatcttagattcagtgttcagcaaattttgtatagggaaataa

SEQ ID NO: 80843 - DNA, 144 bp, Saccharomyces pastorianus
atggcacagttgactgctataatagattttgccgacgataatagccaagaaattcagaatacggatgagattttccataatgtagaaaagaacatcatatgtctgcgagacctaatcgttactttcatgcggaaaagtcgctaa

SEQ ID NO: 80844 - DNA, 312 bp, Saccharomyces pastorianus
atgactactaaattgcagaaaagggtcaatgacttggatgaagatattccaaggccgcctttctcctcacatagtgacaaaacggaagataaagagggagtttctgaggcctgtcccgtttgcgaaaaaactgtacaaaacccctgcgtattggaaacaggatacgtggcatgctacccgtgtgccataagctatttggttaataatgaaggccattgtcccgttaccaataaaaagctgctgggttgtacatacaacaaacacacgaataaatgggaagttgtgacaggtattaggaagctactaatctga

SEQ ID NO: 80845 - DNA, 243 bp, Saccharomyces pastorianus
atgagctattattcaaacctaccgtctgcaggacaatctagtcgagggtcttcaacaagcggtcgaaatggggtgggattagaaccattgtatccgactatctttgagataatgtcatcacaagaaatcgattcgttactgcccgcatccatccgttatctactggcaaatcatttagtggcgaacttccctaacaggtatactttgcggctgaaccagtacttttccgagtggtttcaagcg

SEQ ID NO: 80846 - DNA, 363 bp, Saccharomyces pastorianus
atgaataatatattcagcagcgatgaaactgaaaataaatggcccaagagagcgtttctaagaatttatccatttattaagaaattattagcgttatccaatttactcgttaaattattatttttaactaaaagaacaggatcggtttccttgttgcaatacttattcaagatagagtacacaacggtaagaccactatcgtcagaactctctggtctcaaagagacgaaagggatggataataggctaaggaaaacaaatatatcgtcaattttcgcgctaatgcaaggacaattatcgattatacccagatttttaacatttatgggttcgcaatcttccccacttttatatttgtcctaa

SEQ ID NO: 80847 - DNA, 321 bp, Saccharomyces pastorianus
atggatccattcttgcacaaagatttgcaaaaatccgatttggttatttttaagggtgatctaaactatagaaaattaactggcgacagaaaatggccccgcaccactaaatgggaaacggctatcggacctcttgctacgaatggtattacatcattgagcttgagaacctgtaaagccgatgtacaagttgctttacctgaaggtctagacgcgaaattaagtcaagaatgggaaaaggaaaatcctggccgtggttcttggtggtgttgtagcggtaaatgggcagtcatttgtttctgctctggtatacataaataa

SEQ ID NO: 80848 - DNA, 1146 bp, Saccharomyces pastorianus
atgactatccctggaagatttatgacaaatgataagggcacttttggtgaatacactgctagcacccgttggcccattatcattcagaatgctatagacgatttaagtaagcatcaagaaacggagaagagtaacggcactaagttcgaacaaggtgaagttatcaaaaaggagctcaaggaattccgtcaggagataattgatcgtgtacctttgagaccctttactgaagaagagatcaaaattgccaacgtcccgctttcgttcaatgaatatctaaagaaacaccctgaagtcaattggggggctgtagagtggctgttctcggaggtttacttgtatagaagagtaaatgttcttttccaacgccaatgcgaatgggctaaatttgacatattcaacagacttaaacagtcaacttttgagtcctcgttttatggtgtcgtggaattggcgttaaggtatggaaatctgttaccacagctgagagaaatgaagcagaatccaggaaatgagattgacgatatattgaaagttctttttaaagagtttattgagatttctttgtggggcaatgccactgatttatctttattgaccaacgctacgttagaagacattaaatcaatccaaggggcgaaagcaagagctgcatccgagtccaagattgttgttaatgacacggagaaagcatgggaggtattaaccaaagccagggccgatgccaatagcagagaaattcgtgttgattttgtattagacaattctggctttgaattgtatgctgacttgatgttggcagcttttctgttacaaagtggtttggctaccaaatgtattttccacgctaaagacattccatacatggttagcgatgttatgttaaaagattttgatatattagttcatgacctaagagatcgtgagttcttcccaagtggtgaaccctcgacaaaggaatccagagctcttgatttatttgctggtgaaatggaaaagttcgtctctagcggtaagatagaattccgcgaagattctttctggaccacggaattagattattggaatttggacgcaaacgaaaccaaataccatggatccattcttgcacaaagatttgcaaaaatccgatttggttatttttaa

SEQ ID NO: 80849 - DNA, 423 bp, Saccharomyces pastorianus
  modified_base (11)..(11): a, c, g, t, unknown, or other
atgctctctanatttcctcaagaaattcccgtacatgaagtcaaatcatcaggtactcagatacgaaaagaatcgaatgatgatgattccactggttttaccgataaattagagaatataaataagccattgatagacaaaaaaggtcaagtcttgaggaacttcacgcttgtcgacaaaaggcaacaactgcaacaaaaagtgcgaggatatggtcaatatggaccaacaatgtcggtggaggaatttttagataaagagtttgaagaaggtcgcgttcttcaaggtggcgaagaaccagagcaagcaccagatgaagaaaacatggactggcaagatagagaaacctataaagctcgtgagtgggacgagttcaaggaaagtcatgctaagggaagcggaaataccatgaatagaggatag

SEQ ID NO: 80850 - DNA, 738 bp, Saccharomyces pastorianus
atggcgtcagtaacagaacaattcaacgatattattagcttatactcaacaaaattggaacacacatctttgaggcaagattcaccagagtaccagggattattactttccacgatcaagaaattattaaacttaaaaacagcaatttttgacaggttggcattgttcagtactaatgagaccattgatgatgtgtctactgcttccatcaaatttctagcagttgattactatttaggattattgatatcaagacgacagtcgaatgattcggatgttgctcaaaggcagtctatgaaattgatttacctgaaaaaaagcgttgaatctttcattaatttcctgacactattgcaggattataagcttctagatcctttggttggtgaaaaactaggtaacttcaaggatcgttataaccctcagcttagcgaattgtacgcgcaaccaaaaaatgacaaagatttatctggagcacagttgaagagaaaagaaaagattgagctattccagcgcaataaagaaattagcacaaaactgcactgcttggagttggaattaaaaaacaacgacgaggaccacgaccatgatgaattactaagagaactatatttgatgaggttacatcactttagtcttgatacgattaacaacattgaacagaatttatttgaatgtgaaatgctctctaatttcctcaaaaattccgtacatgaagtcaaatcatcaggtactcag

SEQ ID NO: 80851 - DNA, 1164 bp, Saccharomyces pastorianus
atgaattctagcgccaactgggctcaaatgagcagtatctccacgacaagtaaaaaaaccgaatcgtatatggacaatataaggaaactatcttctcagctgaaggaaaccgaaaataaaaggaaactagcttcaatagacaaatatgagaaaccattgccatctccagaagtcaccatggctacacaatttagaaattccacacccgtcatacgtaatgagacaaaagtggttgctgacccaacattatctttgaggtcttcacccgtccagttacagagcaatgtggatgactccgtgttaaggcagaaacctgataaaccaaggccgattgttggggaagaacaacttaaacctgatgaagattcgaaaaatcctgatgaaaaaggtctaatggtgcataaaagaaatcaatctctcagttcaccatcagaatcaagttcttctaatccaacggattttagccacatcaaaaagagacaaagtatggaatctatgactacatccgtaagttcaatggccaatagtatagacgactcacagagatttgccaaatcatggaactcgtcaaataggaaaagaaaatctatgagccatttgcaagtaccctcatccgcttcttcgaggtcggatgatggggaaagaacgcctaactctgagcacaacctcaatgaagatgattataacacgaggagagatactagtacaagcacaattttgttcaaccctcctgtggcagtaagaggaacgtctagggggcacacgcatagacaatccatgataatgcaagattcaagtaatccaattgaagatgccttgtacgaaatggaaagaatccaaagtagttctaaaccaggtacaaaaacaggaaacatcatggatgagagaggtgtggtcagggatagaggtattactgttaccttgcctattgtcaccagtgaaggttttccagtcattgaatatgccaaggccatgtatccattgattggaaatgaggcacctggattagcgaatttccataagggcgactatctgctaattactgagattgttaataaagattggtataaaggtgaagtttatgataatgaccgtatagatagaaatcataggataggattaattccctataatttcattcagctactgcatcaaggtctttga

SEQ ID NO: 80852 - DNA, 948 bp, Saccharomyces pastorianus
atgatttcgttgcagaattgttgtattattgatgttggaacacatcatacagatattattcctattgttgactatgcacaattagaccatcttgtctcttcaataccaatgggcggacagtctattaatgattctctaaaaaaactactacctcaatgggacgatgatcagatagaatcattgaaaaaatcaccaatttttgaggtgctcagtgacgacgccaaaaaactatcaagtttcgattttggaaacgaaaatgaggacgaggatgaaggaactttaaacgttgccgagattattacaagtggtcgtgatacacgtgaagttttagaggaaagagaacgtggtcaaaaagtcaaaaatgttaaaaatagcgacttggaattcaatactttttgggatgaaaaaggtaacgaaattaaagttggtaagcaaagattccaaggatgtaataacctgattaagaatatttctaatcgtgtaggattgacgttagataacatagatgatattaacaaagccaaagccgtttgggaaaatattatcatcgtcggtggcactacttcaatttcaggttttaaagaagctttactaggtcaactactgaaagaccatttaattatagagccagaggaagagaagtcaaaaagagaagaggaagcgaaatccgtattaccagctgcaacaaaaaagaaaagcaagtttatgacaaatagcaccgcatttgttccaactatagaatacgtacagtgtcctacagtaatcaaactggctaaatatccagattactttcctgagtggaagaaaagtggatattcagagattatattcttgggtgcccaaattgtttctaagcaaattttcactcatcctaaagatacattttatatcacaagagaaaagtataatatgaaaggaccggctgctctttgggacgtgcaattttaa

SEQ ID NO: 80853 - DNA, 693 bp, Saccharomyces pastorianus
atgctgccgaattcaaatttgagttcatctcaacaatttatcaaaccgtctatgattctttcagacaatgcgtccgttattgcgaaagtggcgactacaggcttgagtaatgatatgccatttttgacagaggaaggtgaacaaaatgctaattctactccaaatttcgatctttccatcactcaaatgaatatggctccattatcgcctgcatcatcatcctccacgtctcttgcaacaaatcatttctatcaccatttcccacagcagggtcaccataccatgaactctaaaatcggttcttcccttcggaggcggaagtctgctgtgcctttgatgggtacggtgccgcttacaaatcaacaaaataatataagctgtagtagtgtcaactcaactggcaatggtgctggggttacgaaggaaagaaggccaagttacaggagaaaatcaatgacaccgtccagaagatcaagtgtcgtaatagaatcaacaaaggaactcgaggagaaaccgttccactgtcacatttgtcccaagagctttaagcgcagcgaacatttgaaaaggcatgtgagatctgttcactctaacgaacgaccatttgcttgtcacatatgcgataagaaatttagtagaagcgataatttgtcgcaacacatcaagactcataaaaaacatggagacatttaa

SEQ ID NO: 80854 - DNA, 288 bp, Saccharomyces pastorianus
atggaaaaggtcacagatcagagtgttacgtaccgcaaccagaaaaatccctatataataaatagtgtaaccccagtggatgcactggcttcaagggcatataaccaaaggaatgtttacatttcaggcttcatcatctacttttatatatgtatactcaccgtgatgagtatattgcgaagaatagtggaatggaatgacaaaatgaaggctggagatgacattctgaaggaaaagttaagacgaaagcaaaaatatttagaggaattgcagaagaagaaattttaa

SEQ ID NO: 80855 - DNA, 1182 bp, Saccharomyces pastorianus
atggcacaatcacaaaatgcgctccaacaacagcagcagcaacaacgattacaaattcagaataacaatccctacggtactaatgagcttttttcgaaagcaactgtcaccaacacggtttcctatccaattcaaccaagcgctacaaagatcaaagccgatgaacgcaaaaaagccagtttgacgaacgcatacaaaatgattcctaaaactttatttacagccaagctcaagactaataattccgtcatggataaggcccagatcaaggttgatccaaatttgtcgatttcaattgataaaaagaataatcagattgcgatttctaaccagcaggaggaaaatttggacgaaagcatattaaaagcttctgagttattattcaatcccgataaaaggtcattcaagaatctaattaataacaggaaaatgttgatcgcatctgaggaaaagaataacggatcacagaacaacgatatgaattttaaaagtaaaagtgaagaacaagaaacgatcttgggaaagccaaagatggatgaaaaagaaactgctaatgggggggaaagaatggttttgtcctcaaagaacgatggggaagatagcgcaacgaaacatcattcccggaatatggacgaagaaaataaagaaaatgtcgccgatttacagaagcaagaatattcagaagatgataaaaaggctgtttttgcggacgttgcggaaaaagatgcctccttcattaatgagaactactatatctcaccatccctggacacattatcctcttattctctcttgcaactgcgcaaagttcctcatttagttgtgggtcataaaagttatggtaaaattgaatttcttgaacctgttgacctcgctggaattcctttgacctcattagggggcgtaatcattacttttgaaccaaaaacctgtataatatatgcgaacttgccaaacagaccgaagagaggggagggcattaatgttcgggccaggattacctgctttaactgttatcctgtagacaaatctaccagaaaacctataaaggatccaaatcatcaactggttaaaaggcatatcgaacgcttaaagaaaaatccaaattctaagttcgaaagctatgatgcagacagtggtacatacgtgtttatcgtaaaccacgctgcagagcagacctga

SEQ ID NO: 80856 - DNA, 2313 bp, Saccharomyces pastorianus
  modified_base (2251)..(2251): a, c, g, t, unknown, or other
atgtttggagttagccgtggcgcattccccagcgcaacaacacagccatttggctcaacaggatcaacctttggtgcccaacagcaacaacaacaaccagtagcaaacacttctgctttcggcctcagtcagcaaacaaatacaacgcaagcacctgcgtttggtaactttggtaaccaaacttctaattctcccttcggaatgtcaggctcgactacagcaaatggtactccttttggtcaaagtcaattgacgaacaacaatgcctctggctcgatcttcggtggaatgggtaataacacagaactttctgctggttccgcttctgttgtgcccaattctactgcaggtacaagcattaaaccttttactacattcgaagagaaggatccaaccacaggtgtcatcaacgtcttccaaagtatcacctgtatgcctgaatacagaaatttttcttttgaagaattgagatttcaagattaccaagctggtagaaaattcggtaccagtcaaaatggcactggtactacttttaacaatcctcaaggaactaccaatactggatttggaattatgggtaataataactccactacttctgctacaacaggaggattatttggtcaaaagccagcaacaggcatgtttggaaccggaactgggagtggtggtggctttggctctggagcgaccaactctacaggattgtttggaagctctactaacctctcaggaaattctgcatttggagcgaataaacctgccacttccgggggattgtttggtaatacaactaacaacccaacaaacggcactaataatacaggccttttcggccagcagaactcaaatacaaacggaggattatttggtcaacagcaaaattcatttggggcgaataatgtcagtaacgggggtgcctttggtcaggtgaatcgtggtgcctttccccaacaacaaacacaacaaggtagtggtggtatatttggtcaatcaaacgctaacgcaaatggtggcgctttcggccaacagcaaggcactggtgctctttttggagctaaacctgcttctggtggactatttggacaatctgctggttcaaaagcattcggaatgaataccaaccccactggtaccactggtggcttatttgggcaaaccaatcagcagcaaagtggaggagggttatttggccagcaacaaaattccaacgctggaggattgttcggtcagaataaccaaagccagaaccaatccggattatttggacaacaaaactcctcaaacgcatttggccagccacagcaacaaggcggattatttggaagcaaacctgcaggaggactgtttggacaacagcagggagcatccacttttgcgtctggtaatgcccaaaataattctatatttgggcaaaataaccaacaacagcaatcaaccgggggattattcggacaacaaaacaaccagtcgcagtcccaacctggtggattgtttggccagaccaatcaaaataataatcagccatttggccaaaatgggttacaacaaccacaacagaataatagtctttttggagcgaaaccaactggttttggaaatacaagcttattctctaacagcacaacaaatcaaagtaacggtataagtggaaataatttgcagcagcaatcaggaggtttgttccaaaataaacagcaacctgcttcgggtggcctgtttggttcaaaaccatcgaacactgttggaggcggattatttggaaacaatcaagttgcaaatcaaaacaatcctgcctcaactagcggcggattatttggtagcaaacctgctacaggatcccttttcggaggtactaattccacggctccaaacgcctcttcgggtggaatatttgggtccaataatgcatctaacacggcggccaccaccaattctactggtttatttggtaataaaccagttggtgcgggagcttctacaagtgctggaggactatttggaaacaataacaactcgtctctaaacaattccaacggttcaacgggcctgtttggtggtaataatacctctcaatctactaatgctggaggcttatttcagaataacactagtacgaacacttcgggcggagggttattttcccaaccttcccagccaatggcacaatcacaaaatgcgctccaacaacagcagcagcaacaacgattacaaattcagaataacaatccctacggtactaatgagcttntttcgaaagcaactgtcaccaacacggtttcctatccaatcaaccaagcgctacaaagatca

SEQ ID NO: 80857 - DNA, 1596 bp, Saccharomyces pastorianus
atgacgaaaagggaaaaatatgtttatatcacattgaacaagttccaacaagaatcacagggtctaatagccgaaggttgggtgccttccacagaattgatccatttacaagactcattgaaggattacattgaaacgttgggttctgaatacagtaccgtctttaatgtgatcctaaccaataaattaccacctacataccatagaaccaacaagttcactcaggccttccaatcgattgtggatgcatacggtatcgcaacatataaagaaatcaatgctggtttagccacggttgtcacgttcccatttatgtttgccattatgtttggtgacatgggccatggtttcattttatttttgatggcactattcttggtgctaaatgaacgtaagtttggtgctatgcacagggacgaaatttttgacatggcatttacaggtagatatgttttattgttgatgggtgcattttctgtatatactgggctgttgtacaatgatatcttttccaaatctatgacaatattcaaatcaggctggcaatggccttccactttcagaaagggcgaatcgattgaggcgaagaaaactggggtttatccgtttggattggattttgcttggcatggtactgataacggactactattttccaactcttataagatgaagctgtccattctaatgggatacgcacatatgacttattccttcatgttttcttatatcaattacagagctaaaaactctaaagtggacataattggtaactttatccccggtttagtgtttatgcaatcaatatttggttatttgtcgtgggctatcgtgtacaagtggtcgaaggattggattaaagatgataagcctgctccagggttactgaatatgctaataaacatgtttttagcaccgggtactattgatgatcaattatattccggacaagccaagttgcaagttgtactactgcttgcggcactagtttgtgtcccgtggttattgctgtataaacctttaacactgagaaggttaaataagaacggtggtggtggcaggcctcacggataccaaagtgtgggcaatattgagcatgaggaacaaatagcacaacagagacattcagcggaaggtttccaagggatgatcatcagtgatgttgccagtgttgcagacagtatcaatgaaagcgttggtggaggtgaacaggggccatttaatttcggcgatgtcatgattcatcaggtaatccatactattgaattctgtttaaattgtatctctcatacagcatcatatctacgtctttgggcactatcgttggcgcatgcgcaattatctagtgttttatgggatatgacaatttcaaacgctttcagttctaaaaactcagggtcgcctttggctgtcatgaaggtggttatcttatttgctatgtggtttgttttaaccgtttgtatcctagttttcatggaaggtacttccgcaatgttgcatgcgctacgtttgcattgggtggaggcaatgtccaaattttttgaaggtgaaggatatgcgtacgagccattttcatttcgtgcaataatagaataa

SEQ ID NO: 80858 - DNA, 813 bp, Saccharomyces pastorianus
atgaatcaagaagaggctatattccggtcagcagacatgacgtacgtccaactgtacataccgttggaagtcataagagaggtaactttcttattagggaaaatgggtgtctttatggtgatggatctcaataaagatttaactgcctttcaaagaggttatgttaaccagttgaggcgtttcgatgaagtggaaaggatggtaggcttcttgaatgaggtagttgaaaagcacgccgcagagacctggaagtatattttacatatcgatgatgaaggaaacgacattgcccaacccgatatggcggatctcatcaataccatggaaccactatcgttggaaaatgttaatgacatggtgaaggaaattactgattgcgaatcccgtgcaaggcaattagatgaatctttagatagccttagaagtaaactgaacgatcttttagagcaaaggcaggtaatattcgaatgctcaaaatttattgaagtcaatcctgggattgctggaagagctacaaaccccgagattgaacaagaagaaagggatgttgacgagtttagaatgacccctgatgatatcagtgaaacattaagcgatgctttttcttttgacgacgaaacaccacaggaccggggcgctctagggaatgacctcactagaaaccaatcagtcgaagatctaagctttttagagcagggataccagcatagatacatgataacaggctctatcagaagaacaaaagtagatatattgaacagaatcctgtggaggttattgcgtggtaatttgatctttcagaatttccaatag

SEQ ID NO: 80859 - DNA, 522 bp, Saccharomyces pastorianus
atgaacgtgttattagctcctctgctttactcatgtccttctgaacctatggcgtatcaacttttcactaagctttgttatgaaatgataccgacgtatctaactaagaacctaaacggcgcccagaacggcgccaaactactagatatttctctcagaatcattgatccaaagctgagtaaatttctatcggacaacttacttacagcagagatttatggtatgccttccatactcacgttatccagctgcaataaaccgcttgatcaggtcattaaactgtgggatttcatgtttgcatatggattccatatgaatattctctttgtggtggcattcctagttaaaatgagatccaaggttttcaaatcggattcccctgttaatttactacgacagtttccggattttgatgctgacgagatcattcggctgggcgtcgggttcatcgctaagatccctgctcaaatttatggcctattggtagaccacttgaccgacccagacatatatataccgtaa

SEQ ID NO: 80860 - DNA, 387 bp, Saccharomyces pastorianus
atgacctcaattgaagatctgatatcaaatcctcccctgctactgcattcctcactctctcaacttcgctacctcatactcagtgaagggcttcccatatctgaagataaacagcagcagcgcacgcgatgttacgtgtggacggtgctctctcaaacttctatggaggcgtctacacaacggtaccttgcgctcttgaaactgggcccaccttccacaaccatttaccaaaaaatcaagaacgacacatccagaacttttcagacggatccaaattttaaaatagagtctcagaggatgcctcatccgtgtctgtcgggcttgttgggaacgcacgtagagacgaagatcggtggtcgatccttgagcctatttaggctgacgtgt

SEQ ID NO: 80861 - DNA, 123 bp, Saccharomyces pastorianus
  modified_base (9)..(9): a, c, g, t, unknown, or other
aaactttanaatagagtctcagaggatgccctcatccggtgtctgtcgtgctttgcttggcaaacacaacaaagaagacaaaagactcgttttggtcgcattcctgtgagcacatatgtgtag

SEQ ID NO: 80862 - DNA, 222 bp, Saccharomyces pastorianus
atgacattctcctgctttgccggtattcttggtattatcacaattgcaatttatggtatgatggatatggaagatacgaccgaaaaggttattcgagacttgcacgtggaccctgaagtcttgctaaatgaggttgatgaaaatgaagagcgtgaggtaaacgaagatcgtcattccactgaaaagcatcaattttcaactaaagccaaacggttcttctaa

SEQ ID NO: 80863 - DNA, 1245 bp, Saccharomyces pastorianus
atggacggtgtgcccttcttgacgcaatgtccaattgcgccaggcagtactatgctttacaatttcacggtggactacaatgtaggcacctactggtaccattcacacacggacggtcaatatgaagacgggatgaaaggtcttttcatcatcaaggatgatagcttcccctacgattacgatgaggaactttctttatcgcttagtgagtggtaccacgacttggtcacggacttgacgaagtcgttcatgagtgtttataatccgacaggtgctgagcccatcccacagaacttgattgttaacaacacgatgaatctgacatgggaagtccagcccgatacgacgtatcttttgagaattgtcaacgtgggtgggttcgtttcgcagtacttttggatcgaggaccacgaaatgactgtggtcggaatcgacggtatcactaccgagaagaacgtaacggatatgctttacatcactgtcgctcagagatatacagtcctggttcacactaaaaacgacacggacaaaaatttcgccatcatgcagaaatttgatgacaccatgttggatgtcattccaagtgatttacagctgaatgcaacctcttatatggtctacaacaaaaccgctgcgctgcccacacaaaattacgtggattcaattgataacttcttggacgatttctacttgcaaccgtacgagaaagaagccatctatggcgagccagatcatgtgattaccgttgacgttgttatggataacttgaaaaacggtgtgaattacgccttcttcaataatatcacctatactgcaccaaaagttcctactttgatgaccgttttgtcttcaggtgatcaagcaaacaactccgaaatctacggttcaaacacgcacactttcatcctagaaaaggatgaaatcgtggagattgtgctaaataaccaggacacaggtacccatcctttccatttacatggtcacgctttccaaaccatccagagagatcgtacatatgatgatgccctaggtgaagttcctcacagtttcgatccggacaaccaccctgccttcccagaatacccaatgagaagagatactttatacgttagaccacaatccaatttcgtcatcaggttcaaagccgataacccaggtgtttggttcttccattgtcatatcgaatggcatttgttgcaagatttgggtcttgttctcgtggaggatccttttgtatccagatga

SEQ ID NO: 80864 - DNA, 135 bp, Saccharomyces pastorianus
atgactaacactttgctctctatagccgttttgcttttctcgatgctctcgctagcacaagcggagacgcacacgtttaattggaccactggctgggactacaggaacgttgatgggctaaagagccgtcccgtg

SEQ ID NO: 80865 - DNA, 126 bp, Saccharomyces pastorianus
atgtcgaacaaaattgatgacttcgtccatagaccaagtaataacttggagcaaagagatcctcaatttagagagcaaggaaacgttgtgatgtcattatataatttagcctgtaaatacatataa

SEQ ID NO: 80866 - DNA, 480 bp, Saccharomyces pastorianus
atggttaaaggtagtgtgcatttatggggaaaggatggcgaagcatcgttgatttcagtggacagcattgcgcttgtatggtttatcaagttatgtacttcagaagaggcaaagagtatggttgcgggattgcagatcgtattctcaaacaatacagacctatcatcagatggaaaactaccagtgttaattttagataatggaacgaaagtatctggttacgtgaacatcgtacaattcttacataaaaatatatgtactagcaaatatgagaaaggtacggattatgaagaagatttagcaattgttggaaaaaaggatcgccttttagagtattccctattgaattatgttgacgttgaaatttctagactaacggactaccagctctttttgaacaccaaaaattacaatgaatataccaagaagttgttttcaaaattgctatattattgcctatgtggtataatacgccattcg

SEQ ID NO: 80867 - DNA, 996 bp, Saccharomyces pastorianus
atgaaagatgcccaagtaatgattgatttggttaacgataaaattggtcaaaaaaattctaccctagtcatgtctacaggcgttattggacaacgactacagatggacaagatcagcactggtatcaataaaatttttggagaagaaaagttcggcagtgattttaactcttggttgaacgtagccaaatcaatctgtactactgatactttcccaaaattagttacatctagattcaaattacctagtggtactgagtatactttgacaggtatggcaaagggcgcgggtatgatttgtccgaatatggctaccttattaggtttcatagttacagatcttcctattgaaagcaaggcgttgcagaagatgctgactttcgctactacccgttcatttaattgtatatcggtggacggtgatatgagcaccaatgacacaatttgcatgttggccaacggtgctattgacaccaaagaaattaacgaagactctaaagattttgaacaagtaaaattgcaggtcacagaatttgctcagcgcttggcccagttagtcgttcgcgatggtgaaggttcgacaaagtttgttactgttaacgttaaaaatgctttgcattttgaagacgccaaaataattgctgaatcaatctcaaactctatgttggtcaaaaccgcactatatgggcaagatgccaattggggaagaatattgtgcgcgatcgggtatgcaaagctgaatgacttaaaatctctagatgtcaacaaaattaatgttagctttattgctaccgacaattcagaacctcgtgagctgaagcttgtcgctaatggtgtgccacaattggagatcgatgaaacaagggcttctgaaatattggctttgaatgatttggaagtgtctgtcgacttgggaaccggtgatcaggcagcacaattttggacttgtgatttatcacatgaatatgtaacaattaacggtgattaccgttcataa

SEQ ID NO: 80868 - DNA, 309 bp, Saccharomyces pastorianus
atgagaatatcatcaacattgcttcaacgctcgaagcagcttatagataagtatgcattatacgtgcccaagacgggctcttttcctaaaggatttgaagtaggctacactgcatctggagtcaaaaaaaacgggagcctggacctgggtgtaatcttgaataccaataaatctcgtccttcaaccgcagcagctgttttcacgaccaataaattcaaagctgcgccagtttggacatcgaaaaaagtccttgaaactgctcgtggtaaaaacatcaacgctattgtagtcaattccggttcgtgctaa

SEQ ID NO: 80869 - DNA, 2322 bp, Saccharomyces pastorianus
  modified_base (2304)..(2304): a, c, g, t, unknown, or other
atgttcaaatacaaccgctcactctgtagcagcgctttgatagcaaagtctcagattcgtttttatagattgaagcgggcgccattgaattatgcctcccatatacctgaagttcttaataagaccatcatagggccagacgaaccagaaaaatgtctcattttgaaaggaaaaacatcagaggaaatcgaaaataatcttctcagtaataagaaatttcaggagatcaatcctcttgatactatccaggaaacgttcattcaatatctgaaattttgtaatgaaactaactttaaaagaagtaacaagaatttaaacagattaaaaaaaaccttagaaagcaaggactctaatagcaccgtaaaaattaatgcagttttcaattatttgctcgaagagtgtgatttagaaatcaaaagattgaacacgaccggccaaacccaggtatacaatgaagagaaaggaaatgaagatgacttagagcaatccataatgaacgatattttccgatcagcacaagaacaatttgaagatcaagagggccatataccgttaaggagtacatcatttttactggagattttgaaaagttttaatgaacggtttaatggcataatcaaaccgaaagagtcaataacagaaatggtcacattcagccaacttgctcaagcttttgaagttgttaaattgataccagtgcaagaaatgaaggagaaagggatttacttggtcggaaatttactttatggcacagggaaagttcgtttagatcctataaatgagtcattctatattgaatccctactagtttttggaaactataaggctgcatacagtttatttattaccaataaagacaaagtaaacgagcgctggtggaatgaactaggattaatgatcacattaaggtctaaccacttgagaaacttcaggaaacttttagccgagacagatgcaaagtactcaacaaagtattcttatttgagcccaagagttaccaaattgagcatacgaaaatatttgtcgattggcaatgttactgaagctaatatactgactgatcgatttattaagttagtggaagaagttggaataatcagaatgaaagatgagcaggaggaacttcccacgggagttaaaaattttcagaatgagaaacatgcaactgagttcttaaatgaactagaaataccatcggatcatgattatatcagcattgttgatttccatctttataagagaaatattcccatggcggctcaacttatcagcaagtacatggaaatacctggaacgacacaagaagatgccgcatttctacttgttaaaaccaagctaaatatgttgaaagattttgaaaagctacgaaacatttttgctcaaaataaagattatgtagtgcctgagaataatgtgaaaatgttgcaagaggcatttgagagcgttattactaagtataacactaattctccaatatacaatgaattgctgtttgagaatgtttcggccttaacaaaaagtattgtattaactgattttctggaagagttcattactaaacaggcttctggacagtggatggaattaaacagtgtgtcacgttccagaaagtttaatggcttgttgaacatacttctcggtacaggtgaagaagaaaaagcatataatatcttaaaaaaactagaagaagcctcaaagaaatcaaaaacagatccagatttactctataatcagttttattcggaagttaatgcatatcattacgctaaatttgttgaattttatagtcttcaaattcaaaatatgaaggcacaaaatacgccctcatttagaaaaaaggaatttaagcagaaagtgaagtcacttttaaaaagaatgcaggagtcagaggttatcccaaatgctgtttttttgagagaaatactcaatttttatgatagcatgtatgactttaattcaagttttgagatcatcaatccgctacttgaatccaaacaacaggtgagctctgagtcttcattatccacctcaaacccttgccgattttacaaccgtcgcatcataacgaaaccgctgtaccacaagatttggtctgtgtattgccattattatcatgttttacaaaataattctaggattttatcgaaaaagtcgtccattgtaaagaaattaataaaaaggcagataaagattcacccaacttgtcacccaagagtactgttccaaatgacgacagaaaatggtgaaattttgccagacaaaactttttctaaattaattgtgtccacgtttatgaaaagcggnggattagaagcaatacct

SEQ ID NO: 80870 - DNA, 1242 bp, Saccharomyces pastorianus
atggtgaactctggggcaagagaacttccaatgcccttacatcagcagcagtatatatacccttactatcagtatacaagtaataacagcaacaacaataatgtgacggctggtaacaatatgtctgcgtcgccgattgtccatagcaacagcaacaacagcaacaacagcaatatttctgcttctgattacactgtcgcaaacaacagtactagcaataataacaataataataataacaacaacaataataacaataatattcacccaaaccagtttgctgcggccgcaaatatgaactcaaatgctgcagcggctgcttattactccttccccactgcgaatatgccaataccgcaacaggatcaacaatatatgttcaatcctgcttcatacataagccattactattcagcagttaacagcaataacaatggtaataacgccgctaacaatggcagcaacaactcttctcactcagccccagccccggcccccggtccaccccatcaccatcaccatcatagtaatacacacaacaacctcaacaatggtggtgctgtaaatacaaacaccgctcctcagcaccatccaacgataataacggatcaatttcaattccaactacaacaaaacccttctccaaatttgaatctcaatattaacccggcacaacctctgcatctacctcctggttggaaaataaacactatgccgcaaccacgtcctacgacagcacctaaccatccccctgcgccggtgccttcttcgaaccctgtggcctcgaactcggttcctgccccatcatcagaccataaatatatccatcaatgccaattttgtgagaagtctttcaaaagaaaatcatggttgaaaaggcacctattgtcacactcgcaacaaagacattttctatgcccttggtgcttaagcaggcagaagagaaaagataatctcttacagcatatgaaactcaagcatacaaattatttattagacgaactcaagaaaaacaacatcatctttaactacaacaattcttcctcctctaataataataacagcaatagcgctagcggcagtggcggtgccggtgccgcggcggcagcagcaacagctcccgaaaatgaagatggaaacggttacgatacaaacatcaagactttaatcaatgatggtgtactgaataaggacgacgttaaacgtgttttgaataaccttattgttagtcacaacaaatag

SEQ ID NO: 80871 - DNA, 81 bp, Saccharomyces pastorianus
atgaatgcggaccatcacctgcaacagcagcagcaacagcgacaacagcatcaacaacaacagcatcagcatcagcattag

SEQ ID NO: 80872 - DNA, 321 bp, Saccharomyces pastorianus
atgtttaaaaattttaacagttcttcctttggtttggattcgataatcttctttaaatataacagatgctttatttcatcgttggaaaagtcattgaattgtatagaatctagttcgttcgacacgactacgttagtcagttctttcaaatcccataattttcttaagttattgcttttggaagccgatttattgttactactcttgtcgttgttgctaacttggaaatatattaacgaggctatgtctttgaccatattatcctcgctattgccattttgggatccatttgatactaacttatctattaaactttcttga

SEQ ID NO: 80873 - DNA, 693 bp, Saccharomyces pastorianus
atgtttgaaaactgcgaaaaatggaggaaggattatggtaccgacactatcttgcaagattttcattatgatgaaaaaccattgattgccaaattctacccacaatattatcataaaaccgataaagatggccgcccagtatattttgaagaattaggtgctgttaacttacatgaaatgaacaaggttacctctgaagagaggatgttgaaaaacttggtttgggaatacgaatctgtcgttcaatacagattacctgcctgttcaagagctgctggtcacctagtggaaacttcatgtacaattatggatttgaaaggtatctccatatctagtgcatacagtgttatgtcatatgttagggaagcctcctacataagtcaaaactattaccccgaacgtatgggtaaattttacatcatcaacgcgccattcggtttctctaccgcatttaggctatttaaacctttcttggatccagtcactgtttcaaagatttttatcttgggttcttcttaccagaaggaattactaaagcaaattccagctgaaaacttaccagtcaaatttggcggtaagtctgaagttgatgaatccaagggtgggttatacctatccgatatcggtccatggagggatccaaagtatattggaccggaaggtgaagctccggaagccttttcgatgaaatga

SEQ ID NO: 80874 - DNA, 999 bp, Saccharomyces pastorianus
atgaatccttatttgagtgagtttccaagtaacatgttttatgaaggcagcctacaaaatggtgtaacgattgaacagcgtaccgttcccaacagcaaattcccatggccaattcgcggtataccaatgatgttttgggccaattacggtagagaggagatttctgctaacggtacttccttcttaaacagaattgaagccatgaattgtgaacgaatcatcactaaacttttcagagacggtgtcaagcccgagcaaattggtgttatcacaccatatgagggacaaagagcttatattttacaatatatgcaaatgaatggttcattggataaggatttgtatatcaaagtggaagttgcctcagttgatgcattccaaggtcgtgaaaaggattacataatcttatcgtgtgttcgtgccaatgaacaacaggccattggtttcttacgtgatcctcgtcgtctaaacgtgggtctaacccgtgccaaatatggtctagttattcttggtaatcctagatctttggcaagaaacacattatggaaccatctgttaatccacttcagagagaagggttgtttagtcgaaggtacgttggataacttacagttatgcactgttcaattagttcgtcctcagccaagaaagactgaacggccaatgaacgctcaatttaacgtagaatctgaaatgggtgactttccgaagttccaggattttgatgcacagagtatggtgtcattcagtggtcaaattggggactttggtaatgcatttgttgacaacacagaactttcttcttacatcaataatgaatattggaattttgagaattttaaaagtgctttttctcaaaagcaaaatcgcaatgaaattgacgatagaaatttgtaccaggaggaggcttctcatttgaactctaacttcgcgagagagttacagagagaagaacaaaagcatgaattgtcaaaagacttcagcaatttgggaatataa

SEQ ID NO: 80875 - DNA, 1410 bp, Saccharomyces pastorianus
atggtcggttccggttctcacactccttatgatatatcaaactctccatctgatgtaaatgtccaacccgcaacacaactaaattccaccttggtggaggatgacgatgtagataatcagctatttgaagaggctcaagtcactgagactggattccgttcgccttcagcttcagacaattcatgtgcgtattgtggtatagattctgcaaagtgtgtcatcaaatgtaattcatgtaagaaatggttttgtaacactaaaaacggtacaagcagctcccacattgttaatcacttagttttatcccaccataacgtagtttctttacatccagattctgacttaggggataccgttttggaatgttataactgtggacgtaagaacgtgtttttattgggatttgtttccgctaaaagtgaggccgtggttgttttactttgtagaataccttgtgcccagacgaaaaatgcgaactgggatactgatcaatggcaaccattaattgaagacagacaacttttatcatgggtcgcagagcaaccaactgaagaagaaaaattgaaagctcgtttaatcactcctagccaaatttccaagttggaggcaaaatggagatccaataaagacgctacaattaatgatattgacgccccagaggaacaggaagcaatcccacctttactattgagatatcaagacgcctacgaataccaaagatcttacgggtctttaatcaaattggaggccgactatgataaacaactcaaggaatctcaagctttagaacatatttctgtttcatggtccttagctttaaataataggcatttagcatctttcactttatctactttcgaatctaacgagttgaaagttgccatcggtgatgaaatgatactatggtactctggcatgcaacatcctgattgggaaggtcgtggttacattgttcggttaccaaatagcttccaggacacattcacattagagttaaaaccaagtaaaacgccacctccaacacatttgaccactggttttactgctgagttcatctggaaaggtacctcttatgacaggatgcaagacgcattgaaaaaatttgccattgataaaaaatctatttcaggttatttgtactataaaattttaggccatcaagtggttgacatttcatttgatgtcccattacctaaggagttttcaattccgaattttgcacaattaaactcatcccagtcgaacgctgttagtcatgtattacaacgtccgttatctttaattcaaggcccaccaggcactggtaaaacagttacttcagcaacgattgtgtatcacctttccaaaatacacaaggatagaatattggtgtgtgacctgcaggcatgcaagctggcactgccgtcgttt

SEQ ID NO: 80876 - DNA, 711 bp, Saccharomyces pastorianus
atgctgcaggtgactctagaggatcccctgatggttctttccaacaatttgcgaccgctgatgctattcaagccgccaaaattcaacaggggtaccgacttggccgaagtagccccaatattatgtgctggtgttactgtatataaagcactaaaagaggcagacttgaaagctggtgactgggttgccatctctggtgctgcaggtggcttgggttccttggccgttcaatatgcaactgcgatgggttacagagttctaggtattgatgcaggtgaggaaaaggaaaaacttttcaagaaattggggggtgaagtattcatcgactttactaaaacaaagaatatggtttctgacattcaagaagctaccaaaggtggccctcatggtgtcattaacgtttccgtttctgaagccgctatttctctatctacggaatatgttagaccatgtggtaccgtcgttttggttggtttgcccgctaacgcctacgttaaatcagaggtattctctcatgtggtgaagtccatcaatatcaagggttcttatgttggtaacagagctgatacgagagaagccttagacttctttagcagaggtttgatcaaatcaccaatcaaaattgttggattatctgaattaccaaaggtttatgacttgatggaaaagggcaagattttgggtagatacgtcgtcgatactagtaaataa

SEQ ID NO: 80877 - DNA, 2163 bp, Saccharomyces pastorianus
atgtgtggcatttttggctattgcaattttttaattgagaagacaagaggagaaatcatcgacactttaatcgaagggttacaggcattggagtacaaggaatatgactccagtggaatttcgatccaaggtgatgagctgaagtctctcaatatttataagcaaaccggtaaaataagcagtttgaaggaagaaatcgacctttacaatcttaataagaacctgccctttatttcgcattgtggcattgcccatactaggcgggcaacacatggagggctaagacgtgcaaattgtcatccacataactcagatccatctaatgaatttgttgtggtacacaacggggttattaccaacttcgctaatttgaaagccttattgatggcaaagggctatgtgttcaaaagtgacactgataccgaatgtattcctaaactgtacaaacacatttatgatacaagcattgaactcgggtacaacctcgatttccatgtattaacaaatttagtacttaaagaattggaaggctcttatggtctgctatgcacttcttctcattttcccgatgaagtggttgccgcaagaaagggttccccgttagttattggtgttaaaggtaaaactgacatggacgtaaactttgtcgaggtggaatatttggatcaagaagaagactacttgaagcttaatactcaaaccaagagttctggtaatgtcttggctgccgcacctgtaaaatataacacttgtttaaggaagtcacccccccttcgttcacaatacctgagaaactctacaacttctacattcaatcatggctcatccacagaaacgccagccgagaacggcttgccgcgacccatggaattctatttgtcatccgattgtgcatcactagcgcggtatgtgagtaaagtagtatatttggaggataatgatattgcccatatctatgatggggagcttcatatccattgttctaaaattggttccgaggacttttcatttagaacagttcaaaaattagaattggagttgtccaaaatcaaaaaaggcccttacgataattttatgcaaaaggaaatatacgagcagtgtgaaacaacaaaaaatgtcatgagaggaagagttgacgcctttacaaacagagtagttttgggaggactagaaaattggttgacagaattgagaagagcaaaacgaataataatgattgcatccaaggcctccttccattcatgcctagctgcccgtcccatctttgaggagttaatggaagttccagtaaacgttgaattggccttggatttggttgaccgcaattgttgcattttcaggaacgatgtttgcatatttgtttctcgaagtggggagacaactgatacaattaatgctttgaactactgtatcaaaaaagaggcagtcacaatcggggtagttaattgcagcggttcctctatctcaagatttacacattgcggtgttcatacaaacacaggccccgagaaaggtattgcaacaaccaagtcttatacttctcaatacatcgctttagtcatgattgccctatggatgtcggaagatttggtgtctaaaatagaaaggaggaaagaaataattcaagccttaactatagtcccaagccaaataaaagaagttttggagcttgaaccattgattattgaattgtgtgacaagaaactaaaacagcatgatacatttttgcttttaggaagaggttaccaatttgcctctgctttggaaggcgcctcgaagatgaaagaaatttcttacgtgcattctgaaagtattcttaccgacgagctaggacacagagtcttagctgtggcatctgataatccgccaattatcgcctttgcgacaaaggatgctttttcgcccaaaatcgcgtcttgcattgaccaaataatagaaaggaagggcaatccgattatcatttgtaacaaggggcataagatatgggagcaagacaaacaaaaaggaaacgttgttacacttgaggtaccccaaaccgtagattgtctccaagggatacttaacgttattcctttacaattaatttcttactggttagcgatcaagaaagacatcggagttgatttgccaagggactcggcgatgtcggccccggatatataa

SEQ ID NO: 80878 - DNA, 1176 bp, Saccharomyces pastorianus
atggttcctgtaacgaaagtagttacaccaatcaaatctgctcttaaaaaatcgtcaggatcgcccaaccatgactcatccatgtactctgataactctcccgccaatggcgcatatctgtctcttacgactgctgaaaatacgagattaaatgctcaaatgacgatgtccgacagcgtatcacgcagagcaagtgtaaaacgatcttctataaaaagacctcagtcagtaggccagttcagaagcatcagatcaaattcgccttctcctccagagaaaataaacaataaacgccattctgctatacccctaggaaccccagagaagggtaaaccaaaaagaaattcggttatggcttctctgtctaaaaattcgcagcaaattcaagagcccgcaagtgtatatgagtcaaatggcccaaataaaccgaaaaaccaaatcaataagaatataaagagaggatcacagatcgcgcaaaacaataaaccttcaacgaaggacatgaatagtattttgtaccccaaagaaccacctcctcgcaaatctagttttgagaagacgagaagcaatgaatcccatctcggatttaaaaagctttctttgagaaatggtaattttgaggaggcattgagtgaaagctataatgggcaagctagccagaatagcacaaatgtgaatcgaaccgatacagcacaggagtttttcaaatatttgggtcattcatcaagatttgcggattcagactcagaagatgagtcccaatttttcaaccaaggcccatcaaaatacaacacagaaacagaaggcaataaaaccagcggtaacaaaaatagtaatggtggtaacggtgctttttcgcttttcaagagcaaaagtaagcaaaaagaaaataatgtggtttcccctggagtctcaagtcctaatcatactaccaccgatcctgccattacaagtaaaaaggtggacaagaaattcagcgggttatctttaagagctgccagtgaagctgaacctgcaaaaaattcaaacccttcgatgaccaataggttacgcttctctagtaatccagagaacggcgaaaacaggctcccacaagcacaggaagtcagcgttacaaaagaaaagaagggtagtttcggcaaaaaactgaaaaaaatctttggtagaaagaaatag

SEQ ID NO: 80879 - DNA, 1434 bp, Saccharomyces pastorianus
atgtttagaagaagaacaactgcaccagaaatggaacaggcggacccgacagcagtggcagctgcagcaagtatcggtaaattatttatgaagaagggtaatcaatctgataacgaacaaaggccgacctatcgatccgcttcgatgacaaacttaagaaaaccttctgcccccaaaaaaatgtcttcaatttctagtatatcatcggaatctagaaggagcgatggtaaaggtcgtcccgggaaaataaacagccttacccaacggtcatcaatggggaagggagattcattaaattctcctttaacgaaggaaccgcagcacaaagctaggtctcataatagaacttcgagtctccctaaccagagaggtcagcaaagcagaaacagttctggtttacaacgtcaaaagtccaaaacacaccaaagaataagctatgatgaggctcaacgtacgttcaaggattttggcggaccacaggccagaggaattttaacgggacaacaccgtactgaaaaccctagcgggtctattcctttgaggactacgcgaaagtatattcctgggcccaacgggctggttgcaattgaggtccccgttgaaaaaccaagcaatgccaatacttctaaatcgctaaggcgttccaactctgcccacagtgccttgaatgcaagaaatggttcacttttaagaaaaaaagtatcgcaggaatctttacattctcaaccaaagaagacttcgtctttagggaatacatcaagtacacaagcaaaaaaaggccagaaggcggttcaggagagaaatcttgccaagaaacatccaataaattcaaatgttcctctcattgaaacacaagttcgtgaagaaacagaccaagagttgaaacttgataattctaactcttccgaatccgaaacagtagtcaatagcgaaaataatctagaaaaaccttcttcactaaacattgaaaaagatgatctaagcaaactaatacatgaaaacattgagttagaaagttttattgaagaaaaagggaaggaaaaacctttaaattctgatcaagaagatgttttcataagcgaaaaaactgtaaaaggcgatgtacaatggccaaaaaataaccgtcaagcatctactcttgagaaaacttttaattacgacaacgaagagaagagggaggggaataaaccagtagcagaacatcctcttccggaggccgaagtggatgacaagtcggttgaacaactgaacaacatttcttctagcggcagttattcggcccaaggatcagttgaaaactccaaaccagaaaatggcaataaaaatctagagaatgacacaacatcgtctcccacacaagaccttgatgaaaaatcccgctcaatagaagagaaggataccttggaagggaccgagagttcaaaaaaaagttga

SEQ ID NO: 80880 - DNA, 240 bp, Saccharomyces pastorianus
atggatacggccaaaaaaaaaaaaaagcatataaaatggagatttcttgattattcattattaaaaaatcctttatatgttacagtgcatggaagccatcgttcagaagttgaacgagcacgaaaaagaataaaatacataacttgtacaaggagagaatttctgccgagagtccctatttctttctaccaaagatttttttcagttttttgccgaaactacccttcttttcttttgtaa

SEQ ID NO: 80881 - DNA, 816 bp, Saccharomyces pastorianus
atgctggccaccgaaccagctaggatagtgggttttagagattcatatttattttttcaaactcaccccaacctttataagttcattctgaatcaaactcaaaagaacgacttgatagaccgtggcgttttaccttattcatatagaaatagacaaatcgctctagtcaccgctagaggcgtgtttaaagaatttggtgctaaaatcattcgtggcggcaaacatataaccgatgattattatgcttctgaactaagaacaaagggaaatgtaattgaaggaaaacttgctggtgatcctattgataaatctgcaagggccttagaaaccatgatgtatcctgcttccgagaatggcataaaccctgcaaaaaaccaggtggaattctttgaacacaggccacatggtcacatgagtaattctaatattattgcatcaggtagtaagctgagctctacaaattggctctatcagcattctgctgcgtgtagtagatttaatagcgatttgttttatgatagagtgaaggttcttcttgtagatcaacaaggcttgagagatgcatacacaaatatattacacataccagaatccacacagtcaaccactgttttaggatggaggagatcaaaaaacgatagtcccagcgacacaagcattgtgtatgagaccgttatacacgataacgatttgaataaaccgaaaacgggactgtcggaaatcccgaaagagatctatgaagacgttgttgatgaagacgttttaagggctatcaccgaacaacaaaatttcgaaaaatgcaacgaatatatttag

SEQ ID NO: 80882 - DNA, 162 bp, Saccharomyces pastorianus
atgtcagattcagagggaggtctagcttccgaagttgaacatgagaagcggtcaagatctactagcaacagacccaattatgcaattgatactgaggatttagatattgatgaaaatgatgagaatgaagatgatgattacagagaagaagaagcaatgagg

SEQ ID NO: 80883 - DNA, 357 bp, Saccharomyces pastorianus
atgaaacgtgtaagtaaaatcaagtggtggaacatcgaggaaaatatactaaaggaactaaaagtcgataagagaacttttaaatcgttgtacataaaggaagatgatagtaaattcacaaaattttttaatttacgacacacaagaataaaagagcttgacaaaagtgaaattaatcaaataacataccttcgatgtcaagcaatagtttggctatcttttcggactttgaaccatatcaagctacaaaatgtatctgaagtttttaacaatatcatcgtacctagagcattgttcgatagtaaacgagtagagatttatcgatgtgaaaaaatctctcaggttttggtaatataa

SEQ ID NO: 80884 - DNA, 981 bp, Saccharomyces pastorianus
atgccttctttcaatcctgttagattcttagagttaccaattgacattagaaaagaagtttacttccatttagatggtaatttttgcggagcacatccctacccaatagatatattatacaaatctaatgatgtggagcttccaggaaaaccaagttataaaaggtctaagagatctaagaaattattgagatacatgtatcctgtttttgccacgtatttgaacattttcgaatactctccgcaactcattgaaaaatggcttgagtatgcattttggttgcgctatgattgcctggttttggactgtttcaaagtaaaccatctttatgacggaacgcttatagatgcattagaatggacgtaccttgataatgaacttcgactggcctacttcaataaggccagtatgttagaagtttggtatacttttaaagagtacaagaagtgggtgatagacagtgttgcttttgacgagcttgacttacttaatgtaagtaatattcaattcaacattgataatctaactccacaactagtagacaaatgcttatcaattttagaacagaaagatttattcgcaacaatcggggaggtacaatttggacaagatgaagaagtaggagaagagaaagatgttgatgttagtggagctaattctgacgaaaactcctcacctagctccacaattaaaaacaagaaaaggtcagcatccaaaagatcacattcagataatggcaatgtgggagcaacgcacaaccaactaacaagtatttctgttataagaacaataagaagtatggaatccatgaagagcctgcggaagatcactgtgagaggagagaaattatatgagttgctaataaattttcatgggttcagagacaatcctggtaaaacgattagttacatagtgaaacgtaggataaatgaaaatacgcctatcacgcatgaatcaaatttccagaaccggactagctga

SEQ ID NO: 80885 - DNA, 147 bp, Saccharomyces pastorianus
atgaaaatacgcctatcacgcatgaatcaaatttccagaaccggactagctgactttacaagatgggacaacttgcaaaagcttgtattacgtagagtagcttacatcgacctgaatagcattgtccttcccaaaactttcaaatct

SEQ ID NO: 80886 - DNA, 891 bp, Saccharomyces pastorianus
atggttttatgtaatcttcagaatattttgataaaagcattaagggtagggccagtgcctgaacatgtctcctttatcatggatggtaaccggagatatgccaagtcaagaaggctaccagtaaaaaaaggccatgaagctggtgggttaacattactaacactactgtatatctgcaaaagattgggtgtaaaatgtgtttccgcctatgcattttctattgaaaattttaatagaccaaaagaagaagtagatacgctaatgaatttgtttacggtaaagcttgatgaattcgcaaaaagagccaaggactataaggatcccttatacggatctaaaataagaatagtaggtgatcaatctttactatctccagaaatgagaaaaaaaattaaaaaggtggaagaaatcacacaggatggagacgatttcactttatttatatgttttccttacacttcaagaaatgatatgttacatactattcgtgattcagttgaagaccatttggaaaataaatcaccaaggattaatataagaaaatttactaataaaatgtacatgggtttccattccaataaatgtgaattattaatcagaacaagtgggcataggaggctctcagactatatgctatggcaagtacatgaaaatgccaccattgaatttagtgatacgttgtggccaaattttagcttctttgctatgtacctgatgattctcaaatggtccttcttttccaccattcaaaaatataatgagaagaatcactcattgtttgaaaaaatacatgaaagcgttccttcaatatttaaaaaaaagaaaacagctatgtcattgtacaactttccaaacccccccatttcagtttcggttacaggagatgaataa

SEQ ID NO: 80887 - DNA, 171 bp, Saccharomyces pastorianus
atgaaaatgcccagtattattcagattcagtttgtagccctaaaaaggcttttggtagaaaccaaagaacagatgtgcttcgcagtgaaaagtatatttcagagagtatttgagtgggttatgtcattaagcttgttttcatggttttatgtaatcttcagaatattttga

SEQ ID NO: 80888 - DNA, 960 bp, Saccharomyces pastorianus
atgcaagtaaggaaaaaagatacccaaaagatttacgctttgaaggctctgagaaaagcatatattgtatcgaaatgtgaagtgacacatactttagcggagaggactgtcctagcaagagttgactgcccctttattgttccgttgaagttctcattccaatctccggagaagttgtacctagtattagctttcattaatggcggtgaactgttctaccatttacaacacgagggacgattcagtctagcacgctcccgtttttatattgcagaactattatgtgctctcgattcattacacaaacttgacgtcatttatcgtgacctaaagcctgaaaacattctattggattaccaaggacatattgcactgtgtgattttgggctttgcaagctgaacatgaaggataatgacaaaacagacactttctgtggtactcccgaatatttggcaccagaaatcttgttggggcagggctatactaaaacagttgactggtggacattaggtatcttactgtatgagatgatgacagggctgccaccatactatgatgagaacgttcctgttatgtacaagaaaattctgcagcaaccgctactatttcctgatggatttgaccctgcggctaaagacctattaattggcctcttaagcagagacccaagcagaagactcggcgttaacggtacagatgaaattcgtaaccatcctttctttaaagacatctcatggaaaaagctacttttgaagggctatattccgccttacaagccacttgttaagagtgaaatagatactgcaaattttgatcaagagttcactaaggaaaaaccgatcgatagtgtagtggacgagtacttaagtgcaagtattcaaaagcagtttggtgggtggacgtacattggtgacgaacagttgggtgattctccttcgcaggggagaagcattagttag

SEQ ID NO: 80889 - DNA, 1041 bp, Saccharomyces pastorianus
atgcattcctggcgaatatccaagtttaagttaggaaggtccaaagaagatgatgggagtagtgaagatgaaaatgaaaaatcgtggggtaatggcctgtttcatttccaccatggagaaaaacatcacgatggtagcccgaagaatcataatcatgaacacgaacaccatataagaaagatcaatacaaatgagactctcccaagttccttaagttctccaaaattacgtaatgatgcatccttcaagaatccatcggggataggaaatgacaattctaaggcttccgaaaggaaagctagtcagtcgtctactgagacgcagggaccgagttcggaatccggactaatgacagtgaaggtgtattctggtaaagattttactcttcccttccctatcacctctaactctactattttacaaaaactactaagttccggcatccttacttcatcatccaatgacgcttccgaagttgcagccataatgcggcagctaccacgatacaagagagtggatcaagattcagcaggggaaggcttgatagatagagcttttgccactaaattcattccttcctctatattgttacctgggtcaacaaattcaagcccattactttattttacaattgaatttgataattctattactactattagtccagatatgggaacgatggagcaaccagtgtttaacaaaatatcgacatttgatgtaacaagaaaattaccatttttaaaaatcgatgtctttgcaaggattccatccctacttttaccctctaaaaactggcaacaggagattggcgagcaggacgaagtactgaaggagattttaaaaaaaatcaatacaaatcaggatatccatttggactccttccatttacctttgaatttaaaaatcgattctgcagcccaaataagactatacaatcaccattggatttctttagaaaggggatatggtaaattaaatatcacgcggactacaaaccttctaagaacaagcctctctccattgatgactttgatctattga

SEQ ID NO: 80890 - DNA, 240 bp, Saccharomyces pastorianus
atgttttcgaaagagtaccgtcaacctaggacacatcagcaagagaacttgcagagcatgagaagatcttccataggatcacaggacagttccgatgttgaggacgttaaggaagggagattacccgcagaagtagaaataccaaagaatgttgacatctctaacatgtcgcaaggtgagtttttaagactttacgaaagtttgaggaggggggaacccgacaataaagtaaatagataa

SEQ ID NO: 80891 - DNA, 597 bp, Saccharomyces pastorianus
atgcagaacaaagctgctacaagaagatctgttcctaatcctgcttccactctcactgcatccaaaagtaatgcccgtccttctccccctactgctgccactcgtgctacacccgctgcagccgcaatgggctctgatagacaggcaaatatccctccaccacctcctccacccccaccctcttcaaagccaaaagaacccatgtttgaagcggcttacgatttttctggttcaggatcaccatctgagttacctttaaagaaaggagacgtaatttacattacaagagaagaaccaagcggttggtctctcgggaaacttctggatggctctaaggaaggttgggtgccaacagcttacatgaaaccacattccggaaataataatatccctactcctcctcaaaacagggatgttcctaaacccgttctgaattctgtacaacatgataacacctctgcaaacgttattccagctgcagcccaagcaagtttgggtgatggtttggcgaatgcgcttgctgctagggccaataaaatgagattagagagtgatgacgaggaggctaacgaagatgaagaggaagatgattggtaa

SEQ ID NO: 80892 - DNA, 1029 bp, Saccharomyces pastorianus
atgtatgaaatgtatgaaaagctcaatatgcttgaagaagcccaaaatttgtaccaagaattattaagtcggtttttcgaagcgctgaatgttcctggcaaagttgatgagagtgaaagaggcgaggttttaagaaaagacttgagaatcttgattaaatcgttagaaatcaataaggacatagaaagtggcaagagaaaattgctacaacatttacttttagctcaagaggaaattttaagcaaatcgccagagttgaaggaattttttgaaaacagaaaaaagaagctctcgatggtaaaagacatcaatagagaccctaatgatgattttaaaacatttgttagtgaggaaaatattaagtttgatgagcaaggctatatgattttggatctggaaaagaatagcagcgcttgggaaccctttaaggaagaattttttactgcgagagatttatatacagcttattgtctgtcatcaaaagacatagctgcagctctaagttgcaagataactagtgtggaatggatggttatggcagacatgccaccaggacagatattgctatcacaggcaaatttggggtcattgttctatcttcaagcagaaaagctagaagctgacttaaatcaattagagcaaaagaaaagtaaagagtccaaccaagagttagatatgggaacatacataaaagccgttagattcgtacgcaaaaatcgtgacttatgtctggaaagagcacaaaaatgttacgacagcgttattgcgtttgccaaaagaaacagaaaaattaggtttcatgtgaaggatcaactggatccttcaattgcacagtcaattgctctatctacctatggaatgggggttttaagccttcatgaaggtgttttggctaaagctgaaaaactattcaaagattcgatcactatggccaaggagactgaatttaatgaactccttgcagaagctgaaaaggaactagaaaagacgacagtcttgaaagcggccaaaaaagagggtttaaactaa

SEQ ID NO: 80893 - DNA, 543 bp, Saccharomyces pastorianus
atgcttttacaaggaatgcgtttatcgcaaaggttacataagagacatctatttgcttccaagattttaacgtggactacgaaccctgctcatatacgccacctacatgatataaggccgcctgcatcaaacttcaatacgcaagaatcggcccccataccggagtctccagcaaactcaccaactcgaccacagatggcacctaaacccaatttgaaaaaaaaaaatcgtagtttaatgtattctattattggggtttccatagtaggtttatatttttggtttaaaagtaactccaggaaacaaaaactacctctttcggcacaaaaagtctggaaggaagccatatggcaagaaagtgataaaatggattttaattacaaagaagcgttaaggcggtatattgaggcgttggatgaatgcgatcgctctcatgtcgatttattgtcagatgattataccagaatagagctgaaatgtatgaaatgtatgaaaagctcaatatgcttgaagaagcccaaaatttgtaccaagaattattaa

SEQ ID NO: 80894 - DNA, 300 bp, Saccharomyces pastorianus
atgttgtggaacttggccgctaagaaggctatgtacactttgtctgcccaagatgaagttttctctttggctttctctccaaacagatactggttggctgctgccactgctaccggtattaaggtcttttctttggacccacaatacttggtcgatgacttgagaccagaatttgctggttacagcaaggccgctgaaccacatgctgtttctttggcttggtctgctgacggtcaaactttgtttgccggttacaccgacaacgtcattagagtttggcaagttatgactgctaactaa

SEQ ID NO: 80895 - DNA, 573 bp, Saccharomyces pastorianus
atggcatctaacgaagttttagttttgagaggtaccttggaaggtcacaacggttgggtcacatctttggctacttctgctggtcaaccaaacctattgttgtccgcttcccgtgataagactttgatctcctggaagttgactggtgacgaccaaaagtttggtgtcccagttagatctttcaagggtcacagtcacattgtccaagactgtactttgactgctgacggtgcttacgctttgtctgcttcttgggacaagaccttgagattatgggatgttgccaccggtgaaacctaccaaagattcgtcggtcacaagtccgatgttatgtccgttgacattgacaagaaggcttccatgattatctctggttcccgtgacaagaccatcaaggtctggaccatcaaaggtcaatgtttggccactttgttgggtcacaatgactgggtttcccaagtcagagttgttccaaacgaaaaagctgatgatgactctgtcaccatcatttctgccggtaacgacaaaatggttaaggtatgtgatatattttctttccatgatagaatatga

SEQ ID NO: 80896 - DNA, 774 bp, Saccharomyces pastorianus
atgaaccaggaaaacatcaacaatgatacttttctatataaaaaaaataatcgcgatggtcatttatcagcagtttctcatatgtccagctcttcccgtagatcgttcatctccaatacgctgccgttgaatattgattccgcctcagaatctgataattttgtaccgcatatggatggttcaccctccaaaacaaaatcagccccagttagctacgataaggatggcatgaatgcttcagaagaagacttcagttttgataatactttagccaaaccgtatgaaccgttatatgctaggagaggagacataacttccgccggatcaactagtggagaagatagctctcagccaaagatgataacaatatctggtgagcaattgaatttgataacagaaaacaaagaattaatgaatgagttgacactggtgtctacagaattagcagaatcgataaaaagggaaactgaattagaagaaagaatacggctgtatgaaaccaataattcagcaccatcttttgacgattcttcgagtgtgtctttttctgactttgaaaaggaactgagaaaaaaatccagtaaaattgtgcaattgatccagcaattaaatgacgagagattaaagagattcattgcggaggagcagttattactccaagaaaatggcaccaaaccaagttctatggaactagtaggaagaattgaaaacttgaataaacttattgatgagagagattcagaaattgaaatgcttaaaggacatttacagtag

SEQ ID NO: 80897 - DNA, 2040 bp, Saccharomyces pastorianus
atggatgcaggtttatcgaccatggcaacaagaaacggtcagtcttctgctagagttaaattgagaaataacctcttgaataatgatataggaaatattgacattagggatgaaacacctatttcaaggaacgggaatgacagcaatattaacatccagccttcttccgtgccgctgcagcagcagcagcagcagcaatactaccgtaatggcatgaatgaggctccaatacaagcgccacttcaacaacgtcaaattcccatgcagaattattcacaacagcaacgccagcaacaacagtataattttgagtattccaatccacatatgaatgagattcccctcatgcagcataacttcaccaaaccatcactaagcaataatcgcgataatgttaatggtaagaaagcttcctcatttacccagagctcattttccaattttttcaaacataagcatcaatttgggaagtcaaagaaaaacactaaggggacaggaggtggtggagatggtgatgatgacgatgaggttatcttggatgattctgcaaactccgacctaacattcaatgacattcagaccttcggtcacaagggcggtgacaaatatggatatggtggtgattccactcctatcattccaacattggtgactaaagaccgcggcaatatgagtaatactgagtataggaagtacattactaatcaaaggaaaaccgcaatgaatgccatggctaaacaaactaaaaatggtacattagcctcgttgcctccgagagcaatgtctttgcaaagtttcccgaatggtaatcctttaatgcaagcacccactcctcatcctagatttcaaccgaataaaatggtgagcgctaattattcgagatcaaattcgttgatgagtggacctcccggacaatttcgacagccgcagcaacaaagaatgctaccgatgaacaactacaacaatcacccaggtcaattccagaataccccaccagtaatgccctctggacaacagccacctcagcaaccacgtactctgtcattaactaatggcccaagatattcaccccaaaatcctcggccattcgcaggtcatcagcagatatcacaaagacaacaacaacaacaacaacaacttcaacttcatccaatgtctgaaggctatcggacaatgtctctacaaagtcagaacgttccccaagggtttaatccatggtcaccaaatgacaacgatcgtaaagctgtgtctatgaaacagccaatcagtcaatcgtcaatttcctcaaagaataattcagcttattcaataccgaacgtacaaaacaactccctgactacattctctccgtcatctcctactgatgctacagcaatgcctaactctacaaaacaaggatcttcaccactaaaaaaacaagtgaacattgatcaacctattgaaaacaagggaaaactgaatgttttgcaattatccactcctcaacaaaacgagttaaaggaaaaagaaaggaagctagctgaaatggaaaaatctttacgtgagagagaagcactagtagaagaaaaagaaaaggaaagagctgagaaaaatactgaagcaaatgaagaggaggaaatttcacatgaatcagacgatttaaatttaagacctacgagtgcgctagagactggtttaagagatcttaaattggaaagtgaaagtgcagtcgccaatagagcgtccttgtcgactttctcatccacatttagtgattctccctccaagcaaagaatcatcaataccagaacaggtatgtataagctagaaaactctactgatatcaatgaatacgtgaccgcacaagaattcccctctcccggaaagtataactcaaattcggataatggcgaaatgaatacaacgaacgaggtcgattttgatttcaatactagtaaagggcttctttgttacaatccataccggaaagagatcccaaaagaaatgtctcagatgctaccattaagcgacgtgaatccgatggcaatggcaggagactaa

SEQ ID NO: 80898 - DNA, 1866 bp, Saccharomyces pastorianus
atgagggtgaaaccaagcgcatcactaaaattacaccatgatttgaaactctgtttgggtgaccacagcagtgtcccagtagcactaaaaggccacggcccttctacgttaacatatgatatcattgaaactttttctagcaagaggaaaacttttgaaattaaagaaataaaaaccaacgaatatgtcattaaaacaccagtctttactactggtggtgattatattctatctttggtttctatcaaggattctaccggctgtgtagttggactcagccaaccagatgctaaaatacaggtgaggagagatattccatctgctgcattcaatttttttgaacctatcaaagaagctaaaattaagcacggttctgtcactgaaattccgctcaaattaagtggagaggggccattcaccgttaagtttaaacacatggattacgatggaaacattgtgaaagaatttgaaaacaaatttcagaatagttataagcccgctttgaaagtaagtaaagaagggctttaccaattggtcgatattcgtgactcaagttgccaaggtaatgtgattgaccggaacagtctgtataaggtatctttcttggagaagccaaaatttgcaattcaagacaatcatcacattacaaaagtaacggaaaatttattctctaaagaagaagtctgtcaagggatggaaggtacggttgatttggctctatttggttctccgccattcatattagaatatgatttgatggcacccaacggtcatatttctacaaaaaaaattcaggtggcaaccaaatacgcttcactgaaactgcctaatcaaattcctggagagtacataactactattaaggccatcttcgatggcaattatggtgaaagcgacatacattttagagaacatcagtcggagctcataatcaaacagacagtgcaccccattccagacgtcgcctttgctgatggtggtaaaaacttgcgtgcatgtgctgctaatgtagatcaaatctcatttttggaaccaataaatttgaaatttttacaaggcgaaagcccattttcaatcacctttagcgtttatcacgagagtaccagtaggacagatcagtataccattgacaacattgactcagagaacttttcatttgaaaagttatatgaagggatgaagttaggtaaccatgccattactattgattctgttgttgacgcaaatggttgtgttaacagcctcatatctggaccgcgtaatcaaattcttgtgtcaattactgatgcaccaaagatacatatattagatccttctaccgagtattgtgttggggactatgttgcatatcaattaaacggtgtggcacctttcatgattaagtatgaattcaacggtattccactaaaatctaaggaacgcagctcccaatttgttagattagcatctgaaccgggcattatatctatcacttctttacaggattcatcatcacaatgcattgtcgactttacgaaccctaaattaaagagtgaatttgatgacttatctttaaacatacatcctattccttccgtaactgtttctcaaggaaattacgttactgaggatatccgcgaaggtgaccaggctgaagtaatcttttcgtttgaaggtaccccaccattctcactaacttatgtaaggacagaagagactgatggaaaacacggcaaaaggaggtcgcaggttgttgagacgcataaagtcactgatatatattctcatgaatacaaggtaattacaagcttgcaaggtacctacgaggcgattgaaattacagatgcttattgttttgccaaaaatgatctttttttcaataactaa

SEQ ID NO: 80899 - DNA, 843 bp, Saccharomyces pastorianus
atgagcgaaaatggtgatgtttatatatacaatctagctccacaaagcaaagctttttccacaccaggttatcagattccgaagtctgctaagcgtcctattcacactgtaaaaaatcatgggaatgttgaaggctacgggttggattggtcaccattgatcaagactggtgcgttactatcaggtgattgctcaggacaaatatattttacccaaaggcacacatcgagatgggtgactgataaacaaccatttactgtttcaaacaataaatccatagaagatattcagtggtctcgcactgaatccaccgtttttgcaaccgcaggatgtgatggatatataaggatttgggacacaagatcaaaaaaacataaacctgctatctctgttaaagcttctaatactgacgtaaatgtcataagttggagtgataaaattggttacttgctagcaagcggtgacgataacggtacatggggagtatgggatttaagacagtttacgccaagtaatgctgacgccgtccaaccggttgctcaatatgacttccataagggagccattacttccattgcattcaacccattagatgagtctatcgttgcggtaggctcagaagataatactgtgactttgtgggatttgtctgtagaagctgacgatgaggaaattaaacaacaggccgccgaaacaaaagagctacaagaaattccaccacaattattgttcgttcactggcaaaaggaagttaaagatgtcaaatggcataagcaaatcccaggttgtttagtaagtaccggtactgacggtttgaacgtctggaaaacaatcagtgtctaa

SEQ ID NO: 80900 - DNA, 180 bp, Saccharomyces pastorianus
gcctgcaggtctataattaagaatgagggcggtgaaggggcaagaaagtttacgatttccaacggtgtcaaaatttacaatcataaagatgaactactgccattgaatatcgatgatgttcaattatgtttcctgaagattgatacggggaacacgataaaatgcgaattcatactatga

SEQ ID NO: 80901 - DNA, 603 bp, Saccharomyces pastorianus
atgtcgttaaaggataggtatctaaatctcgaattaaaattaataaataaactacaggagttgccatatgttcatcaatttatccatgatcgaataagtggtaggataactctctttttgatagtggttggtacgcttgcattttttaacgaactgtatataacgatcgaaatgagtcttctacaaaagaacacatcagaagaactagagcgtggaagaatcgatgaaagtctgaagcttcatcggatgttggtgagtgatgaatatcacggtaaagaatacaaagacgagaaaagcggtattgttattgaagagttcgaagatcgcgataagttttttgcaaaacctgtgtttgtatcagaattggatgtcgaatgtaatgttattgtagatgggaaagaacttctgtccaccccattaaaatttcatgttgaattttctccagaggattatgaaaatgaaaaaagacctgagtttggtactaccttgcgtgtattgaggctgagactttaccactactttaaagattgcgaaatatatcgcgatataattaagaatgagggcggtgaaggggcaagaagttacgatttccacggtgtcaaa

SEQ ID NO: 80902 - DNA, 201 bp, Saccharomyces pastorianus
atgatccacatagaaagatttaatgctctacaatgcctgtgtagtccatattttgatgaactaaaacttgatgacggtaaaataaatcaaataacaactgatttgaaattgctagagttcgatgaaaatgtcgaattgggccatctatctcccgatgaactatcatctgtaaaaaaaaagctatatccgaagtctaagtaa

SEQ ID NO: 80903 - DNA, 729 bp, Saccharomyces pastorianus
atgaaaatgctgagtcacataaatataatagatctgaagtactttttctatgaaagggactcccaagatgagatttatttaaatttgatactagaatacatgccacaatctttgtaccagaggttacgtcatttcgtccatcaacgtacgccgatgtcaagattggaaataaagtactacatgtttcaattgttcaagtcattgaattacctccatcatttcgcgaacgtctgtcatagagacattaagcctcaaaatttattagtagatcctgagacctggtccttaaaactgtgcgatttcggcagtgcaaagcaattgaaacctactgaacctaacgtttcctatatttgttcacggtactatagagcaccagagctaatcttcggcgcaacaaattataccaaccaaatcgacatatggtcctctggctgcgtaatggcggaactgctattgggccaaccaatgttccctggagaaagtggtattgatcaactagtggaaatcattaaaatcttaggtactccatcaaagccagaaatttgctctatgaatcccaattatatggagcataagttcccgcaaattaaaccaataccattgtcacgtgttttcaagaaagacgatgatcaaactgtggaatttctagctgacgttttgaaatatgatccactagaaagatttaatgctgacctgcaggcatgcacgcttgcactgccgtcgtttaca

SEQ ID NO: 80904 - DNA, 183 bp, Saccharomyces pastorianus
atgaatattcaaagcaataattctccgaatctcagtaataacatagtgtcaaaacaggtttactacgcccatcctccacctacgatagacccgaatgatccggtgcagatatctttccctaccaccgaagtagttgggcatggttcgtttggtgtggtatttgccactgtttcaagaaactaa

SEQ ID NO: 80905 - DNA, 300 bp, Saccharomyces pastorianus
atgaatccgacaatgttgaacaccttgggaatattggccacacatgtcttgaaagatgaaattgacgatgattctggaaatcaaacgattctgcaactggctgcagggagtataagcaacgattgtaacactacggagttggaaattacgtgcagtcctgaaatgggaaggactattacacacaatcgaccaaatactaaagatgagtcaattcaggattcacatgggaataagaccctccaattgcctaaaatgaaaagtttcagtaccatagacggaagcattaaggatattaagtga

SEQ ID NO: 80906 - DNA, 789 bp, Saccharomyces pastorianus
atggaagaaaataaacttagtggaaataaaccgattcaacttgctacctggtcgaaccagatggggtcaccagaaaacaatggaaataatgcaaataatggtagtgatgtacagaatgttattcagaaagctttaggcttgattcgacagttgaacaataatgggctaatgagtccgatggaagaagagcattcgcaaccttcatcttcacaagagacacttagtgtcgatagagagattaatgaacagggccgtttgcgtcttcttatgcaagcaaaagatgataatacgcggaaggaagtaggcacatattctagtccgatggattctgcgtacgccagggaaaatatgttaaacgttttgcaatcattagttacgcatctgaaccaagctgtcagccaaatacaacaattaaaattcaagaacatgattcttacttcaaatgaaaataatattcagtcgaggcatgaagtggaagataatctccagaaacagcaatttgaaaggatgaagtgtcagtttctattggaacgtcaaagtttgaaggatcaattgcgaaagcgagagaataaaattgttaaatataagcagaaaattattgaaaagaacaagaaattaaacaatctagcaaaagtacttaatcaacatgcaatatctgatacctctcaaatagatagtttcagtagctcggtaaagaaaacgccttcttcgactacaacgccccaagaaatgaagtcggacatgttgaacaccttgggaatattggccacacatgtcttgagaagatga

SEQ ID NO: 80907 - DNA, 921 bp, Saccharomyces pastorianus
atgtccagtattgagaaagctgcctccctatctccaaaagatcctgagagagcaagattgttgagctttgttgtcgttggtggtggtcccaccggtgtcgaatttgccgctgaattgagagattatgttgaccaggacttgagaaaatggatgcccgaattgagtaaagaaattaaagtcactttggtggaagctttgccaaacattttgaacatgtttgacaagtatctcgttgactatgctcaagatttattcaaagaggaaaaaatcgatttaagattgaaaacaatggttaagaaagttgacgctaccactataactgccaaaactggcgatggtgacattgaaaatataccgtatggtgtattagtttgggctacaggtaatgcgccaagagaagtgtctaagaacctaatgactaaattagaggaacaggactcaagacgtggtttgttgatagataacaaacttcaacttttgggtgctaagggatctatttttgctatcggcgattgtaccttccaccctggcttgttccctaccgctcaagttgcccaccaagaaggtgaatacttggctcagtatttcaagaaagcttataaaattgatcaattgaactggaaaatgacccatgccaaagacgattcagaagtcgctagattaaagaaccaaatagtgaaaacgcaatcgcaaattgaagacttcaagtacaaccataagggtgctctggcttatattggttcagataaagccattgctgatcttgccgttggtgaagccaaatataggttagccggctcattcaccttcctattctggaaatctgcttatttggcaatgtgtctatcctttagaaacagagttcttgtcgctatggattgggctaaagtttatttcttgggtagagattcatctatctag

SEQ ID NO: 80908 - DNA, 78 bp, Saccharomyces pastorianus
atgattagacaatcattaatgaaaacagtgtgggctaactcctccaggtttagcctacagagcaagtcggggctgtga

SEQ ID NO: 80909 - DNA, 807 bp, Saccharomyces pastorianus
atgtacagtcatatttatggtgaacgtggtactttaacacactacttgatactcaaccctgccaaagatatacccatcacacatatggtggaggttccaaaggacgaaaatgacccatatgacgactttgtatatgctgctgcctggcccctaacatttggtacagccttttctacattatacgatttcaagaaagattggacttctgattcaaaagttctggttattggcgcttcaacctctgtgtcatatgcttttgtccatattgcaaaaaactacttcaacatcggcactgttgttggcatttgtagcaagaattccattgaacgcaataagaaattaggatatgactacttggttccctatgacgaaggatccatcgttgagaatgttaagaaattaaagcaaatcgtgttggaaaacgacaaatttgacatgatttttgattcagtgggtaaccatgatttcttccctgtcattgatcaatttctaaaacctaaggcgaaaaattccttttacgttacaattgcaggaaataacaaggccaattataagaatatcagttggagagatttcgtatcattgagttctattttaaaggctataaacccattcaaaaaatacaactggcgctttggacacccttatccccccaacaacttcattgaagttggcaacgaaatgatcaagaagggcacttataagccgcctattgattccgtctacgagtttgatcaatataaagaagctattgacagactgatgtccaacagagctaagggtaaagtagttgttaagatgaaatga

SEQ ID NO: 80910 - DNA, 210 bp, Saccharomyces pastorianus
atgttggtcatgcttttgggtagatatttcaaagagaacttcaaggccggtgacaagctagtagttgtgaactttcctcattcgattgctgatgcaacaagatttgaaaatgaggtttctatagtgtctaaaatctttgttccgaggaaattgagtggctctgacgtctgtaaatattacgaaactgtaggtaaagctgatatcatctga

SEQ ID NO: 80911 - DNA, 915 bp, Saccharomyces pastorianus
atggaattattggagttagcaggttacagaagctcctatattcatatcaatgagcttgtcgatcatttctttccaccagtccgccttgatagtgtcgatctaagaactaatacttccatggttcctggctccccccctaatagaacgttggataactttgactcagaaattacttcagatcgcaaaacgctatttagaggcaatcaggaagagaaattcacagacgtaaatttttggagagacccgttagtcgacatcgacaacttatcggatattagcaatgatgattctgataacatcgatgaagatactgacgtatcacaacaaagcaacattagtagaaatagggcaaattcagtcaaaaccgccaaggtcactaaagccccgcaaagaaatgtgagcggcagcacaaataacaacgaagttttagccgcttcgtctgatgtagaaaatgcgtctgacctggtgggttcccatagtagctcaggatccacgcccaataaatctacaatgtccaaaggggacattggaaaacaaatatatttggagctaggttctccacttgcatcgccaaaactaagatatttagacgatatggatgatgaagactccaattacaatagaactaaatcaaggagagcatcttctgcagccgcgactagtatcgataaagagttcaaaaagctctctgtgtcaaaggccggcgctccaacaagaattgtttcaaagatcgacgtttcaaatgacgtacattcacttgggaattcagataccgaatcacgaagggagcaaagtgttaatgaaacagggcgcaatcagctaccccacaactcaatggacgataaagatttggattcaagagtaagcgatgaattcgatgacgatgaattcgacgaagatgaattcgaagattaa

SEQ ID NO: 80912 - DNA, 243 bp, Saccharomyces pastorianus
atgataggaaaagactggacgcacttgggtgtagccaagttatttagcgagatctccaggaatggctataatatactctatctaactgcaagaagtgctggacaagctgattccacgaggagttatttgcgatcaattgaacagaatggcagcaaactaccaaatgggcctgtgattttatcacccgatagaacgatggctgcgttaaggcgggaagtaatactaaaaaacctgaagtcttaa

SEQ ID NO: 80913 - DNA, 1110 bp, Saccharomyces pastorianus
atgcagtacgtaggcagagctcttgggtctgtgtctaaaacatggtcttctatcaatccggctacgctatcaggtgctatagatgtcattgtagtggagcatccagacggaaggctatcatgttctccctttcatgtgaggttcggcaaatttcaaattctaaagccatctcaaaagaaagtccaagtgtttataaatgagaaactgagtaatatgccaatgaaactgagtgattctggagaagcctatttcgttttcgagatgggtgaccaggtcactgatgtccctgacgaattgcttgtgtcgcccgtgatgagcgccacatcaagcccccctcaatcacctgaaacatccatcttagaaggaggaaccgagggtgaaggtgaaggtgaaaatgaaaataagaagaaggaaaagaaagtgctagaggaaccagattttttagatatcaatgacactggagattcaggcagtaaaaatagtgaaactacagggtcgctttctcctactgaatcctctacaacgacaccaccagattcagttgaagagaggaagtttgttgagcagcgtacaaagaactttcagcaaaaactaaacaaaaaactcactgaaatccatatacccagtaaacttgataacaatggcgacttactactagacactgaaggttacaagccaaacaagaatatgatgcatgacacagacatacaactgaagcagttgttaaaggacgaattcggtaatgattcagatatttccagttttatcaaggaggacaaaaatggcaacatcaagatcgtaaatccttacgagcaccttactgatttatctcctccaggtacgcctccaacaatggccacaagcggatcagttttaggcttagatgcaatggaatcaggaagtactttgaattcgttatcttcttcaccttctggttccgatactgaggacgaaacatcatttagcaaagaacaaagcagtaaaagtgaaaaaactagcaagaaaggaacagcagggagcggtgagaccgagaaaagatacatacgaacgataagattgactaatgaccagttaaagtgcctaaatttaacttatggtgaaatgatctga

SEQ ID NO: 80914 - DNA, 444 bp, Saccharomyces pastorianus
atgagcagtatgctaaatgagtactattccatagaattggtgaatgatggtctagataatgacttaaagtctgtgaagctaaaatctctaccactacttttaaaaggctacattccatctctggtcaagttaccattttttatatatcgcctgggtaaagaagttgattgggaggatgaacaagagtgtctagatggtattttaagagagattgcattactctatatacctgatatggttccgaaagtcgatacatctgatgcatcgttgtcagaagacgaaaaagcccagtttataaatagaaaggaacacatatcctcattactagaacacgttctcttcccttgtatcaaacgaaggttcctggcccctagacacattctcaaggatgtcgtggaaatagccaaccttccaagtctatacaaagtttttgagaggtgttaa

SEQ ID NO: 80915 - DNA, 1326 bp, Saccharomyces pastorianus
atgtctctcagaataaaagcacttgatgcatcagtggttaacaaaattgctgcaggtgagatcataatatcccccgtaaatgctctcaaagaaatgatggagaattccatcgatgcgaatgctacaatgattgatattctagtcaaggaaggaggaattaaggtacttcaaataacagataacggatctggaattaataaagcagacctgccaatcttatgtgagcgattcacgacgtccaaattacaaaaattcgaagatttgagtcagattcaaacgtatggattccgaggagaagctttagccagtatctcacatgtggcaagagtcacagtaacgacaaaagttaaagaagacagatgtgcatggagagtttcatatgcagaaggtaagatgttggaaagccccaaacctgttgctggaaaagacggtaccacgatcctagttgaagacctttttttcaatattccttctagattaaggaccttgaggtcccataatgatgaatactctaaaatattagatgttgtcgggcgatacgccattcattccaaggacattggcttttcttgtaaaaagttcggagactctaattattctttatcagttaaaccttcatataccgtccaggataggattaggactgtgttcaataaatctgtggcttcgaatttaattacttttcatatcagcaaagtagaagatttaaacctggaaagcgttgatggaaaggtgtgtaatttgaatttcatatccaaaaagtccatttcaccaatttttttcattaataatagactagtgacatgtgatcctctaagaagagctttgaacagcgtttactccaattatctgccaaagggcaacagaccttttatttatttgggaattgttatagatccggcggctgttgatgttaacgttcacccgacaaagagagaggttcgtttcctgagccaagatgagatcatagagaaaatcgccaatcaattgcacgccgaattatctgccattgatacttcacgtactttcaaggcttcttcaatttcaacaaacaagccagagtcattgataccatttaatgacaccatagaaagtgataggaataggaagagtctccgacaagcccaagtggtagagaattcatatacgacagccaatagtcaactaaggaaagcgaaaagacaagagaataaactagtcagaatagatgcttcacaagctaaaattacgtcatttttatcctcaagtcaacagttcaactttgaaggatcgtctacaaagcgacaactgagtgaacccaaggtaacaaatgtaagccactcctaa

SEQ ID NO: 80916 - DNA, 171 bp, Saccharomyces pastorianus
atgaacttgtacaatctttttcgccttgaaaaggtcttcttatttttattgagcctccacttgttaccatacttggcctcaagatgcttgatcgatggctttcctcttattccagtatcatactcttcccatatagtctttacatcagtgggagccttcaatatcctataa

SEQ ID NO: 80917 - DNA, 1428 bp, Saccharomyces pastorianus
atggcagagttgtttttcgaaaaaggatccaaaaactctcaaatttctgagtttcttcaagatatggacctttcgatagaattatttatggaatttttagtgctgctaaatgatgaggaacaatcaaagactttatttttagatattctgaaaagatgggtccatcatacaaaaaaaagtgaaaaaagatcttccgataatcatagcgggatgccaagcgttacagataacgcgttaatactcatggacttgaaacttttggaatgtatgaacaaccgatttaaaaccaagattgttaataaacctaaggacgttcttattgttattgatcaattgatagatgttgttcaggaaaaagatgaaacaatacaggaagtagaagcagattctgacgacgaagttgaagaaggagaagaaacagaagaattggatccaaatgaaaattcttcctacaaaattatcttgcagttattatcaaccgtcctttcagaatcgtccagtagtatattattgcaaaacagttatatattgaaatccatttctagaaaattacaatctttcaacactaatgcttccgaaatagatgcattattggcatcaatagataatatattgattaacggacatactacggaaaggaacgacaacatagaaattgagatggatgaggaaaggcttgacaaagcgataactagtctacatgatcctttagtgcccataaaatcttatggtttaacagaactacgtcatctagctgaaaagaagtctccagtaatttcactggaaaaggtgttgcaaatacatttagattatttaaagaatatggaccctttcatttatctcaacgttattaaaggacttacaacgctatgtgaattagagccagaaaccatattgcctctacttgcagaattttatgctaacaaaaaaaagaaaaacagattagatgatgtgctgaaagttggagaagtgttcatcaattacattcaacgtcagaacgaattgttccagggtaaattggcttatctgattatagatacctgtcttagtattgtgaggccaaatgatagtaaaccattggacaatagatggcgtatgtcatccatgtcaatcttaggtatgtgccttcaaatcaacgccaggggtgtctcggatagaattcgcgatatgctggattgtgtatttggaatattgcaattagaacaaccacaaaatcatttgaaggacaaggatgattcttttttgatgagaagaagtgccgtacacttgatacatgatttgttgtacagtacaggatttgatttacttccctttgagtacaactacgataagctaaaaacactattatcttacgttcgtgatcaagatgaagattacatggtttgtgaacagattgacaagcttttaaccgtattagatagtttataa

SEQ ID NO: 80918 - DNA, 897 bp, Saccharomyces pastorianus
atgaatgaggataaagagcaaaagatcaacatacacgatatattgaatacaagaccgaagctcaccaaaaagacagccctagatgttttcttcgaagatctggatgacaatgtaattactcccataaacgaatatgttcttgattcaggctcatcatcatcctcttccatttatcaggcgttgaagtgctcaaataacaatgagtttgttgcagtacttttacagaaattccagaatttgcacattcacgtactagaacagcaacggaggctcatcgaaagtaaaagtgacttattgcctatctcattgcatgatatgaaatacgtagacgaactgataaatcttttgattattcatggtatagatgctaatttgtctcctacgatgaaaattccattcgattcgaaaagaataaatactttcaagaagggccaaaaaagcgcagaatatgaaacgcctcgatggcacaccataaataacgatactttatctcaagtcataactgtcttttataatgttctaactagtgagaggtcttctgactacctgagagaaataatatcaaaaggcagtgcttacgcaaacattttattaggtttgattgtgttacatttgcagttgcctaataggtactcttcacaaatgattacaaatctagaagatactcaagaaacttatactttgtttggggtttacactctactagtagaaacaattcaagacgaaaaggttagggagccaatcctttcgaagttaacaacgttaactttacgaagaccggaaaatggtctgatcagcttgattgatttcgttttgggtgtgagagatgctgaagatatagatattgaaaagtttaaccgtatctaccaaattttgatgagtaagccaaaacaatga

SEQ ID NO: 80919 - DNA, 480 bp, Saccharomyces pastorianus
atgagcacactaaaacactgcgctcatgaatttatagttgatctaaaagaatacaaagctaaaggtgttgaagctatcgatgttgccaagagattgcaagactacggattccatgccccaacgttggccttccctgttcccggaactttgatgatagaaccaacagaatcagaaaacttggaagaattggatagattctgtgatgccatgatatccatcaaagaagaaataaatgccttagtagcaggtcaaccaaaaggacagattttgaaaaatgcccctcattcattggaagatcttattacttcctccaattgggatacgagaggttatacccgtgaagaagccgcttacccattaccctttttgagatacaataaattctggcctactgtcgctagactggatgacacttatggtgacatgaatttaatatgtacatgcccttctgtagaagaaattgcgaacgaaactgaatga

SEQ ID NO: 80920 - DNA, 993 bp, Saccharomyces pastorianus
atgcaccatagcgaaacagcaatgttgagatatttacataggttgcaatctcgtgatttatctcttgctaattctatgattcctttaggttcctgtactatgaaattgaacagtactgttgaaatgatgccaatcacttggccccaattttcgaatatccatccgttccagccatcaaaccaagtccaaggatacaaggaactaattacttcgttggagaaagatttatgcagcattacaggtttcgatggtatttctttacaaccaaattcaggtgctcaaggtgaatatactggtctgagagtaatcagatcctacctggaaagcaaaggtgaaaatcatcgtaacgtgtgtttaatccctgtatccgctcatggtacaaatccggcttctgccgctatggcgggtttaaaagttgttcctgtcaactgtttgcaggatggctcattagatctggttgacttaaagaataaggctgaacaacattctaaagaactagccgccgtaatgatcacctatccttctacttacggtttatttgaaccaggcatccaacatgctattgatatcgtacattcttttggtggacaagtctatttggatggtgctaatatgaatgcgcaggttgggctaacttcacccggagatcttggtgcagatgtttgccacttgaatttacataagacattctccattcctcatggtggtggtggtccagctggagctcccatttgcgtcaaatctcatttaataccccatttacctaaacatgacgttgttgatatgatcactggaatcggcggtagcaaatccatcgattcggtctcctctgctccatatggtaatgctttaatgttaccaatttcttatgcctatatcaaaatgatgggtaatgagggattaccattttctagtgtgatagcaatgctaaattcaaattatatgatgacaagattaaaagatcattataaattcttttcgtcaatgaaatga

SEQ ID NO: 80921 - DNA, 1764 bp, Saccharomyces pastorianus
atgcttaggacaagagtgactgctctcctttgtagggctactgtcaggtcaagcaccaattatgtttcattagcgaggactagatcattccattctcaatctattttgctcaaaacagccgctacagacataacgtctacacagtacagcaggattttcaatcctgacttgaaaaacattgatagaccgctagatacttttgctagacgtcatttaggtccttctcctagcgacgttaagaaaatgttaaaaacaatgggttatagcgatttaaacgcatttatagaagagctcgttcctcccaatattttgaagagaagacccttgaaactagaagctcctagtaagggattctgtgaacaagaaatgcttcaacatctagaaaagatcgccaataagaaccactataaagttaaaaatttcataggtaagggttactacggtacgattttaccaccggttatacaaagaaacctgctagaaagtccagaatggtatacttcttatacaccctatcaacccgaaatttctcaaggtaggctagaagcgctattaaactttcaaacggttgtttcagatttgactggtttgcctgtggcgaacgcctcattgttggatgagggtacagcggctggagaagctatgctcttgtcattcaatatttccagaaaaaagaaactaaaatacgtaatagataaaaaattacaccagcaaacaaagagtgtccttcacaccagagccaagccgttcaatattgaaattattgaagttgactgttcggatatcaagaaagctgtggatgttttaaagaaccccgacgtatctggttgtttggttcaatatccagcgacagatggttcaatcttaccgcctgactcgatgaaacagctatctgatgcgttacactctcacaagtctttgctctctgtggcctcagatttaatggctttgacacttctaaaaccacctgctcattacggtgctgatatcgtcctgggttcctctcaacgatttggtgtcccaatgggttatggtggtcctcatgctgcttttttcgctgttattgataaattaaacagaaaaattccaggtagaattgtcggtatctctaaagaccgcttaggcaagacggccttgcggttggccctccaaacaagagaacaacatatcaagcgtgataaggcaacttcaaatatatgtaccgctcaagctttactggctaatgttgcttcgagctactgtgtttatcacggtcctaagggcctacagaatatttccaggaggatatttagcttaacatcaatattggcaaatgccatcgaaaatgacagttgccctcacgaactaattaataaaacatggtttgatactttgactataaagttaggtaatggcatatcctccgagcagttattggacaaggccttgaaagaatttaatatcaatttgtttgccgtggacaccaccactatttccttggctcttgatgaaacaactacaaaagctgatgttgaaaatctactaaaagtgtttgacattgaaaattcttcgcagtttctttctgaggactattctaacagtttcccaagggaatttcagcgtactgatgaaatattgaggaacgaagtctttcacatgcaccatagcgaaacagcaatgttgagatatttacataggttgcaatctcgtgatttatctcttgctaattctatgattcctttaggttcctgtactatgaaattgaacagtactgttgaaatgatg

SEQ ID NO: 80922 - DNA, 444 bp, Saccharomyces pastorianus
atgcctgacagtattttaaaaaagatggcagcaatattaccaatgaatgattcggcttttgcaactttaggcacagtggaggacaagtatcgccgaaggttcaagtactttaaagccacgatagcagatcttagcaaaaagagatcaagcgaggatcatgaaaaatacgacacaatactaaatgatgaatttgtgaacagggccgcagcttccagcaatgggattgcccaaagtactggaacaaaatctaagttttttggcgccaatccaaacgaagccaaagaaaatgaacaaattatcaatcaaatcagacaaagccaattacccaaaaataccacaagcagcaaatcaggtacaaggtccatcagtaagtcgtccaagaagtctgctaatgggagacgaggttttagaaattaccgaggtcactacagaggaagaaagtga

SEQ ID NO: 80923 - DNA, 183 bp, Saccharomyces pastorianus
atgcactcatgttcttctcgtatttggggtaaacccctttataagttcgaaaatcgtcataacccgttcagttccttgtttatgtctcacatacctgtcttaacggccatttcttattgtgtttgctgtctttcttgtttctttgatacttgtaaatcagtactatactgttcaacatcctga

SEQ ID NO: 80924 - DNA, 327 bp, Saccharomyces pastorianus
atgctagtgaccttcttacctttgtttaaaccaatagcaattcctaaatataaggacacaggttgtcttcagttagtaacatgtgaagtaggcatacatatacacgtgtatatgtgtcggcgggaagtgacgtataatgtacggctttgtatagcatcttttgtgattattttccatggcaattcttacaatggtgcaactactaaaatgttccatttgaaggcgttttcgcaatactattccttttgtaaaatggacctcatcttcaaacacaatatttttttagataggagtgaagagataagcctgtgtatgcatattaaatag

SEQ ID NO: 80925 - DNA, 246 bp, Saccharomyces pastorianus
atgaccccagctccaaaaatctcttacaagaaaggtgctgcttccaacagaaccaagttcgtaagatctttggtcagagaaatcgctggtttgtctccatacgaaagaagattgattgatctaataagaaactctggtgaaaagagagctagaaaggtcgccaagaagagattgggttctttcaccagagccaaggctaaggtcgaagaaatgaacaacatcattgctgcttctcgtcgtcactaa

SEQ ID NO: 80926 - DNA, 174 bp, Saccharomyces pastorianus
atgcctggcggctccttcgctttagaattggctcagggctggattccatgcatgttgccattcggattcttggatactttctccagtactctcgatttatacactctatacagaactgtctacttgactgccagagatatgggtaagaacttgttgcaaaacaaaaagttctaa

SEQ ID NO: 80927 - DNA, 885 bp, Saccharomyces pastorianus
atgaatcctgcttttcaaacctcacacactttctctataggttcccaagcattgcctaagtacgcattctccgcattgtttgccaacgataacctatttgctcaaggtaatatcgacaacgatttatctgtttccggtagattaaactatggttgggataagaaaaacatttctaaggtcaacctacagatatcagatggccaaccaacaatgtgtcagttagaacaagactatcaggcttccgatttttctgtgaacgtaaagacattgaacccttcgttctctgagaagggcgaattcacaggtgttgctgttgcatcttttctacaaagtgttactcctcaattagctttaggtttagaaactttatactccagaactgacggtagcgctccaggtgatgctggtgtttcatacttgactcgttatgtctccaagaagcaagattggattttttcgggccaattgcaagccaacggtgctttaattgcatcgctatggagaaaagtagcacaaaatgtcgaggcaggtatcgaaactacattacaagctggtatggttcctattactgatccattgatgggcactccaattggtattcaacctactgtcgagggttctaccactattggtgctaagtatgaatacagacaatctgtatatcgtggtacattagattccaatggtaaggttgtatgttttctagaaagaaaagttctgccaactctgtccgttttattttgcggtgaaatcgatcatttcaagaacgataccaagattggttgcggtctacaatttgaaactgctggtaatcaagaattactaatgttacaacaaggtttagacgcagatggtaacccattgcaagctcttcctcaattgtga

SEQ ID NO: 80928 - DNA, 342 bp, Saccharomyces pastorianus
atggaaaaagtcacgcagatttttatattggagactgagaaggaggttgaacgagggacaagtgatcaaaagactgcaaaaaaaacatgtgataacaaaacgaaaatgaagtacgacgacctgttgaaaatagttcagtcatggtataacgatctggatgttaatgatgacagagcagtagtggagttcatagaaagaaattcgaaaaaaattgacaagaacattgaagagtttgagatctcgctgttgatcgatgagcttaagaaaaaatttgaagacagaaggggaaacattgtccttgaagagctaactaggttggtggacagtaagcgaaagagatag

SEQ ID NO: 80929 - DNA, 102 bp, Saccharomyces pastorianus
atgaatgattgtaacgatggtgtgcgagtaccattgattatcttagccaattggaggggattgtctgtcggtcaaagggatatgtactatgaagttacttaa

SEQ ID NO: 80930 - DNA, 333 bp, Saccharomyces pastorianus
atgaagttacttaagtacgggtcttttatcgttgacgctctggttgactacaaactacccatactgatatacattccgccctgtggtgaattaaggggcggatcatgggttgttatagatccaactattaatcctgaacaaatggaaatgtatgccgatgttgaatctaggggaggtgtgttagaacctgacggagtagttagcataaaataccgtaaggagaaaatgatagagacgatgattcgattagactccacatatggacatttgagaagaacgttgacagaaaaaaagttatctttggaaaaacaaatgatcttacgaagagattga

SEQ ID NO: 80931 - DNA, 1719 bp, Saccharomyces pastorianus
atgcatgatcaagttagccaagcttgctctgattcagaccgagaccaagactccacagctgaaaaaaatgttgagggatctgcaaaacataatttggacattcgggtgtccagttcggaaattgagtctgtggaaccattgaagccagaatctgatcgatcaaatattttttcatccccaattcgtgttattggagctgtagttaagggagtgggtaaggtagtcgacgtagctgaatcattcgtgaaaaaaattgatgttatggattctgagagtgatgataacgttgatattggtgattataatcaagacatttttaacaagtcgaattctaccgatgcatctgttaatatgaaaagtgcaagtagcaaagagagagacagcgatgaagatgaagctgtcatactcggaggagttaccgcagaagcacataatgacaatggtaataattctcatgtgataaacatcgatcccacgacaaacggtgctaatgaagaggactccgacgtgtttcgacagcaagtaaaggacaaggaaaatttgcataagtcggaagagccgctagttgaatgtttacaatccgagcaacatttcgaaaagaaagaccacagcgagaatgaagaagaatgtgataccatatatggagatataacatcagcaaatattcacagtaatgcccccgatgatattaagagacaacaactcctaaagaatctaagtgacctagagaattattctcagaggctcactgaagattccaggagaggaaaaaatcaagaagaatcagacgaagttaatacaagccgtgaacgggatctcacgtttgaaaagtccgttaatgagaaatatgctggagcaattgaagaagacactttttcggagttagatattagcattcaacaccccgaacatgaagaagacctggacctatcaaacaatcaggagaggtcaatagaagaactaaattcagagccagaagaagctgagttgtacgaattggaaatagagggccctacagagacagcagcttctagtaaaatgaatgatgatgaaaggcaacgcggaaatataccgtccacagatcttccatctgatcctccgtctgataaggaagaagtgacagattcttatccctattcaaattcggaaaatattaccgctgaaaagagtgcgccaacatcaccagaagtgtatgaaatattctcagacacgccaaatgaagtccctatggaaattaatgatgaaattcccgccaccacgcttgagaaacacgataaaaccaatgtaacatccgttttggatgatagatcagaacatttatctagccacgatgttgataatgagccacacgataattccattaacatcaaagtaaatgaaggtgaggagcccgaacatcaagcagtggatatacctgttaaagtagaagttaaagaagaacaggaggaaatgccttcaaaatctgtacttgaagaacagaaaccaagtatggaactaatcaatgataaaagttctccagaaaataataatgatgaggaaacaaaccgcgaaaaggacaaaactaaagcaaaaaagaaaagccgtaaaagaaactacaacagcagaagacggaaaagaaaaatcacagaaggcagttctgccgcatcaaatactaaaaggcgtagggggcacgagccaaaaagccgtggacagaatacgcatccaagtgttgacaaataa

SEQ ID NO: 80932 - DNA, 3207 bp, Saccharomyces pastorianus
atgtcaaaaaaaaaagaaacctttactcaaagggcaaataaacttaatctgacgaccccaagaagaaaactgaaaatactgtcatctctccttgacgcggacgaggattccaaaatgaaagatcaacatgggtactcaagggtccacagtgataaatacagagtagcaaagcctactcagcactcgactttacatgaatctatttcctccaggcgaagcagtcatattcataataaatcccttcatgaagatagtgcgagggcattaagctgggtagattctctaattaatagggggaaaagtatacttactacactagaaaaggaagatgccttgtttgagcgtagtcttgaggaggaaagacaacgttttcagcttcatgactctttaatgaacaagtacacaggaaacagtaaatctcatcagcgactaatcgatctcaggaagagccaatacggaacggatacttctttccaaaataatgatgaaatccccttagatagtttcataagttctcccttaccggacgctgaggacgagtcgtcctcaaatatcgactccgataaggatgaagatctggaaggtaaacaatctttaatcaaagatttcgatcttgaaaatgatgaatacgagctctctgaagaagaaaagaatagtgacggccaaagtagtccttcaataatgatattatcagatgaagaatatgcagaggaaggagcactacaagatgtatcgaatgatgaatatgccgaagaggaggggcaagttgagagaaagaatatagagcaagaacaggcaaatgtagagaatgctacacaaattagttcttctgattccagtgaaggacagaattattcagagggagtagaaatggaattagaagacgacattgatgtggaaagcgatgctgaaaaagatgaaagtcaggatgaagaaggaacagaacattcggtagatttttcaaaatacatgcagcctagaacaaataatactgagacccccgttatcgaaaaatatgaatctgatgagcaccaagcccatcaaggatattcagaagacggtgcatttgatttcggtccagtaaatatttcagttgacgatgagtccgaagatgatgaaagtcaagatgaaagttactcagcaaatgctgaaaatgtgtaccaccataatgaacatgaactggatgataaggaactaatagaaaatatagaatcttcagatagtgaatcccaaagtgcacaagaaagcgaacaaggaagtgaagatgattttgaatataaaatgaaaaacgaaaaaagcacgtcagaagaaactgaaaataccagcgaaagcagagaccaaggtttcgctaaagatgcttatactaagaacaaagtggaacagcaggaaaatgacgaagaacgtgaaaaagatgacattattagaagctctctagacaaaaattttcacggaaacaacaacaaaagtgaatactcggaaaatgttttggagaatgaaactgatcctgctatagtaaaaagagaaaaccaaattaacgatgttgaaagttatgacgtaacaggaaaaagtgtcgaaagtgatttgcacgagcattcccctgatcatttgtatgatctcgctgcaagggctatgcttcaattccaacaaagtagaaattcgaactgccctcaaaaagaggagcagatatccgaatcttatttagggcactcaaatggaaacaacttatcgggcaggtctttagacgaattcgaagagcaaatacccctaaaggacttcacaggtgaaaacaataataatttaaaaacagaccgaggtgatctttcatcttctgttgaaatagaggttgaaaaagtttctgaaaagaaactggacggttctacagaaaaagaactggtaccactatccacagatactgcgattaacaattcatcattaggaaatgaagacagtatctattattcactcgatgacgctgatgctatatcagagaatcttacggatgttcctcttatggaaatcaaaacaactccgaaatatgaagtagtaatttctgaatctgtgtatagttctacttcttacgaagataacgcagttgccatgccaccgcaagtggagtacacttcaccctttatgaatgacccattcaattcgttgaacgatgattacgaaaagaagcatgacctactgaaatcaacgttagcagcccttgctccagctttcaccaaaaaggatgcaaaatttgtggaagctggagtgacgaaatcatgcttgacatctacatctgggcacacaaacatttttcacacaagtaaggaaactaaacaggtgagcgatttggatgaatctacggaaaacgttacttttgaaaatgaaaatacagatgatgaaaataaaaatcaaagtaaaaattttccagccgtggctaacagtactgacaagtcaactgaagataacacggatgaaaagtacttttcagcgattaattataccaacgttacaggagactcttcctgcgaggacataattgaaacggcttcaaatgtagaagaaaatttaagatactgtgaaaaggatatgaacgaagctgagatgtcttctggcgatgaacgcgtaaaacagaatgatgatggcagtaaaactcaaatttcgttttcaacagattcgccagacaattttcaagaaagtaacgacaacactgaattctcttctactaaatataaagtaagagatagtgatcttgaagacgacgaatcactcaagaaggaacttacaaaagctgaagtagttgataagcttgatgaagagaacagtgaggattcatatgaacaagattatgcggatccagaaccaagcaatgatgaaggcagtaatgaaaatatagttaaaggtacaaaaaaggatactcttggaatagtagaaccagaaaatgaaaaatttaataaggtgcacgaagaagaaacactttttgaagccaatgtcagttcatccgtaaatgttcaggacagagacatgcacaccgacgtcatcaatcaagaggcgcaagcgaattacgaagctggtgaaagaaaatactatatccagaatacagatacggaggaagcacacatttccattatcgaaagaatagatgagaatgcgattggaaataatatggagatcctagaaaggtcgtgcgtggaaaaaacgcagaagcgaagtgctctttga

SEQ ID NO: 80933 - DNA, 261 bp, Saccharomyces pastorianus
atggtcatatcattgatttcagcgaaagttgctaggttagtacttgctgccattccaccaacgcaacgaaacatgggcacgcagattcaatcggaaattatctcagattacaataaagtcaagcctcttgtgaaagtaacctacaaggacaagaaagaaatggaagtcgatccatcaaacatgaactttcaggaattagccaatcatttcgaccgtcactcgaaacagctggatctcaaacatatgttggaaatgcattga

SEQ ID NO: 80934 - DNA, 4695 bp, Saccharomyces pastorianus
atggatagtgatactgatgctgctgatgagaaaaaatccaaagttgaagatgcagaatacgaatcgtccgacgacgaagatgaaaaattagataagtctaatgaattacctaatttaagaaggtactttcacattggtcaatggctaagatgctctgtcatcaagaatacctctttagaaccatcaactaagaaatccaaaaagaagagaatagagttaaccatcgaaccttcatccgtcaacacatacgcagatgaagatttggttaaatccacgtctattcaatgcgcggtcaaatccatcgaggatcacggtgctaccttagatgttggtctgccaggctttacagggttcattgctaagaaggattttggcaattttgaaaaattattgccgggggctgttttcttaggtaatatcaccaaaaaatccgacagatcaattgttgtaaatacagacttttcggacaagaaaaacaaaattactcaaatctcctcaattgatgccattatccctggtcaaatcgtcgacttattgtgtgaatcaatcactaaaaatggtattgccggtaaagtttttgggttagtatctggtgttgtcaacgtatcacatttaagaacattttccgaagaagatttaaagcataaatttgctattggttctagtattagatgccgaattattgcttgtttagaaaacaaaagcggtgacaaggtcttgattttgtcaaaccttccacacattttaaaactagaagacgctttgaaatctactgaaggtcttgatgcattccctatcggttacacatttgaatcatgcagcattaaagggcgtgattccgaatatctatacttagcattggatgatgatagattaggtaaagtacattcttcaagagttggtgaaattgaaaattcggaaaatttaagttccagggtccttggttatagccctgttgatgacatttatcaattatccactgatccaaaatacctaaaattaaagtatctaagaacaaatgatattccaatcggagaattattaccaagttgtgaaataacttccgtctctagttcaggtattgaattgaagatatttaacgggcaatttaaggcttctgttccaccattacacatttcagataccaggctagtttatccagaaaggaagttcaagataggttctaaggttaaaggtagagttatatcagttaattcaagaggtaatgtgcatgtcactttgaaaaaatcattagttaatattgaagacaacgaattaccactggtttccacttatgaaaacgccaaaaatatcaaagaaaaaaatgaaaagactttagcaactgttcaagttttcaaaccaaatggttgcatcatttccttttttggtggtttatcgggatttttacctaattctgagatctcagaagtctttgtgaagagaccagaagaacatttaagactcggtcaaacagtaatagtaaaacttcttgacgtcgatgctgacaggaggagaattattgccacatgcaaagtttcaaatgaacaggctgcccaacaaaaagataccattgaaaatattgttccaggcagaacaatcattactgtcgatgttatcgaaaaaaccaaagattctgttattgttgaaattcctgatgttggcttgcgtggtgtcatctacgttggtcatctctctgattccagaattgaacaaaatagggctcagttgaaaaagctcagaatcggcactgaactgactggtttggtaattgataaagatacaagaactcgcgttttcaatatgtccctcaaaagttctctgattaaagacgctaaaaaggagactcttccattaacatatgatgatgttaaggatctaaataaagatgtaccaatgcacgcttacattaaatccatttctgataagggtctctttgttgcgtttaacggtaagttcattgggttggttttaccaagttacgctgttgatagtagggatattgatatcagcaaggcgttttatattaaccaatccgttaccgtctatttattaagaacagacgacaaaaaccagaaattcctattatctctaaaagctccaaaggtcaaagaagagaagaagaaagttgaatctaatatcgaagatcctgttgattcgtctatcaaaagctgggacgatttgtctattggtagtattgttaaagcaaaaatcaagagcgtcaagaaaaatcaattgaatgttattttagcggcaaatttgcatggcagagtggacattgctgaagtgtttgacacgtatgaagaaattacagataagaaacagccgttgagtaattacaaaaaagacgatgtcatcaaggtaaaaatcataggtaatcacgatgtcaagagccataagttcttgccgattacacacaaaatctcaaaggctagcgttttggaattatccatgaaaccatcagaattaaaatctaaggaagtgcacacaaaaagtcttgaggaaatcaacattgggcaagagttaactggctttgtcaacaattcatcaggtaaccacctatggctaacaatttctccagttttgaaggcgagaatttctctactagatttagctgataacgattcaaatttttcagaaaatattgaatctgttttcccattaggttcagccctccaagtgaaagttgcctctattgaccgcgagcatggctttgtcaatgccattggaaagagtcatgttgacataaatatgtccacaattaaagttggtgatgaattgccaggtcgtgttctaaaaatagctgaaaagtatgttttgttagaccttggtaacaaagtgactggtatttcctttattacggatgcgctaaatgatttctccctaacattgaaggaagcttttgaagacaaaattaacgacgtcattccaactaccgttttatctgttgatgaacagaataagaaaattgaactatcccttcgttctgctactgcaaaaactcgttcgatcaaatctcatgaagatttgaagcaaggcgagattgtagatggtattgttaagaatgtgaatgacaaaggtatttttgtttacttgagtaggaaagttgaagcctttgtccctgttagtaaactatctgattcttacttgaaggaatggaagaagttttacaagcctatgcaatacgttttgggaaaagtcgttacatgcgatgaagattctcgtatttctctaaccctaagagaatccgaaataaatggtgatttaaaggttctaaagacctattcagacattaaggctggtgatgttttcgagggtacaattaaaaacgtcactgattttggtgttttcgtcaaactagataacactgttaatgttactggtttggcacatattactgaaattgcggacaaaaaacctgaagatctttctgctttgtttggtgttggggacagagtaaaagctattgttttgaaaacaaatccagaaaaaaaacaaatttcattgagcttgaaagcgtctcacttctctaaagaagccgaattggcttctactaccaccaccactactactacggatcaactggaaaaggaggatgaagatgaagttatggcagatgctggcttcaacgattccgacagcgaatctgatatcggagaccaaaacactgaagttgccgataggaagcctgaaacatcttcggatgggctatccttgagtgctggttttgattggactgcttccattttggatcaagcgcaagaagaagaagagtctgaccaagatcaagaagactttactgaaaataagaaacacaagcacaagagaagaaaggaaaatgttgttcaggataagaccattgatatcaacactagggcaccagaatctgttgccgattttgaacgtctacttatcggtaatccaaattcgtccgtagtgtggatgaactatatggctttccaactacaactgagtgaaatcgagaaggctcgagagctcgcagaacgtgcgctaaagaccatcaacttcagagaagaagccgagaagttgaatatttggattgcaatgctgaatttagaaaatacttttggtaccgaagaaactttagaagaagtgtttagcagggcttgtcagtatatggactcatatactattcatacaaaactgcttggtatttatgaaataagtgaaaagttcgacaaagcagcagaattgttcaaagctacagctaagaaatttggcggcgagaaagtttctatctgggtatcgtggggtgattttttgatcagccacaatgaagagcaagaggcacgtactattttaggtaatgctttgaaggccctaccaaagcgtaatcatatcgaggttgtccgcaagtttgctcaattagaatttgcaaagggtgacccagaaaggggtcggtcattattcgaaggtttggttgctgatgcgccaaagagaattgacctgtggaacgtttacgtagatcaggaagtgaaggcaaaagataagaagaaggtggaagatttatttgagagaataataaccaaaaaaataacaaggaagcaggctaagtttttctttaataaatggttacaatttgaggaatctgaaggtgacgaaaagaccattgaatacgttaaagctaaagctactgagtatgtcgctagccatgaatctcaaaaagcagacgaataa

SEQ ID NO: 80935 - DNA, 441 bp, Saccharomyces pastorianus
atggtagcttccaccaaaagaaagagagatgaagattttccactttcgagggaagactccacaaagcagccctctacctcatcattagtaaggaacactgaggaagtctcttttccaaggggtggtgcgtctgctttgactcctttagaactgaaacaagttgctaacgaagctgcaagtgatgtgttatttggtaatgaaagtgtcaaagcatctgaaccagcaagtagacccttgaaaaagaagaagacaacaaagagatccacttctaaagattccgaggcctcatcagcaaactctgatgaagctagagctggactaattgaacatgtcaactttaaaacgttgaagaatggctcttctttgcttggtcagatttctgatatcaataaacaagaatttatgtataacattcacagacggactttctggttcatgtga

SEQ ID NO: 80936 - DNA, 1203 bp, Saccharomyces pastorianus
atgaactcaaatggtacatcagacgcaatgagcgagtcttcagaggcatcccacgaacatgaagagcctacttatcatccgccgaagccatccattgttttcagttcattcgttacaaaaccttttgaatttgttgttttcttagaagcctgtttggcatgttaccagcagtatgagggttttgacgaagataggcaagtaattttgactactttatatgacttatatttgaatttggcgcaaaatgatgtacccgagcgtatagacgactggcgttcaagagcaactggcgtattgcgtgagagcaataaattggtgtattctgccgcaagtaataatactagcaaaagggtggataactcaataatgctgttaatttcccatatggatcaaagtagtgcttcagcaaaagataagacgaaaatttacatagcttcatttgccaatgataaccccgagatggatttgctgagtacatttagggctatgacgttaaatgaagaaccaagtacttgtctcaaattcctagaaaaatatggcacagaggaacccaagctcttacaagtagcattgagttactttgtttctaataaactaatcttcaaggagatgggcggtaatgaagtactgaaagaaaaagtattgaggccaattatagaggaggaaagaatgccactgttggatataattaaagcgctatcccgtacaaatgtagcccactttgggctgatacaagacatcattattgatcatgtcaaaaccgaagatatagaaatcaaaaggaacgaaaaactaattgaatcttacgataaagagttaaaggagaaaaacaagaagttgaagaacaccattaattcagatcaacctctccacgtacccctgaagaatcaaacgtgtttcatgtgtagactgacattggatattcctgtagttttttttaaatgtggtcacatttaccaccaacattgtctaaatgaggaagaagatactctagaaagcgagagaaagctctttaaatgtcccaaatgcttggtggacttagaaacctccaacaaactttttgaagctcaacacgaagtagttgaaaagaatgatcttttgaattttgcattaaacagtgaagaaggtagtagagaccgtttcaaagttataacagagtttttaggtagaggtgccatcagttattctgacatcactatttaa

SEQ ID NO: 80937 - DNA, 1647 bp, Saccharomyces pastorianus
atgaatttcaatcattttcctcatgattttcaaatcactttcttgaaagccatcaacggggaatttctcgtagcgttagctgaatccattggcaaaccttccctaataagagtatataaactagaaaaactgccaaatagagaacaactataccattcacaagtcgaactgaaaaacggtaataatacataccctatttcagttgtctccatatcaaatgacctttcctgtattatggttggattcattaatgggaaaatcatccttattagaggtgacatttcaagagatagaggatctcaacaaaggattatatatgaagatccaagtaaagagccaataacagctttattcctcaataacgacgcaacggcttgttttgcggctacaacttcaagaatccttttatttaatacgactggtagaaatagagggcgcccaagtttggttttaaattcaaaaaatggcctggatctaaattgtggatcttttaatccggcaacaaacgaatttatatgttgcttaagcaactttatcgaatttttcagctctagtggaaaaaagcatcaattcgcatttgatctatcgctgagaaagaggatattttgtgtagataaagatcacattttgattgtgactgaggaaacaggtgcaccaactacatccataagtgttaatgaactgtcgcccacaataattaaccgaatattcatcattgatgctaaaaataaaatcatttctttgaattttgttgtttctagtgcaattattgatattttttcaacctctcagagcggtaaaaacatcacttatctgctaacttctgaaggagtaatgcataggataactccaaaatctttagaaaatcaaattaacatcatcatccaaaaggaactgtacccttttgctttacaattagcgaaacagcattcattatcaccgctagatgttcaggaaattcataaaaaatatggtgattatctctttaaaaagggactcaggaaggaagcaacagaccagtacatacaatgtctggacgttgtggaaactagtgaaatcatttcaaaatttggtgtcaaggaggttcctgacccagagagtatgaggaacttggctgactatctgtggtctttgatcaagaattctatttctcaacgcgatcatgttacccttttgttaattgttttaatcaaattgaaggatgttgaaggaattgatacttttatccagcatttcgatagaaaaggcatttggaatgaaggtgttgtgatggacgatatggatgatgtgacgtttttttattcagataacgatttttttgatttagatttaatcttagagcttatgaaagagtcagattttaagcgtctctcatacagacttgcaaagaagtattcaaaggattcattaattattgtggatattttattgaatctattgcataaccctgtaaaagccataaaatacataaaaagtttaccaattgatgaaaccctaagatgccttgtggcgtactcgaaaaaattactggaggagtcaccgaatgaaactaatgctttactgatagaagtatttacagggaagttcaaaccatccacttttgaagtggatctgggaccggagagatacgacgggcgatttttctga

SEQ ID NO: 80938 - DNA, 222 bp, Saccharomyces pastorianus
atgtccctgagctcctggaggcaattccagcttttcgagaatattcccataaaagatcctaattttggaggagattccctattgtactcggacccaacactttgcgcagctacaatagtagatcctcaaactctgatcatagctgtaaattcaaatattataaaagttgtcaaattaaatcaatcgcaagtaatacatgaatttcaatcattttcctcatga

SEQ ID NO: 80939 - DNA, 321 bp, Saccharomyces pastorianus
atggctcaagaaaccattgaagtatccttcttaccggctatggaaaagggaaacttacctgaattggaaaagctagaaataaatggtaacagattagatgaagattctgatgctttagatttgcttcaaagcaaatttgatgatttagaggttgacgattttgaagaggtcgatagtgaagatgaggaaggcgaggacgaggaagacgaggacgaggatgaaaaactcgaagaaattgaaacggaaaggcttgaaaaggaactgctagaagtacaagtagatgatcttgctgaacgtttagctgaaactgaaatcaaatag

SEQ ID NO: 80940 - DNA, 546 bp, Saccharomyces pastorianus
atggctaccttgcacttcgttcctcagcacgaggaagaacaagtttactccatctctgggaaggcactcaagttaacaaccagtgacgatatcaaaccatacctggaagaattggcagctttgaaaacctgtaccaaattagacctttcagggaatacaatcggtactgaagcttcggaagcattagctaaatgcatcgctgaaaatacacaggtcagggaatctttggttgaagtaaattttgctgacttatacacttcgaggttggttgacgaagtcgttgattcgttgaagtttttattgcctgttctgttgaaatgtcctcacttggagattgtgaacctttctgataatgcgtttgggctaagaacaatcgagttactagaagattacattgcacatgccgtgaatatcaaacatttgatcttaagtaacaatggtatgggcccttttgctggtgtaaggattggtaaggccctatttcatctcgctcaaaataagaaagctgcttccaaaccattcttggaaacttttaatctgtggtag

SEQ ID NO: 80941 - DNA, 624 bp, Saccharomyces pastorianus
atgaagcagaagttcgcggtaatgatatatccaaagatgagatcaaagaggctatgcgaaagatggttggataatcttttcatgttactatacgaagatttgaaaacttacaccgattggcaatcagagcaattgtattttgatgctcaaaacagtaaatatcacaaattaactgttgaatgggaattattcggcctttgtgcgaaaagactgggacatcttccagaagctgcgaaggctttccaaattgggctttcccaaagattttctccagtatgcgcaaagaatctattacagttttacattgacgagcataagcgtattaggagggattcagtctcagcaaactccgagttaacctcttctcaaatattgtcaagtatcaatgacatcgacagctcaatcatcgatctagtagtcaagatttgttgctggaatcatcgttggtacatcgagttctcaataatattaatagatgctctgagtgttgcagtacaagatatgggcattactaaagtacataatgaaattgcctctagattttctgacccagtagcccaattgattgacgataacattctaaattttctgaagaatttcacgaatgacactttcgataattag

SEQ ID NO: 80942 - DNA, 1626 bp, Saccharomyces pastorianus
atgttgtctcaaacctccataccggaagtgaaagaagacgtgataggctatgcgctacaccagaggagagccagagtgggacaattccaagacttgggtccgcctgatttaattactttgatcaaatcgttaccttcatcctcgagcacaacaactgctactgcctccgccaacgataatggagcaacttcaaacatcaatggacaagatcctacgaccatagttacggagttacattcccatgacaaattaaaggggcagatcggcactttcttttactgtatgggtatcgatacttcggatccaacttctattacaatctttgccaaaaagataaccgatcttttcttagacacgccccaaatttggtttggtaagaagaagcactttcacgtatccaagatttctatcagttcttggaattcgtttaggaaatatgatgttaacattatagttcacattccaggaactgtgcaaacctatattataaatagcgacggtgaacaatcgcaacttccctctgtggcagaagcgtcatctggccgcaactcacaggatttaaacgtcaacatgatttgggcggaaacgtttatgagtggtattgtacgtgacattatgattatgaaagatagtcgtgcggatggagaatcccagaatttggtagaaacactaattttcaatccattaacctcgggtgagttggaagatgttgccaataacttcattaaactgttccccttggtctatgaaaaaggtgtttatttagatgcacctactcacgttttaaatccctcgttaaccaataattatttagtggaaactttagtggaaatagttaggttaactaagagtttggaagcatgtcgtaaaatgctcaagaagttaatagaaattcatccagaagcagtaataatattaattcgtgtttattttgcgtgcgatttagagatagatgcagttgacctgatcaacgagcaactaaattccccctcttcgttcttagccgacgattcaaagactagccatatccagctaatcttcaaatccgaattattaagtattcaaagtgaattcttactggatgtcaagagagattacaagcttgccaaggaagtagccatggaggctgttaattgtgcaccaaacgaatttaaaacttggtatttattgactagaatatacatcaaattaaacgatatgccaaatgccttgctatcgttaaacgcttgccccatgtcacaggttaaggagaaatatgttcttagaagaattgcgcctattacttcagatgaaaatcttcatctgccattaccattggatgcctcaattgaggagatttcgtcattgaaccgcatggatgtccagttggagcaaaagtccgcagatccaaacctagtcaatctctctgcgtcaagtttaaagtctactttccaactagcctataaattattgacagaaattgtccaaataacaggatgggagcagcttttgaaatatagatcaaaaattttcgttatggaagacgagtaccaaggctccacttcttccattgatgaagcagaagttcgcggtaatgatatatccaaagatgagatcaaagaggctatgcgaaagatggttggataa

SEQ ID NO: 80943 - DNA, 240 bp, Saccharomyces pastorianus
atggataccgttttggattcgttggagttgtttactaaaaatgtgcacttacaattttctggtttcgaggaatgtgccatatgttactctatactacatgccgtggataggaaactaccttcgaagacatgtccgacttgtaaaaataagttccacggagcatgtctttacaagtggtttcgatcatcgggtaacaatacatgtccattatgccgtagtgaaattccatttagaaggtag

SEQ ID NO: 80944 - DNA, 1002 bp, Saccharomyces pastorianus
atgtcgtttggtggaatcaatacatttcaacagtataacacagatttagggctcggccataatggtgttagaatatccttaaactactttgatggtttgccggatccaagtcttttaaactccttgtactcgaacgagctgaaactcattttcaaatctcttctgaaaagagatgaaactacaaaagaaaaagctttaatggatctttccaatttgatcagcgactttaaccagaatgagtactttttcaatgacatttttcttctttgttggtcgcagatatatgctaaactgataattagtgattacaaggtcatcagactgcaatcacatcaaattactataatgcttgtcaaaagccttcggaagaaaatatcgaagtttttaaaggattttatacctttgatacttctcggtacatgcgaactcgattatagtgtttccaaaccttctcttaatgaattaacagagtgtttcaacaaagacccagcaaaaattaacgccttatgggctgtttttcaagaacaactattgaatttagtaaaggagattgttgtaaacgagaatgaagataccatttctgatgaacgttactccagtaaagaagaatctgagtttagctaccacagagttatagcaagtgccgtattgctgctgattaagctttttgttcataacaaagacgtctcagaacgtaattcttccagtcttaaggtgattctttctgatgagtcaatctggaaactacttaacttaaaaaatgggcaaaatacaaatgcctacgaaacagttcttcgattgattgatgttctttatacaagaggttacatgccttcccacaaaaatataatgaagttagcggtgaaaaaactattgaaatcgttgactcatattacgtcaaagaatattctaaaagtatgccctgttctcccatcaatactgaaccttttagctaccttggatgactatgaagatgggacaatatggtcagggatactctag

SEQ ID NO: 80945 - DNA, 933 bp, Saccharomyces pastorianus
atggtggaaagtgagatttttaactctctgtcttgcgggaaatcttattctgagtacacaaaactgaaccagactcttagtggcgtctttccacccgctaaatgggagagagagattgaagattacttcacttcagacgaagacataagaaaaataaaggtgagctttgagaagaatctttttgctttattggttacttctcctaataacgaatccgcaattagtcgtttattcgatttttttgtgcaattaatcgaaacagatccctcaaatgttttcaacaaatacgacggtgtatatgatgctctcaattactttttagattcagatatgattttcttgaatgggaagatagggaaatttataaacgaaattccaacgttggtccaagaatcaacatatcaaaactttgctggtatcatggcacagtactcaaactccaaatttttcaaaatgaatactgacgcgattacttcgttggaagacttttttatcgttgcgctttcttttaacttaccaaagacaataattttagccacaatgaatgagttggacaatgatatttatcaacaattaatgaaatcagattccctagaattagaattgtacattgaagactttatgaaaaattataagtttgacgacagtggggaaatatttaaaggtaataataaatttttaaatcaaaggactataaccacactttaccgaagcgcagttgccaatggccaagttgaacaattttgtgctgttttgtctaaattagatgaaacttttttttcaacgttattgctgaataccgattttctttcttgtgcattgtatgaagtttcagaagacactaatgagaaactattcaagttgtcattacagttggctaaagggaattctgaaatcgactctaagttggcccaagtgatcttgcaacatgct

SEQ ID NO: 80946 - DNA, 2145 bp, Saccharomyces pastorianus
atgccagcaattgattataggtcatccttggtgaacagcttaagtactaacacgcatttgctccttacagatgataagcctatcaatttaaaaaatatgcaaaagctcatcaggtatgctctattcttagatgccctacttgatgctcttccagagcgcgttaataaccatattgttgcatttataactgtagtttctgagctcgtcactgattataattgcctttcagaggaaccaaatgatctttactatgattttgggcatacctttttcaaacatggcaaagtaaatttgaacttttctgatattgttggaaacgttattcagcctgctaatggtggtgatgctatgcttacttttgatattgctgaaagtaattctgtctactttttttattattcaagagtattatataaggttctattgaacagcattgatactgtttcatccaccacattaaatggactattagcatcggttgaaagttttgtcacgaaaactgtgagggatcaaaaatctactgataaagattatctcctatgtgctatattactattgatgtttaacaggtccaactcaaaagatgagatgacgaaattaaggacattgctggcatctcaattgattgggattagagaagtagaacttgtcgatcaagaattcaagtcgttagctcttttaaataatctgctggatatcccacaggcagataaacagtttgttcctatagcaccgcagagactgaacatgatattccgttcaatactaaaatggttggatagtgatcttgcctacgagcctagctttagcaccgttagattgttactactagattttttcaccaaactgatgaggtttgaaggagtcagagatatgggcataacagcttttgaactttcggaaaggttgctggcagactctctatcgatgtgtcaaattgatgacactttatatttgttagaacttcgctcttcctgtttgaacttatatgaaacattgtcgcaaggcgtttccaaaaatggcgaggaaatctcagaatatggtgatgaaattcaagaaaatttgattgaactgatgtttctcaactttaatcaagaaagaaataaccaagtatccacactcttctaccagaaattgtacaaggtcatttcctcaatggaactcaaaaagttagaatctcaatacaaaagaatattcgaggttgtattgaatgataaggatatcggtagtaatattaatcaatcaagattattaactactttgttgggttctttggtggtaaaaacacagcaggatattataattgagtatgaactgaggattcaaaaacaaactggctcagacgtagatggtagtgcatctgataatgatgtaaactcaaaatttaaactacctcaaaaattattacaaaaagttactgatgaggtgccaaaagaataccttgaatacgagaataaaaattcatttattaaatatctatggtattggcacttgatactgatgtacttcaaagatacgtcttataatatgagacaaatatttattgaacaattaaaggaagctggtttaatcaatagaatgtttgatttcataacagatcaaatagatttaagagatactgagttttggaaacaggtcgacaccaaggaaatttcggaatacaacattgtcggcaataatttctctccttataaagaagacatatttgaagaatgtaaaaaacttttgggccatacactttatcagttgtttaacaacgtcggttgtctaacgagtatttggtggttaaatataaaagataggacattacaaaatgatattgaaaagtttgtctcagagttcatctccccaattttgatcaaaaatgaatttgacgatatcaattctaagatggaccgcctgacttctaatgatgatgctttgactattaaattaaataatattactaatgaagtgaaggcaagctatctgattgacgaccaaaagttggagatttccttcaaactaccaaaaaactaccctttaacaaatatccaagttaatggcgtctctagagttggtataagtgaacaaaaatggaaacaatggataatgtctacacaacatgtaattacaggcatgaatggatccgatttggatacgtag

SEQ ID NO: 80947 - DNA, 1194 bp, Saccharomyces pastorianus
atggttatagaacatcgcagcgcctttaaatatattgtcttttatttcaatcttattccatttctctcttgcaaccacggcaaagctggagctatgtctgaaaaatcagctagcaataacaaagctgaattcaaaaggcagtcatcgccattcagagaaatcatctctgcggatcacccaatttataaacctgctaagggaaggtactggctgtatgtggcgctaccatgcccgtgggcacaaagaaccttgatcaccagggccctgaaagggctagcgcctataattgggtgcagtgtagcgcattggcacctggatgacaaaggctggcgattccttgaagaaggagatgggaaaaccaatgaaaggcactggtttgacattgcaggcggaattagctcagtaaatttaaataccagtactcccgtggctaacatacccaataatgcgcatcggttgttggttgacggaacagatgaaccgcattacgggtacaagagactaagcgacttctatttcaaaacaaagccagactataagggaagattcaccgtacctgttctttgcgacttggaaacgtgcactatagtaaataatgaaagcagtgatattatcagaattatgaattccgctgcgtttgatgagtttgtcggcgaagaataccgtcaagtccgtctggtacctcggtctctagaggcacagattacagagttcaactcttgggtgtacgataaaatcaacaacggtgtatacaaggccggttttgcagaatgtgcagaggtatacgagagggaggtaacaagcctttttcagtatcttgacaaattggaaaatcttctggacaagaagtacacagatttggaggcgaagtatggtaagaacaacaaggacaagatactagatcgctactttgccatcggagacactctgaccgaggcggacgtgagactctacccaacgatagtaaggttcgacgtggtataccatcaacacttcaaatgcaatctggccaccatcagagatgattattcccgtatacacacgtggctcaagaatatatactggcgccacgaagccttccagcgcacaacggactttacccacataaaactcggatatactcgctcgcagccacgggtcaacccgattgggatcaccccactggggcccaagcctgatatccgacctctatga

SEQ ID NO: 80948 - DNA, 1728 bp, Saccharomyces pastorianus
atgctgtttacctccttgcaaaatagaatttttggaaaagtgggcagaagcgttagtgcaaaattattctttaccaaatattctggcttgaggcaactgcttttgaatattctaaacagttctattgctcaatattcgggaagtgaaagaaaatcatatcaaattgaaagcattttcttggtccttaatgtgctactgaggttacggcctacagctggctatactggtctaaaagaattcaacgtttctgtttatgaatgtttatcaaatgagaactggaagatcagagatatggcctctagagtattgcatatgctgtcggaaaattttgaagaagagataagaaaattacttgacttggcttctatcgcgaagcaaaaccagttacatggacacttactagcactccaacaactagtaccacaatacctttcaggaactagagatatggagttgattcaaaggatacttgaaaagaaaaggatgcttctactagagaacaagtgctttatcactaaaaaggcctacttaaaattgacctgctgtatattggaaacatgcgacatacctgattctattttaaaagattatatcagcactttgcggaacacatttattgctgaaaataacgaatatgttgtggatggtagcaaacagctatatcttgcacaaatcttagacatgctcttaaaatatgaggatagtatatatctcgatgatatttgcttattaggattgtattctccattttatgaggttcagctcagtacactacagtacatgaatactaactttcactgggaaactacaagaaactcagaatttcttgaacaactacaattattactcagggttccagatttgctgcctatggctaaagctttagtagtgaaaattctctcaagaaaaaagaatactttatccctgacgacctgcactgatctcctaaaaacaaataatagtgaagatacaaaacttgctgccgtttcatcactaagtgctaaattgtcttcgcaaacctttcaccaggtatggaacttgttacaaggatttttcgccgattcttgttcaaaagattttagattggcatctttagaatgtttaactgcttatccagaaagttgtaagaactccagaatactattacaactgtacaacttcttatgggacgatgattctgaaataagagaaaaggcttctttttatttgaataagaactttattcaaactgcagactgggaatataacaggaacaccagtgtgaccgctcttatattcacaaaaaagtttgttgacgtattcacaagttctgaggtggtagaagagttgtgtttacagttgtttcaatatctaaatgaatatgatatgtttgctgccgaagaatcggcgaagaattgtctatttactatagaaaaggataaccagttcatcaacgaactacaaaaggcaatgcatatattaaatatgataaaattgactggaagggatatctcaaagtgttacaaagaccagatacatcacctaaaaagtgctctattggagcacttcaacaccgaggattttaaagattccccactcggctggtgctctaatgctgaaatattttcaagaataacgcttttaaaggaactgattcaacattattctccttctgattatgagaattttatcaatgttctgactaaacattctgttcatcccctaattatcagttattcccaattataa

SEQ ID NO: 80949 - DNA, 2283 bp, Saccharomyces pastorianus
atgactacggatgtgcaattttcaagtcaggaaatcgagcttttccgtgtcaaagaattcttgattgctaataatccagcaaagatcaacaatgaaaataaggatgctgttttaactcagattgagcatgatttcaggtatttaatacagtatatcaaggacggattaccgaacttaaatgagtccacaaggttaatttttccagataccttttcgatctgtttactgaggagccatcaaataattgcaagcaaaaaaattgactctcaagaatttttatcggcggtaaaagagcaactcttaactgaagcgaatgcaaatattatctttgaatatgttcttgacttttgggctgatggtggagccccactgatgaatgccttgagagatttattcagtaaactactgaacttattgaaaatcacatatcctatgtcaaccttgaaggatgttttatttaattggatgaatgaaatattagaagtaccatctacgttgcgtgttcagtattacttgattgatgccctttcttctgattttgacctttattatattatagaaaaaaagcctcatttcatcgataactctttttcattaatgaactctgatttgctagcaaattcggtaggtaaatgcattgttagtttgctgttaaacatttacgaaaagcatttcaaaaagaacgagtcttttgtacaagaatggatacaattatggaaaagttgtgctttaaagtacattcacgacaaacaatacaccaaatccattaatctgtatattatgattccattattcaaaaatatgccaaactcggccttcacacttttcctagaatgtatgtctaacaaagacccatcacttttgctctcacttttaaagattggccaagaattggggattgaagaagaaccattttgtgataataaatataccactgtagattctgttaacaaactcatagagcaaaatgagtataaacttcaggtatttgaaatactgaccttttcgacaaaaaagtcaaagcctattcgtcccttcgtcttcaaaactataaaacagtacctatatgtgttcttcgtggacactgaacttgaacgcagaaattacttttgcagttcgatgaaacactttatatttagaaccagagactgcgcatactctttagctagggatgccagaaagcttaaaaaggctgagaaatttccggacgaacagagggaaaagttggcgcaagttgaggaggctagagcctttttggtttggctatgcaattttataaaatataatttggcccctggtactttatatcaggcgaacgtgacctcattaaaacttatgcacattctgatcaagtctggtgttgataaatctactccacaaaaatttttagacaaccaaaataagagggaatatcctttttctatcccaattttacaggatgtcacatttttaaggttgctcattgaccttttggttagtaattatgctgacgtgcgcgaattatctaaagaaatgctatttataatgataagcgctgatgaatctagaggtctttttttggataccttagacgcaaatgctttgaagtggactgcaacctctcttttaagtgactatgagaaaggtgatgctggagctaccgtatatgagttcatattcacagtcatgggctctcaaagaagcttcattgaccagacaattgatatattagcgcagatggtacaaaatttgcaaaatgacagcattggttgtgcagaaaattcaatcggtcctcactttgctgcactaagcttgattttgaataagtttaactctgaagaaaaccatcaagatacttcaaaaataatctcaaaattaataaatcttgtactcaagagctgggaagcaacgagaaatgtagtatgtcatgattctgcccatggaatactacctgaaaaatatgctaattgtggtgtaccggaccaagttataataagtcacgcatttagggcgataaaagaagcatcatatttacttgaaacaatattaaaaaaataccctttaacaagagatcaattagacagtatcggcgatctttttattgttcagctttctactattcgtcatagtggcgccttccaagccgttttaccggggctaaaggcattttgtattcgttgtcaacttgaatttcccgctattctggaagaacttttaagcaagagtgtaaaatctttaaatccaaaactcaacatattacaagaaggtcaggaggcttgcctttcttggtcacaaccgtcttaa

SEQ ID NO: 80950 - DNA, 657 bp, Saccharomyces pastorianus
atggtgatggacatggtacgaaagaacaatagccaagctctcagcacttcacaaaagtttgatttaagacggactccaagacaaattggttatatcctttgcacggcatctcatcgtctattatcaatagaggtcatcaagtacttaaagcggcgtaaggggagaagaacgttcagacccaagctgtatgaacatcccttgtatataccgtgcgcagaacccggtaaagatatccctgcacttgaaatcgctaaggtatggtcaaacaatgacactcgcacgtttgattctgagaagaaagtacagcatatttcacaaattttttatctggaacagcctgggaagtgcatcgtacacttccaagtcacagaccttgccgtcatcgcgtcggcccaccacaacagaagaaagccattggaggtttatttcaaagccacacccgaaccaaacagatacactttcactctctttccagaatatatagtcactggtcatttttacaaaagagaccgaattgaagatttagaagtggtaacagagcgtctaataaactgcaaggaagatattcactgggttccgttagacaatacaataccaataaaggcatttttcgggcaatttgccaagttggcagcaataccgtgttccaatgcttaa

SEQ ID NO: 80951 - DNA, 549 bp, Saccharomyces pastorianus
atggaagaatttgaagaatttcgaaggaaaggggagatgtccagcagatgtggcaatcaccgtgtgctcagaaaatggaatagttgcgcttgcgagttggccgtgccctttgaggttcctgagcatgcgattacgaaattgcacatatacgacttcgacaatacattatttgcaacgccgggtcctacagagcaattgtatacacgtgagctactaaatttgttgacatcgagcacgctaccgaatggaggctggtggaatgagccggggtttctgcaggctgctattgagatctcgaagactaaaccgagaaggtattcgtggaatgcggatatcgttaaattggcggaggagtcatattctgccaaggatactatctcgatcgttttaacgggcagagaggaaagtaagttccataagttgattgagcatgctttacagacggcaaggagccattggaaatgctcagaaaatgagtttaggttccatgcagtttgcctaaaaaaaagagcaatttctgagtaccctagcaaatataaaaagagttga

SEQ ID NO: 80952 - DNA, 690 bp, Saccharomyces pastorianus
atgcagattctgcgtagtgatttcaagaaagatttttacgttgaccaaatccatagaccaagacattacggtaaggggtctgccccgctatttggtaatttcttggaaccattaactaaaacagcttggtgggttgttccagttgcttggttgcctgtagttgtgtaccacatgggtgttgctttgaagaatatgaaccagctatttgcatgtttcttgttctgtgtcggtgtctttgtttggactttgattgaatacggtcttcaccgtttcctatttcatttcgatgattggttacctgaaagtaacatcgcattcgccacacattttctactacatggttgccatcattacttgcccatggacaagtaccgtttagttatgccacctactctgttcgtcatcctttgtgctccattttacaagttggtatttgctctgctgccactttattgggcttacgctggttttgctggcggtcttttcggttatgtctgttatgacgaatgtcatttcttcttgcaccactctaaattgcctcccttcatgcgtaagttgaaaaaatatcacctggaacatcattataaaaactaccaactgggatttggcgttacatcctggttttgggacgaagtttttggcacctacttaggccccgatgccccattgtccaaaatgaaatatgaataa

SEQ ID NO: 80953 - DNA, 255 bp, Saccharomyces pastorianus
atgtcgactaatacttccaagactttggaactgttttcaaaaaagacggtacaagaacacaatactgccaatgactgctgggtcacttatcaaaacagaaagatttatgacgtgaccaggtttttgagcgaacaccctggtggtgacgagtccatcttggactatgctggtaaggacattactgagatcatgaaagactcagatgtgcatgaacaagcgactccgcgtatgaaatccttgaggacgaatatttga

SEQ ID NO: 80954 - DNA, 330 bp, Saccharomyces pastorianus
atgacaactgtttccattctgctgacaacatgcttccaaattttatacacaacactttttggagggttaaccaagtttgtattcgtaagaacaggcgggaacctatggtgctgcataatcctgcatgccctttgcaatatcatggggtttcctggtccttcaagattgaatttacatttcacagtagtagacaagaaagctggacgcatttccaaattggtctcaatctggaataagtgctacttcgcactgctggtccttggattaatatccctgaaggataccttacaaactctggtaggaactcctggttatagaataaccctttag

SEQ ID NO: 80955 - DNA, 495 bp, Saccharomyces pastorianus
atgctacaattctcaacatttctagtgctcctatacatctccatatcctatgtgctaccgctatatgcaacttcacaaccagaagggtctaaacgagataatcctcgaacgattaaatctcgcatgcaaaaacttacaattatgctaatttccaacctttttttggtgccttttttacaatctcaattatctagtaccacttcacatataagtttcaaggacgcatttttaggcttaggtattatcccaggttattacgctgcattgccaaacccttggcaattcagccagttcgtgaaagacttaacgaaatgtgttgcgatgttattgaccttatattgtggacccgttttagattttgtattatatcatttattaaatccaaagagctctatacttgaagatttgtaccatgaattcctgaatatttggagtttcaggaattttatatttgcaccaataactgaggaatattttacacgtcaatgcttttga

SEQ ID NO: 80956 - DNA, 138 bp, Saccharomyces pastorianus
atgcttttgactacgtacttaaacctaataccgcattcgcaactaagctatcaacagttattttggctaccatccgcttttttttggactttgcgcacgcacaccatgcttatgagcaattacaggaaggctccatga

SEQ ID NO: 80957 - DNA, 1026 bp, Saccharomyces pastorianus
atgtcctcttcctcaaatgcgggaaagaataatcatgatttaacgggaaataaagaaaggacagggctaatactagtaaaggcgaaaattccaaaacagggcctaccatattgggctccctcattattgagaaagaccaatgtttttgaatctaagagtaaacacgaccaagaaaattgggtgagattgtctgagttgattccggaagacgtaaaaaaaccattggaaaaacttgatttacaattgacttgcatagaatccgataatagcttacctcatgatccgccagaaattcaatcgattaccacagaactgatatgtataactgctaaatctgataattctatcccaataaaactcaattctgaactgttgatgaacaaagagaagctgacaagcatcaaagctttgtacgatgatttccattcaaaaatttgtgaatatgaaaccaagttcaacaagaattttcttgaattaaatgagttatataatatgaataggggagaccgtaggccaaaggaactgaaatttacagattttattacttcacagctgtttaacgatatcgaaagcatttgcaacttgaaagttagtgttcacaacttatccaacatttttaaaaaacaggtcagtaccctaaaacaacactcaaagcacgcattatctgaggattcaatatcgcacacaggtaacggtagttcatcgtcgcccagttcagcgtcattaacgccagtaacttcttcatccaagagtagtttatttttacctagcggtagctcgtctacttccctgaaatttacagaccagattgttcataaatgggttaggattgctcctttacagtacaaacgagacattaatgtgaacttggaatttaataaggacattaaggaaactttaattccaagttttgaaagctgcctatgttgtaggttttattgcgttcgagtaatgattaaatttgaaaaccatcttggcgtagcgaagattgatatccctatttctgttaggcaagtgacaaaataa

SEQ ID NO: 80958 - DNA, 1170 bp, Saccharomyces pastorianus
atggccaaagatttgaacgattcggggtttccaccgaagaggaagcctttgctgcgtcctcaacgatctgattttaccgcaaatagttcgacaactatgaacgttaatgcaaacacaagggggcgtggtaggcagaaacaagagggtggtaaaggcagttcgaggtcaccgtcgttacactctccaaaatcatggataagaagcgcgtctgctacggggatccttggactaagacgtcccgaactagcacattctcattcgcatgctccttccaccggaacgcctgctggaggtaatcgttctcctttgagaagatcaactgcaaatgcgacccccgtcgagaccggaaggtccttgaccgacggagatatcaacaatgttgttgatgtactgccctcatttgagatgtacaataccctgcataggcacattccgcagggcaacgtcgatccagataggcatgatttcccaccttcataccaagaggccaataattctactgcaacaggtgctgcgggctcgagcgctgatctctcacatcaatcattgtccactgacgcattgggtgccacacgttcttcgtcaacatcaaatttagaaaacttaattccccttcgaaccgaacatcacagtattgcagcacatcaatcaaccgctgtcgatgaagattcactggatatacctcccatacttgatgacttgaacgatacagacaacattttcatcgacaaattgtacactttaccaaaaatgtccacacccatcgaaatcaccatcaagacgacgaagcatgcacctataccacacgtgaagccggaggaggagtccattttgaaagagtatacgtcgggggatttgattcatggttttatcactattgaaaacaaatctcaagcaaacctaaagtttgaaatgttctatgtcactttagagtcttacatttccattattgataaagtaaagagtaaaagaacgattaaacggtttttaaggatggtagacttgagcgcttcttggtcatactcgaaaatagcactggggtccggtgtggacttcattcccgcagatgttgactacgatggttctgtatttgggctaaacaatagccgggttctggaacccggagtcaagtacaagaaattcttcattttcaaattgccactgcaatag

SEQ ID NO: 80959 - DNA, 603 bp, Saccharomyces pastorianus
atgtctgatgacaacctttcgatcaattacactattgatgcaaggattgtcggtaaagatcaaaaggcctctaaactgtatattatgaaggaaagagaatataatctaagagtaatcccttttggttttgacgccaatgtcgtcggagaaagaaccactatgagtcagctgaatgatatcaccaaactagtgcaggaaaggttggatgctcttagaaaaatctttcagagattagagaaaaaagaacccataacgaaccgcgacattcacggtgcagacttgagtggtaccattgatgattctattgaatcagactcccaagaaattttgcagaggaaattggaccaactgcacattaagaacagaaataactatttagtcaactataacgatttgaagttgggccacgatttggacaatggccgcagtggaaatagtggtcataataccgatacttccagagcttggggtccctttgttgaaagtgaactaaaatataaactgaaaaacaaatccaattcctcctcatttctgaacttctctcatttttttaaacagcagttccagctcaatgtcctcttcctcaaatgcgggaaagaataa

SEQ ID NO: 80960 - DNA, 588 bp, Saccharomyces pastorianus
atgggggtcgtttggtatttggacattctattatgtttccttccaactaaatttgaggcattacagtcctgtttggaccggaggtacgtatttcgttttcgtaattttcggatccatggctgcattcttcgttgccttttctatcaagagattaggaccagctctattactatgttttcactaatggcatttgacgctggttccataatgtttagtgtattgccagtggaacaaagctattggaagttgaactttgcgatgcaggctatcttatgttttggtatggacctgtccttcccggcatcatccattatattgagtgacgggcttccaatgcagtatcaaggtatggctggatcattagtaaacaccgttattaattattcagcgtctctatgtttaggtatgggaggcactgttgaacaccaaattaataaaagcggcaatgatttgttgaaaggttaccgagcagctgtatatctgggagttggactcgcttctctcggtgttgtgattagtgttacttacatgcttgaaaacctttggaatcgacacagaaaatctgaagatagaagtttggaggcataa

SEQ ID NO: 80961 - DNA, 1218 bp, Saccharomyces pastorianus
atgttttcaatcttcaaaaagaaaacgagcgtgcagggcacggactctgagatagatgagaaaattacagtgaaagcaaaagataaagtagtggtttccacagaagatgaagaggtgacaacaattgtttcttcaaccaaatcaactcaagtgaccaatgactcaccatggcaggaccccacttacttcagttcctttgggaaagaattaatgttcatagcgacatgcatgttggcacagttattgaatcaagcgggccaaacacacgctctctgtataatgaacgttctttcgaaatcctttaattcagaagcaaacaatcaggcatggttgatggcatcttttcccttggctgctgggtcgttcatccttattagtgggaggttaggagatatttatggattgaagaaaatgttgatcgttggttatgtcatcgtaatcgtttggtctataatttctggtctctccaaatactctaatagcgacgcgtttttcattacgagccgtgcgttccaaggagttggaattgcgtttattttaccaaatattatggggcttgttggtcatgtttataaggtcggttcattcaggaagaacattgttattagtttcatcggcgcatgtgctccaacaggcggcatgtttggtggattattcggggggttaattgtcactgaagaccccaatcagtggccttgggtattttatgcctttggtattgcaacgtttctaagtttattaatggcgtggtactccatcccaaacaacgttcccacaaatattcatgggctttcgatggattggactgggtccgcgcttgccattatcgggctgattcttttcaactttgtctggaatcaagcaccaatagttggctgggacaaaccttatatcattgttcttttgataatatctgtgatattcttggttgctttttttgtttacgaaagtaaatacgcagaggttcctcttctaccacgtgcaatgacgaagaaccgtcatatgattatgatattattggcggtattcctgggatgggggtcgtttggtatttggacattctattatgtttccttccaactaaatttgaggcattacagtcctgtttggaccggaggtacgtatttcgttttcgtaattttcggatccatggctgcattcttcgttgccttttctatcaagagattaggaccagctctattactatgttttcactaa

SEQ ID NO: 80962 - DNA, 351 bp, Saccharomyces pastorianus
atgaatgccagagaagtattgaatcctaccgactcaattttaagtcaagggatggtatcctccgtaagtacgagaaataccagcaatcaaagatctctttcatcgggcaatgattcaaaaggtgacagtagttctcaagagaactcaaagagtgcaactggcaaccagttggatacaccttctacactgtttcaaatgagaaggacctcttcagggccctcggcgtcccaccgtggtccaagacggcctcagaaaaatcgttacaatacagatcgatcaaaaagttctggtggcggaagttccaacacagataatgtatctgatttattccaatggcaaaacgccaaataa

SEQ ID NO: 80963 - DNA, 3774 bp, Saccharomyces pastorianus
atgatcaagacagcttctccgactcctttatctacacctatttacaggatagctcaagcttgtgacaggtgtcgatctaagaaaacaaggtgcgatggaaaaagaccacagtgttcgcagtgtgctgctgtcggatttgaatgcagaataagcgataaattactgaggaaagcgtatccaaaagggtacacagaaagcctggaagaaagagtacgcgaactggaggcagagaataagcgtttgctagctttgtgtgatatcaaagaacagcaaataagccttgtttcacagtcgcgaccacagacatcaacggataataccataaatggcaatttcaaacatgatttgaaagatgctccattgaatctgtcttctacaaatatctatttattaaatcaaacggttaataagcagctacaaaatggcaaaatggatggtgataatagcggttctgcaatgagtccattaggggcaccacctccaccgccacacaaagaccatctttgtgacggcgtttcctgtacaaatcatttacacgtcaagcctacttctacgagtttaaacgatccaaccgctatatcttttgaacaggatgaggcacctggtcttcctgcggtaaaagcattaaaatcaatgacggctcatcaacgtagcactcaattggcaactttagtttctttatccatcccaagatctactgaagaaattctgtttattcctcagcttttaacaaggataagacaaatatttggtttcaactcaaagcaatgtttgtatacggtttcattattatcttcattgaaaaatagattgccagcaccacggcttctagcaccttcaacatcaaccaagttaaaggagaaagatgaagataaaaaacttgatgatgattcggcttttgtgaaaatgtttcaaagtacaaacctctccgagtttgtcgatttgaagaagtttttaatttctttgaaatttaacattaactcgttttcaaagcaatcagaaaagccggctaatgatcaggatgatgaactactttccctcactgaaattaaagagcttttacacctttttttcaaattttggtctaatcaggtaccaattctaaacaatgaccacttcttaatatatttcaacaattttgttgaagtcgtgaagcatttatctacagaaaatttggagacgaataacactactaaaagtacagtcaccactaatcatgaaatatttgccctaaagcttctgatgatgttacaaatggggttactcgttaagattaaaatggaaaaaataaaatacactgtaccgaagaatccgaaggccaaatatgcgagattgatggcatattatcatcagctttccctaataattcctaaaaatccttattttttaaatatgtccacaacttcattaccatccttacaattgttatctttggcatccttttattatttaaacgtgggtgatatttcggcaatctatggggtaagaggccgtattgtttctatggcacaacaattgagacttcacagatgtcctagtgccgtattaagtgtacactctaacccagttctacaaaaatttgagcaaagcgagaggagattactgttttgggcaatttattacgttgacgtttttgcctcattgcaacttggtgttcctcgtttacttaaggattttgatattgaatgtgcattaccaatttctgatgttgagtataaggatcagttatctatggaaaatgaaaaagcagataaaaaagctaaaaagattcaactgcaaggtcaagtttcaagcttttcattgcagataatcagatttgcgaaaatattaggtaacattctagactcgatttttaagagaggaatgatggatgaacgtataacttctgaagttgcattagtacatgaaaacgcactggataactggagaaatcaacttcccgaaatgtactactttcaaataactgtaaacggaactgtgaatttagacgagattagagcaaccaatcaaagaaatactgagaccaaatttgataagaaagacataatattatttgaaaagaagattctattgctgttttatttcttggccaaatctatgatacatttaccggttattgcaaccaaacctttgcctaagaatgttgataatgccacaaagaagaaacagtcaatgttcaacaacgactctaaaggcgcaaccaaccaggaccacatgatattagatgttgatatgacttctcctgctataaggacatcatcctcatatatcattttacaacaagctaccaatgcaacgcttacgattttccaggccattaattccatgtatttacctttgccattgaatgtatcaagaacgttaatcagattttctttgctctgtgctagaggttctttggaatataccaaaggtggtgcgttattcttagataataaaaatcttctcctcgacaccatcaaagatatcgaaaacgataggcttttggatttacctggaattgcctcttggcacacgctgaaactgtttgacatgagcatcaacctgttgttgaaagcacctaatgttaaggttgaaagactggataaattcttggaaaagaaattgaattactacaatagattgatggggttaccaccggccacaaccacatccttaaaaccattatttggctctcaatcgaagaacagcctggaaaatagacaaagaacacctaatgtcaaaagagaaaacccagaacacgagtatctttatggaaacgatagtaataataacaataattctgaagcgggtcactctccaatgacaaatacaactaatggtaataagagattaaagtatgaaaaagatgcaaaacgaaatgcaaaagatggcggtatatccaagggggagaacgcacataatttccagaatgataccaaaaaaaacatgtccaccagcaatctgtttccattttcgtttagtaatacagaccttactgcgctgttcacccatcctgaaggaccgaattgtacgaatactaataatggcaacgtggatgtgtgtaacagagcttctacagatgccacggatgccaatatagagaacttaagctttttaaatatggcaccattcttacagaccggtagctccaatataggtcaaaacacgattgagaataagcctatgcacatggatgcgatattcagtctaccaagtaatttagatctaatgaaggataatatggactctaaaccggaacaattagaacccgttattaagcaaaaccctgagaattcaaaaaacaaccaatttcatcagaaaggaaaaagtacgaatatggaaaagaataatctctctttcaacaacaagagtaactacagcctaacaaagctaatgagattgctgaacaacgataattctttctcgaatattagtattaacaactttttataccaaaatgatcagaactccgcgtcagcggatccgggaacaaataaaaaagccgttacaaatgcaggtgccaacttcaaatcaccttcaactggcagtaataccagccaaggcagtatccttggaagtacaaagcatggaatggacaactgtgatttcaacgatttaggtaattttaacaatttcatgacaaatgtcaattattctggggtcgactatgattacattgtagatgcatcacttgggttggctcctttattagtggatacgcccgattatctcaaaataccaacaacgacgtctactaccgtcaaaatcgaagtacaaacagcatcatcctag

SEQ ID NO: 80964 - DNA, 141 bp, Saccharomyces pastorianus
atgaatacacatgcacaatacgtactagcgtttgccactatgctaaatgctcacgaatcccaagttgtgtggtttagatacggatggtggatattttccagatttgtcttcgttaatgaatttgatgtttatacatattag

SEQ ID NO: 80965 - DNA, 498 bp, Saccharomyces pastorianus
atgaagatgttgaggcgtacaaaggtaaatttttcaaaattgctttacaagattactaaactagcaatagtactgacgatcctatatatttattttacgcccaaaatcgtctcccgaaacaatgcatcattgcagcatatttttcctcataaatatggcgattatgaaatcaatttggtcatagcgcaccctgacgacgaagttatgtttttttcccccataatttctcaactgaattcgtactttccgagaaccgtcccatttaacataatctgcttatcaaagggcaacgccgaaggtcttggcgaaaccagggtaagagaattaaatgagtcggccgctttattgctacacaatgaaagagcagtctccgtacaggtgatggatttccaggatggtatggacgaaatatgggatattgattctataacttcttctctttcacaaaagataagatataaagaatcaaaacttgacccagattatcgttacctttga

SEQ ID NO: 80966 - DNA, 87 bp, Saccharomyces pastorianus
atgcccataattggtcccatactttctcacccagcaatcgctccaatagtagataaattagcgggagttagggttctgccagtataa

SEQ ID NO: 80967 - DNA, 1194 bp, Saccharomyces pastorianus
atgcatttcaaaaaaaaaaaagaagagcagataagtcatgaggctaagaaagataaagaaatctactggttgatgaacgtcatagatttaagtgatcctgccatcaatgtggattatgatagcttgattggcattgacaatgaggaatctcaagaaatttttgaaaatgaagtgaaggaagatggacaacaagaagagcaggaagaagcatcttcaagaaaagatgggctcatcgttgaaccagggagagatgttgagagtttgagaagggctattcgagatcagttgcttttcaagatacatagacaaaaccaatcagactgtgcagatgcgagaaagttgagtagcgatgaagaagatgaaagtcggcaacagaaattagaaagaataagagaagaattggaggagttgagaatagaaaatttaacatctgaaatgcaaactgaaatcaaggaattgtgcgaaattcaatcaaaattggcgacggaatcatctagtagattgacaaatttgaggaagaagcttctcgaaacatatgaaggccaagataccgtgatattgccaaacataattcttgatacgagcaatatcaaaagattgcaaaagttagatcagaaaatattcctgatggaacgttttgttggcataccagaagctttggaggcagaagaagataggaaatcggttcatagtaaagtcaatgaactatatcgaagtattcaacttttacaaggcgatgataaggcggaaggaaagctgcaaaagttccgggatagactcgtagaactgaacgaggaatttgaaaactcattgttaggcaagaaaatacaacaggacttgagattgaaagatgacaccgtgagcaagcttgttatgcccgaaaacaaagtaaaggagataaatagtatgtattccatgttcaagcaatatcaagattcactaccactgctggcggagaggatgaaaagtctcaataaaatgaacaacagggtgatcgaggtgtacgaaaccacgaaagggctggattcacaaataaccagcatccaaaaacaaggaaaagtttggctaaaggctttaaatgagctggataaaaaattcgatgaacaagaggttaaaattcgcgaaaatatggagcagatcaagcgtaaaattgataccctcgaagacgaagctctacagagaaatagcaaataa

SEQ ID NO: 80968 - DNA, 576 bp, Saccharomyces pastorianus
atgttagacttacaggcatttgtaagaagggtaaagtcaggagaagagccctcggaagcattagacaaaatgattgaacaggcttctgagcaaataactcaaatgtttttaagtgacaagattgacagcaataaaagtgcacaagcctgggaattaatcgaattattgagtgcgaacccagtcattccattccatgaaatcgttaacaagccattattcaaagccgcaccagaaacgggaatcatggaattggagaataatggtttaataactgtatctagagataggggtgttttacaggaaatcaggcctgccaaaccactatacagggcagcattcacatacttgatcaacgatcctgaactcgcaaaagtgctaaaaacccgttacttattaaaggttgtgggttttgaaactggtagaatcaagaaatgggaagaagaattaaaacctttggggaaagttcctgatcagaaacttttcaagaccagattggactatttatccggtaaaatcaatgccagtaatgcagtcattaccaaatgtgaagaagaaattaaaaatctatctaagtaa

SEQ ID NO: 80969 - DNA, 159 bp, Saccharomyces pastorianus
atgagcataaaaaggagcacacctagcatcacaaaatatagagagaaatattttgaaactatcctacttcttaatgctctctgctttcgagtcaaaattcttttatgcgcgataatacttcttggattcatccaaaatagcaccattatatgccagtaa

SEQ ID NO: 80970 - DNA, 204 bp, Saccharomyces pastorianus
atgagatatatatgtttaacgaatcaggtactcgtccgaagcatttcgagtaatgtaaccccacaagtgtccctcaagaattcactgggatttttgatgaccgaaagaaagctattgcagctgctacggcgtcctttcatctccctttctttattcacggccttaagagcttgtccgctttgccccaaaagcctaattgcttag

SEQ ID NO: 80971 - DNA, 66 bp, Saccharomyces pastorianus
atgtatgagcaggctctgacacccgagttcttccgtcaatggtgggatattattcaatccaaatga

SEQ ID NO: 80972 - DNA, 81 bp, Saccharomyces pastorianus
atgacagggtttaaagtttcttctttttttcatattctggcattgtcccgctttttcaacgcaggaagggaacgagcttga

SEQ ID NO: 80973 - DNA, 1908 bp, Saccharomyces pastorianus
atggccacttccaaaacctcatctacttcctccgacttgagtaggtctagtgtaatattcggcaatagttctaccgttacaacctctccatcagcgtctatcagtttaaccgcatctccacttccatcggtctggtctgatatcacctcttcggaagcttcatcaatttcctctaacctggctagctccagtgcgccatctgacaataattccaccattgcaagtgcctcgctaattgtcaccaaaacaaaaaactcagtcgtttcatcaattgtctctagtataacttcttctgaaactacaaacgaatccaatttggccacatctagtacatcgcttttgagtaataaagctactgcccgttctttatcaacatccaacgctacaagtgcttctaacgttccaacaggcacatttagctccatgagctctcatacttcggtgataactcccggcttttccaccagtagtacgccactcgcaattaattcaactgtcgttagctcatcattggcaggttatagtttctcgacacctgaaacctctccaactacttccactttggttacttcagaggctccttcaaccgtttccagtatgaccacaagtgccccatttatgaataattctacctctgctagaccttcgccaagtacagctagtttcattactgaatccacttcaagcatttccagcgtgccattagcgagtggcgacgtcacctcctcattagcggcccacaatttaactactttcagtgctccttcaacatccagtgcacaacttgtaagcaaatcaactacctctagctccatcctggtcacacccagcatcgacaggtctggaaattcctcaactgcctctacaattgcaacatcactccctaacaaaactacatttgtttcttccctaagttcaacatccgctcatgccagaagtatctttaattcaactgttctagctactgctaaacaaattgaaactttaacttcaacagtcaattgcagcaacgctactcctaattacaacataaccaaaacagtaatcgtaagtagggagactactgccataggaactgttacaagttgttcgggtggttgcaccaagaatagaaagtcaaccacacttattactataacagatattgatgcttctactgttactacttgcccagaaaaagaagtaacatcgaccacaagtggacatgaggcagaacataccactagcactaaaataagtaatttcgaaacgtccacgttttcggaaagttttaaggatatgaagacttctcaggaaactaaaaaagctaaaccaggatcagaaacgatgaggagctcgtcatcttttgtcgaaaaaacctcaccaacaacaaaggcttctccgtcaacttccccatcagaaagtgaagctacaggaaatacatccgttgcaacaaatgtttcaccatcaacttccccatcagaaagtaaagctgcaggaaatacatccgttgcaacgaatgcttcaccatcaacttccccatcagaaagtcaaggtacaggaagcacatctgtagagggagcaaaaagcaagtcaactaaaaattcagaaggagtatcaaccactaaagcgaaaaacacatcaactgttgcgaaatcttcaactgaaagtccgatcgggaggggcgaaactacccttgaaacgataattgtctcgggccaaaagtcgctattaacatcacaactaagttcatccactgaaaaggtaaacagatctaccaccaaacctacggcagcgattcatggaacatcctcatccgctaaacaaagcacaacatatactgtcagcacggcaaaagaaaataccggtgcatccttgaacattaacatgaaagcttttgttattggcgctattgctttggtagcttag

SEQ ID NO: 80974 - DNA, 468 bp, Saccharomyces pastorianus
atgggttcatctggttcaaaatcgaccacagccactaccacatcgcatagtagcacgactactactagtagcacgaccagtacaactacgcctactaccaccaccacgacaagcacgacaagcactaaagttacaactagcccagaaattattgtcagtagttctagcacattagtttcttctgttgtacccgagtttacttctagctcgtcgctctcctccgatacaattgcctcaattctatcatcggagtcattggtttccattttttcttctctttcttacacatcatccgatatttctagcacatcagtcaacgatgtcgaatcatcaacccctggcccctcaaactcatacagtgcgccttcctccacaaatgcacaactgtccagctccactacagagactgactccataagtagtagtgctattccaaacatcttccccgcaaaccagttcatcaaatga

SEQ ID NO: 80975 - DNA, 279 bp, Saccharomyces pastorianus
ctagaggatcccgcaccacatcattatgcacggcactgcctcagcggtttataccctgtgccatttacccataacgcccatgattatctacattttaatatctatatctcattcggtgcccccaaatattgtataactgctcttaatatatgcgttataccacttttacaccgtatactaaccactcaatttatatacacttatgtcaatatcacagaaaaatcacctccaaaatcacctaaacataaaaatattctattcttcaaccataatacataa

SEQ ID NO: 80976 - DNA, 732 bp, Saccharomyces pastorianus
atgaagttgcttcgtactgtttttttgccttgctcctcttcaaaagaatcaatcatgtcacagtacggatttgtaagagttcctagagaggtagaaaaggccattccagtggtgaatgcatctagaccacgggccgttgttccgcctccaaacagtgaaactgctaggcttgttcgggaatatgccgctaaagagttgactgcccccgttctaaaccactctttgcgtgtttttcaatatagtgtagctatcataagagaccaatttccagcatgggacttggatcaggaagttttgtatgtcacctgcttacttcatgatattgcaacaacagataagaatatgagagccacgaagatgtcatttgagtattatggtggcatactttcaagggagcttgtatttaatgcgacaggtggaaatcaggactacgcagatgcagtaactgaggccatcattcgtcaccaggatttgactgggactggctacattaccaccttggggctcattctgcagattgctactacgcttgacaatgtcggatccaataccgatctgattcatatcgatacagttagagccattaatgagcaatttccaagactgcactggttatcatgttttgctacggtggtgaacactgaaaactcgagaaaaccgtggggccacaccagttctttgggtgatgatttttcaaagaaagtcatatgcaatacatttgggtataactaa

SEQ ID NO: 80977 - DNA, 258 bp, Saccharomyces pastorianus
atgtgggtcaccgttgttagacagggcaacactgtcactgtgcaaactacttttgtccagcgtttctcctcccagtacgtaacagtcgcttctccctccgtggggtctattgggatgggtactttaaccggtactgtaggcgttattaaatctgcaataaagaaaacagtttcgcataatgaggcccagcatctaggtatgagttcgtttacttcaattttgggtgggctattaacggttttaatttggttcttataa

SEQ ID NO: 80978 - DNA, 294 bp, Saccharomyces pastorianus
atggaaatcggtagtgcttatgctttacaggtttgtcttttacaaatcccatccttagtcatttattccattttctatacgtggaatgttaaaaagtcgatgattaatatcagaacacagatgttcccattagtctttccccgttgggacatatttggtgctatgacgagtgttttcatgttcacctatttgtatgctgagggtaaaagtaactatttcaagggttccatgttgatattactatatatcattattgttgtaggattctacttccagggagctctttcggagtag

SEQ ID NO: 80979 - DNA, 2109 bp, Saccharomyces pastorianus
atggccaaaaataaccacatttctgccagtggtaacagtacctctggagaccatcgtcttaaagaggaggttctgaccccaactacatctgcctcgactcctcatagaatatttagcgtggacgatgatccaaaggagatccaaaacgatatcaggtatcttgagggtctgcatgaagggttgaagttcgccctgcatgccaataaatccaagcgatctgtgagctcgcaatcaccaatcgtacatagcagcaacaacacgctgcaccaccacgagcaccaacaacacttgccgcccacactagagtcgctatcctccaagtcgcactctgtgccagacttaaatacagctactcccagctctccgaaacgaatgcattcatctatccgggaattacctcatgatgacaatgatgacgaggacgccaatgatgacagtcggttcattatacacgactcgcacggccatgatttacttatagacgagatcaattgccagtcgccttcacacttggaaaacaatgaccaggcgtctaatgcttcgtccacagagtcattcactttacgagaaagacaggacgccatcaacgagacccaccccttcggtatcaggatatggaagcctgctttatataagaaacaccgttcagttcaaagaaccgcggcgcaagacattcacgagactcagttgaagactattacctgggaggtgacttgttccaatgtgctatggtttattttgttcggtttccccattgcgatactcttctactcggcggctattgtggtatttttactaggcggcggaggactggtaacgaactctgcgaaggagtactccaagtgtctgtataaactcgccaattatttcctttggccttttggcaaaatggtatacttgttgcaggacgagcaatatttacaagaagataaggatgaaggtattagtatgcagcaattctacaattgggtgacttcatactccaacaggctggtcttccaccagtctcaggccaagtttcagcaaagagaggaccatccggcccctgcaacggaatcttcgtctttgatgccgcccgctaacacaacagcaacaccgcttaactcgaaccatccatcatataattctattagacacgaaattccgcacgcagcggctcaaagacggtactttgggagaggaaaatggagctggggtcgtgttcttttctatacaatcttccatctcgtcttgcaacccatccttgccgtcttatctctttgcctctggctcctggtgtttaccattcccatgagtaatgttctttggcaaattatgtatcattgcagaagacatccgcttgcattaggcttcaaatatgtcgagaactcctcccaatcgcacgaaaatgaaataacccagcagcaattgaacaaaaatatcctcttatgtacgttccgtgccgctggctggcattactacaagtacacagttgatggtacaaatgttattgttgtgaatttaatatccatcgttttctttacaattttcgacttttatgttttgaaaaatttcctgcattggaaaacgtggttcacgtacgaatcctcaatattcattctttgtttgacatccaccatcccactagcattttacattggacaagcagtcgcatcgatctctgctcaaacttccatgggtgtcggtgctgtcattaatgcatttttctcgaccattgtggaaattttcttgtactgcgttgcattacaacaaaaaaagggtcttctagtggaaggatccatgattggttccattctaggtgccgttctattattaccaggtctgtccatgtgcggtggtgctctaaataggaaaacacaaagatacaaccctgctagcgctggtgtctcttccgcattgttaatattttccgtgattgtaatgtttgtccccaccgttttatacgagatatatggcggctactcggtaaactgtgcagacggtgctaacgaccgtgactgtactttctcgcatcctcccctgaagttcaaccgtttattcactcatgttattcaacctatgtccatatctgtccagtgtgttcgggatcctctagagtcgacctgcagc

SEQ ID NO: 80980 - DNA, 1005 bp, Saccharomyces pastorianus
atggccagcaagactttgagggttctttttctgggtcccaaaggtacgtattcccatcaagctgcattacaacaatttcaatcaacatctgatgttgagtacctcccagcagcctctatcccccaatgttttaaccaattggagaacgacactagtatagattattcagtggtaccgttggaaaattccaccaatggacaagtagttttttcctatgatctcttgcgtgataggatgatcaaaaaagccctatcctcacctgctccagcagatactaatagaattacaccagatatagaagttatggcggagcaatatgtacccattacccattgtataatcagcccaatccaactaccaaatggtattgcatcccttggaaattttgaagaaatcataatacactcacatccgcaagtatggggccaggttgaatgttacttaagctccatggcagaaaaatttccgcaggtcacctttaaaagagtggattgttcttccacatctgaatcagtgaaccaatgcattcggtcatcaacggccgattgcgacaacattctgcatttagccattgctagtgaaacagctgcccaattgcataaggcgtacatcattgaacattcgataaatgataagctaggaaatacaacaagatttttagtattgaagagaagggagaacgcaggcgacaatgaagtagaagacactggattaccacgggttaacctactcacttttactactcgtcaagatgaccctggttctttggtagatgttttgaacatactaaaaatccattcactcaacatgtgttctataaactctagaccattccatttggacgaacatgatagaaactggcgatatttatttttcattgaatattacactgagaagaataccccaaagaataaagaaaaattctatgaagatatcagcgacaaaagtaaacagtggtgcctgtggggtacattccccagaaatgagagatattatcacaaataa

SEQ ID NO: 80981 - DNA, 285 bp, Saccharomyces pastorianus
atgatgaaacaacctttggagagtgcatccaacaacaatgggcaatcattatttgtcaaggatgataacgatacatcttccggctccagtccgttacaaagaattctagaattttgtaagaagcaatgtgagggcaaagacgctaattcattcgctgttcccattccattgatctcgcaatccttgaatttggatgaaactaccgtcagaaactgctgtacgaccttgactgaccagggttttatctacccaacttttgatgacaataacttctttgccctatga

SEQ ID NO: 80982 - DNA, 1263 bp, Saccharomyces pastorianus
atgtctcaaccccagatgtcccctgaaaaagagcaagaattggcctccaagattttgcatagagctgagttggctcagatgacgcgtcaattaaagcttggtttaagtaatgtcccatcaacaaaacgaaaacaggactctacaacaaagaaaagaagcggagaggatgccgaagatgttgatgaggaccacaaaactcttttggaagccatatcgcctgcgaaaaagcctctccacgatgatacaaataaaatgactgttatatcgcccgtaaaatttgtagagaagccaaatactcccccaagttcacgccaacgaaaagctgaagaccgctcacagcagatcaagcctaggaaggaggacactccatctactccgagggcttctgctacacctataatcttaccacacgcttcgtcacactaccagcgcccccatgataagaatttcatgacgccaaaacgtaataataacaacagcagtaaccatagcaataacaataataatatcaagaagaaggcagcaggctctaaggatgctccacaggacagcgacaacactgcgggcgctgatctcttaatgtatttagccacaagtccatataataagtcatcacatcatggaacaccgatggccgtaaggatgcccactactccacgctcttatcattacgcgtcgcaattgagtttgaacggtaatacagcaagcacatcaaacgatgcagtaagattctctcatatcaaaccttcagcgtcttctccgcagtccactttcaaatctaatctgttaccgaattttccggacgaatctctcatggattctccatcactatacttgagcaataataacggtagtgtccaggcgacactatcgccacagcagagaagaaagcccgccacaaacacattgcatccacctagtaacgtacctaccacgccttcaagagaattgaacggtaccaattttaacttactcaggacgcccaacttcaacatgggagactatctgcataatcttttcagcccttcaccaagggtccccgcccagcagggagcgtcaaacacgtcagcttcaattccttctgttccagcgatggtgcccggatcatcttccaacacttctgcgatagcaacagctgctatatcaagccacaccacaaacaattttctagatatgaacgcaaacgggatcccgctcattgtaggacccggcaccgaccgtataggcgaaggggagtccattgatgacaaactcactgattga

SEQ ID NO: 80983 - DNA, 117 bp, Saccharomyces pastorianus
atgcaagaaaaaaaaattacaattatgaagtgcagaaggaaccaaaaatatcatcgaaagaaggagtacgtagagcgttactattttcaatcagtgttcccattgtgcatacaataa

SEQ ID NO: 80984 - DNA, 1254 bp, Saccharomyces pastorianus
atgtctcagagaaagcgatactcattgaacgtcgtcacgtccccgtcgataccgtcaccgacacccagtgcaccgatacggactaacgaatccaattgggaagccgcttcgccagcgagtgctgcatcttcatttctcccgaatgttcatcatggtggcacggttttgaatcctgggttgggcataatgaggtcaccttcgttgaacaagtctggtgcgtttggccggtccggcagcagtggttccagtacagtaatagaaccgtccaacataaagttgctgctaattggagatgcaaacgtagggaagacagctatgattttgagctattgccgggaactgctgacacgagcggaaatgtcacgatcggtgcgactgaggcaccagcagcagcaacagcataaagacttaggattgaagaaaactgtggtgaaccatagattaagcatgaaagagaaaagaaaacggtacagctctaacgattttgaaaaggagttcaaagatattaatcattttgcagacgaaacaagcgatttcggaaacccgaacatcggtgatgataacaaccacgaaatggcggatcctaatgagattgtcatcgaaaccagaagtactatcggaatagacatcaagacgaacttggtcaacatagataaccggttttttaatgtcatactgtgggacactgcgggacaagaacggtaccaaaacgcaatcattccatcactgtacaagaagactaatgcggtgatattaacttacgatataacaaatgcgaagtccttccaaagctgtatggagcggtggatagttcaggcgttggaaaacttttcttcccaggatttgttaaaagcaagattttttctggtgggtaacaagattgacctttataaggaaaggcaggtaacccattatgatgtggtgcaaatggttcaggaaatgcaactgaaacatggtattaaaatttcgggaaactttgaagtaagctgtaaatgggtcaacgtggtggagagaaccatgaatatgataatactagacctggttgagaacggatgtttcgaaaacaatgatccttgtgtgtcgattacaacatctgacgacgtccagggacatgagcaagaattccacgatacagtagaagagcctttcaatttcactcggcaacgtcaacatcaacttgaaaaaaataatacagtggatattacaaaacctaatgacgacattgcaaataatcaatcaatttgttgcgtttag

SEQ ID NO: 80985 - DNA, 303 bp, Saccharomyces pastorianus
atgccaccacaagacgctgaaggttggttctacaagcgtgctgcctccgttgctagacacatttacatgagaaagcaagtcggtgttggtaagttgaacaaattgtacggtggtgccaagagcagaggtgtcagaccatacaagcacattgatgcttccggttctatcaacagaaaggtcttgcaagctttggaaaaaatcggtattgtcgaaatctctccaaagggcggtagaagaatctctgaaaacggtcaaagagatttggatcgtattgccgctcaaactttggaagaagacgaataa

SEQ ID NO: 80986 - DNA, 99 bp, Saccharomyces pastorianus
atgggtccacacaagggtaaggctccaagaatcttgtccaccggtagaaagttcgaaagagctagaggtagaagaagatctaagggtttcaaggtgtaa

SEQ ID NO: 80987 - DNA, 123 bp, Saccharomyces pastorianus
atgggtattgatcacacttccaagcaacacaaaagatccggtcatagaaccgctccaaaatccgataacgtctatttgaaattattggtcaaactatacactttcctagctcgtatgtattga

SEQ ID NO: 80988 - DNA, 2400 bp, Saccharomyces pastorianus
atgagtcaactggatttaacatcagcgtcccatttaggtacaagtacctccaaaaaaaaaagcgggtgggtgtcctacaaagatgacggtatactttcatttatatggcaaaagagatacctgatgctacacgattcgtatgtagccctttacaagaacgataaacaaaatgacgatgcgatcttgaagataccactaactagtattataagtgtaagcaggacacagttgaaacaatattgttttgagttggtgcgctgcagtgaccgaaattctgtatcatcaggatcctcgtcctctttgaatgtatcatcagacagtaactccaaaaaatcaatatacattgctacaaagacagaaagcgatttgcatagttggttagacgccatttttgctaaatgtccattattaagtggtgtatcttctccaacaaacttcacacataaagttcacgttggttttgatccagaaacaggtagttttgttggtatgcccaccaactgggaaaaattattaaagcactccagaattacaggagaagattggaacaataattctgcggctgtcattcaagtgttgcagttttatcaagagtataatggagtcggaaatcccacaaatactttagacaagcctcaaagtggtgaaacttcctcctctcaaaaatcgctgccaaacagctataatgataacaaactcagaaataattcagtaaattcaaagtcatcttcaggcgtttcttcaagtatggtatcacagaggaaaacctcacaaccatcaaataccaaatcgcctgtttctctaggaagcggctcactgccaccaataaatacaaaattgcccactagtcagtcaaatattccaagacacttacaaaacgttcccaaccaacaatatcctaagatgagaaacggacactccccaaccaatggccaatttcctaggggacctatgcatccaaacaattctcaacgatctttgcagcagcagcagcagcagcagcagcaaaaacaacagcatcaacaatatccataccaccatcaaggaccatctccatctccatctccatctccatctccgtctccattaaacccttataggccacatcacaatatgataaatccttattccaaacaacctcaatcgccattaagttcacagtcgacccaaaaccaagcaattccacgttatgcacaaaactcaagtcctacagccgcacactttcaacctcaaagaacagctccaaaaccaccaatatcagctccaagggcgccatacccatcaaatcaaaatgctactagtaacacacatgtacagcctgttgcacctaagaatgaccagtcaaccccacaaacaatgaggcaggccccaaagagaccggatgcagatgtcgcacaaccgggtggtgtggccaaaccgaagaagccagcaaggcctaccatgtcaactgcagaaataatgagtaagctgaagaaagtcaccgtaaatgtggatccatctcaatgctttaaagtgatcgagaaggccggtcaaggtgcaagtgggtccgtctatcttgcagagaggacgcatattccgacagaaagtaatatgatcgaactcataaacaatgatattgatgagccgcacgtaggagataaagttgctatcaagcaaatggtcttatctaaacaacctcgtaaagaactcatagtgaatgaaattttggttatgaaggattcacgtcataaaaatatcgtcaattttctcgaggcttatttgagaacagacgatgacctatgggttgtgatggagtttatggaaggaggttcactaacagacattatcgagaatagtcccaccaacgataattcacattcaccactaacagaaccccaaattgcatatatcgtacgagaaacttgccaaggcttgaaatttctacacgacaagcatatcattcatagggatattaaatcagataatgtcttgctggacactagagctagggtgaaaattaccgattttgggttttgcgccagattaactgataaaagaagcaaaagagccactatggttgggacaccttactggatggcacctgaagttgtcaaacaacgtgaatacgatgaaaagattgacgtatggtctttgggtatcatgaccattgaaatgctggagggtgaaccaccatatttaaatgaagatccactaaaggcgttgtacttaattgcaactaatggtacaccaaagctcaagcatccagaaagtttgtctttagaaattaaacgctttctaagcgtttgcctttgcgtagatgttagatatagggcatcaaccgaagagcttttacaccacggttttttcaatatggcatgtgatccaaaggatttgacatcactgttggagtggaaggaatga

SEQ ID NO: 80989 - DNA, 123 bp, Saccharomyces pastorianus
atgtctctttcagctgcagcgaataagatatctgacaacgatttccaaactatcggaccggcacctagacctcccagttcaaatagccaggccgtacttgctataatcaaacgcaacctataa

SEQ ID NO: 80990 - DNA, 180 bp, Saccharomyces pastorianus
atgcgtgattttaagaggtgtctagatcaaaattccacccttggcaacaaacaaattggagttgaaaatctacaaacattaagtccgttgattttaagaacgatcccagtatctcataaaatggatggcctccaagataaagttttggaattatcacttggatttacgaaactagactag

SEQ ID NO: 80991 - DNA, 990 bp, Saccharomyces pastorianus
atggccatgaacactggagggtttgactccatgcaaaggcaacttgaagcagaattgcgttctttatcttccgaatcgaaaagaagaaattcaaccattcgccatgctagtgataaatccattgagatattgaaaagagtacatagttttgaggagctagaaagacatccggatttcgcactccctttcgtgttggcttgccaatcaaggaatgctaaaatgacgaccctggcaatgcaatgcctacagggactgtcaaccgttccatctattcctcgaagccggctgtctgaaattttggatgccttcattgaggctactcatctcgcgatggagattcaattaaaagttttacaggtggtacccattttttttaagacatacgggaagttcatctatgggccgctttgtaagaagttgttgctgtgttgctcaaatctgctgcatgtacctaataaggcacccgtagtagttggtactgcgagtgccactttacagcagcttatcgatgaaatatttgataggctttccattgaatctgtagtggatgataaacaatatgaagtcctcataagtaatagtgagtcaattaaggtcaatgtttatagatacgatgctaacaaattgttcgataatatctgttcattaaatgaaataagctcaaatggggcagttagtgacgaggagatgctgttagacattggggacatcccaatagactatggcctggaaatccttgaatcgattttgaagaatagtcagaaaaatcttttagaatgccaagatttacaatatctactgagagttaaggcgattccattgcttctacgttgcatatcttcttcgagacacttctccaccgctgtaaggagttgtcgttgtttgaagttgttgataagaaaagagtatctaagcatactcgagttagaattagaggtcatcttgtcactgttaatccatggcatatctgtcgaatccaatttaagttga

SEQ ID NO: 80992 - DNA, 1689 bp, Saccharomyces pastorianus
atgcatttattggacaaatcaaacgctccgtccattaatattacttacattatatcactaattctgaccatctgtaaccacttatgcgaggggttgaacaaatcggctctggtaagctctcccctagagaagaaaattgaggacaaagaacgtgaagagggaactggaaatgattcgacagttgtaaaggtttatagcggcctgttttctggcctatttgagctaaacaaactctttttatattcgacctccttagagacatcgatattccacttggtggttagagcttttcaaaaattagctcatagtgccggcgttctgtcactaaaggacaaattaagggcatgcatgaaattgttttcgattttgataacaaacaacgttacatcatccaatcaatatccttttaatgatacaagtaagtcagcaaaaaatcaacatacaagaaatatatccacatctagtgtcacgaccagtcccgtagaatcaacaaaaaatccaagtaggtcgattgcagattctgcgcaaaataaggaaatgaaaaggcgtttgcaccccaggaatattagttcaagacaagttagtttactaagggcattaatatcattatcaatatcactaggtcctattttcgattcagaaagctggaggtacacttttttaacctggcaatggatatcttactacatatatggtccatcagcagatttcaaagagagcttttactctgaagatattcctccacctccaatactgactaaatcagacgttacatcaattgaaagctctctaacgaaattttttgaaagtacaagcagctattcgtgctcaacttttcatttggtattaaccagattaattttggactcaaaaaataccctcactttagaacaaacgaacctcaacctgactaatgacattggctatcatcctttagatgcaaaagatgaaattataccatgcatttacaacaaggcgttttttgttaacaaaattggtgaactggcaacttataattgcaaaaaatttctctttggaaaaaatggtaaagaactttggagtttgatttccacctatatgatcaaattgatatcaaaccgtgaaatggataacgattctttacgtttatacacagtgagagtgtttacagatatcatcaaaaaggctactaatgaggttggtaattccgatgagcaagataataaagtgaaacagtttggtacattggaaaacttagtcatcgatagcttgatggcaacgataaactcgataaaacagttggatattggtaagcaggaaatatacaatgggacgatcaatgttgaatcagatattctttttcaattgctactaactttaaaagagattctgaacgaatttggtgaactgttaatgaactcttggaccaatattttcaacatcattaattcaccattcgagtggacagttgaggatactgatttttccgtgaatgaggatatagatgattcatctttatttgaaggtatcgttcagaagcataagaacatgatccaagtgtcatacgatgtttttaaactaatttctgatgatttcttacagagtttacctatgagtgtcattaaattcgttattgatacgcttgtcaatttcgtaagtcagaagcgaaatcttaatatctccttttcttctattagtcagttctggtag

SEQ ID NO: 80993 - DNA, 1248 bp, Saccharomyces pastorianus
atgttattagagtttttgaaaagattgttgtcttccacttctaataataccaagaatgctgtaatattaaattatcaaaccctgctgaaagaaatcatcactattgaggacgttccatcagatatattgaaaaagtgctgcgaaatatttaccgactacaatattacgtacagtgatctctccacaaacgcatcgagcaaaactgaatacgattgtatatacgaactaataaccggatttcctcctctttaccaattaatatcgaaatacgatgcgatgacagatgaatttgtggaaaaagttcttcttttattcaattctgccataaaatatcctctcttacctgagtttgtccaagacaaaactaaaccgtcctctatgcaaaaggccatattgtctggacttgatatatttatgacaaatgattctaaagatacagaaattttgattcttctccagttaagtacaatatcgatattggcatttgatacaagggaaaaaataacaaaaaaacttggaccaaagcttccaaaagcatcacttaacaggttaccaacttttgaggcaatcagctatatgtcatgttctaacctgagaaatagaatagcaaaaatagatcaatttggtatatccacactgaaagcaaagcatattttaagaatattgaaaaatttggctgaaatcatcaagcgaaaatcgcttattacagggtcagagagtgatgaaattcccatatgggttcttgcttccaattgcttctgtgatttgtcgaacaaaattttcaaatcactccaagaagatgcagaaaatccattaaaggataacttttgtgatttatttataaatgttattgttgtcacattacaaagaatcaacccagagctcgataatttaaccgagatagacgatttgaatgagtattccaaatatagggagatattgctggaaaacagaatcattgatctcttcaatgaaaggcaattagacactttcatttatgccgtctgggattgttcatttttatatgaattcgatgaattagaaaatgctttgatgcaagactgtggtacgttttctgaattgtcccaaaaactatcttcgttcgatttttcatgtatatttggatccaccacaaatcctcgctttcagacaaaatataagtgctctttagagtgcttgcaagatttggttaattttatgttgaactcaaacgagaaacttacgacagttaactgctccttatctttc

SEQ ID NO: 80994 - DNA, 189 bp, Saccharomyces pastorianus
atgcattggttaagatacaccaagaggcacaataccttttgggggaggactataaataaggacgttcaagtcagcttcaatgacaagtatgttgttactaggagcggcgtgaggtatacgaggtatcccactaatttgaatacacaattattggaaactgcatttgaagaatgggactactatgagtga

SEQ ID NO: 80995 - DNA, 192 bp, Saccharomyces pastorianus
atgaaaaaaaccaaacagagaaaggccatggtcaggaaacggttgggattagacaaaccaggcatatacatttattcgacaaaggatgtcgttttcaattcagatgaagatgacgatgaatatgaagttggcagtgaaggcaataacaatagctctgccacttttatcagcgaccatataggccatatttga

SEQ ID NO: 80996 - DNA, 228 bp, Saccharomyces pastorianus
atgaacttgtggagacatagtccagaagaattggctgcttacaatagctgtcatccaatgaagctaggttcaggggtgctgatacaattgcctctttatgacaattcggcagtatatgcagaagatattacttttaggagtttctgctgtgaaagagtgcccgtttatgtatctacggtgctaagaaactcttccccatataggtatcttgatgaggtgatcaactga

SEQ ID NO: 80997 - DNA, 984 bp, Saccharomyces pastorianus
atgcacatcttttccgatgatatgacatttgttgtcttggatttcttggctactttaatgttccaattttgccaagtcggcattgtcattaggctatttcaaagagctcaggaaaagagaataattttttttattggggtgatattaacaataaccgcaaatattttatgggtaattccaccgtttgctaaccatactacaaaacacagaaatgactggcagattctgcggccatttgtttaccttttccgtattgccatcgccacgtcatatgcatcaatcgtcatttatcacatctggcagaaaaaaaaattgtggtttaaattcaatcaaatgggtttacttacgctattgactattcttgtggtgcttctattaccgggtttcttccttgccgatgtgtcgaacttatggatatcggaactgggcgaagtgtttaacacgacatgctatgtcacttcgaccgtgatcacatgggagtggctggatagattaaatgttttggaaagaaaagaggaagcgcaaagcattttgggaagacctatcttcgaggaagagcaacaagactatcggtttgccaagtacgccttaagggttcaaaacgctttaaccaggagggaatctcaggacgcatcaacggatcggcacgatacgtcaagtaattcggaagtatgtgatttacagaccatatcacgctacgaaccagaagatcagatatcagtgggcagaagcattgatcgaatgcatttcaatgataggggaacttataaagatgtagcgctgaagaaattaggctatgcgcgtgataaaattttatactttacagaccaaatcgtccagaaaagcgtaggccacaataatagcagcagctcgaaaaatgaaaaaaaccaaacagagaaaggccatggtcaggaaacggttgggattagacaaaccaggcatatacatttattcgacaaaggatgtcgttttcaattcagatga

SEQ ID NO: 80998 - DNA, 180 bp, Saccharomyces pastorianus
atgtgctatacattagtacgaaattgcccaagcgattttcaattttcctgtccgaatgatcttactacggaagatcttctttatcaaagttacaatttctatatggacactgactactcaacctgtaattatataggtaactcatccttgatggtaattcatccattggacgatacgtag

SEQ ID NO: 80999 - DNA, 1287 bp, Saccharomyces pastorianus
atgatagtgtggcaagcactattcgtggtttactgcctatttaccacttctattcacggtttattccaagacttcaatcctttcgcaaataagaatatttccttaaagtttcccagcctaaatagatgggagaaaaacgttatggctactggtcaacaaacaatcatcaattcggatagcatttatgaatggaccccgatcttatctaacataacagcgggcaaaaaagacagttttgtatttaccattgacgcagaagcctccggttatgggtttgctcccacgtatgaagtgttagtgtttattagcggcaatatatgccaaatgcccatgaatagatcagatgtggatttaacaatatactactcttttaatgaaacggttttagagaacccaaatataggtcaaagtgcagtttttcaggatggctacatccaagcattagccatcagtccagtgcagtcttctagctcgaacgctacctccacgtattcaaatctttatgtggtcgctgagctagtgaattccactacggagcaacctctgtccagttccgacgcctctgaaaattgggaatatagactgagtatctctgagaacgatttggtttttcagtgggatgtaaggccttgggtagaggtcctggacactgatatgaattctgcattactatcaacggggaatgtcaccgcagacgccaaagtttatcacaattattcaatatatgatccatccttgtacgatctgtatgtttactcgcacgaagattctgttcaactaaaccaaaactataatttatctctttgtgctgtgaaaaatggaccatatttagtgtcttcccaaaatacatcaaatgcaacagttacgtcaaatagtacaaatcctttagagcgtactgacttggcgattcaaaaaaaaattacagaatatggtggtagcgtgacagaaatgttttacgtgacaggactgaatgcctcaacaacttatgtagcgtacctgacaaagaaaatcagtaatggtgatgggttgtcaagtgtgggcggcattttattttcacatgtttattttaccacaagaagtaccgatgtctgctctttgatctttggtttggacttctgcagtgacgtcgcttactctgttcctacatcctcattttctgtgggtaataaaactctcatggcgcagacatatgaccacattgcagaggcactatatgcaaattttagcaaagctctacagttaatatcctgtgacgcagacaagacgcaagagatcctccggtcatga

SEQ ID NO: 81000 - DNA, 2145 bp, Saccharomyces pastorianus
atggcgttactaaaattggttagacatttctctgaatacaattctatgaaaaatcaattggccaaggtagaattggtcaagattgtcaacgatttgatttatagggatcctcaattatttagtcaattcaggccacttttgtctgattggctatccaacaagttcgaatctgttcagttggaaacggcgaaattgattacttctttcgctactcgcaattcccgcttagtggctcccgagttatatgcggcagctatcagtgctttacagtccttactgaccgttcctcgtgtttcttctagattcgctgcattgagaatcttaaatagaatatccatggtttcaccagaaaagattgttgtttgtaatcctgaactagaatctttaattaatgattctaatagaaacatttctacttatgcaatcaccactttattgaagacaggaacttccaaaaatatttcatctctgatttcgactattactaattttatccatgatgtcagtgatgactttaagatcattattattgacgccgttcgtacgttgtctttgaacttcccacaggaatggaagtcaattttgaacttcttaatcgatgttttgaaaaatagtgaaggtggattcaaatttaaaaacagtattgtcgaagcattaatcgatattgtttcatttgttccacagtctaaagaactcgccttagaaaacttgtgtgatttcatcgaggattgtgaattcaacgaaatactagtgagaatactacatcttttgggtaaagaaggtccatctgccccaaatccatcattatatgttagacatatttataacagagtggtgttggaaaattctattattagatctgctgccgttgtagctttatctaagtttgctttgacgaagaacgatcctaccttatatgagtcaatcataagtttgttaaagagaatcgctaatgataaagacgatgaagtcagagacagagccaccattgcactagaattcattgattcggctaggaataaagatgatgttatagcacaaaatctaatcgaatccaaatatttttacgatattccatcattagagtcaaaattaagttcttacatttcctcaaatactgattcatttgcaactgcatttgatgtgaatcaagttcgtaagtttactgaggatgaaatgaaggcaataaatctgaagagaaagcaagaacaaattttcaatcaaaagtctgaaaccactttggatactacaccagaggcagagagtgttccagaaagaagagctgacgctaattcatttgctggtccaaacttggacgaccaccaagaagatctactagctactaagtacgctgacgaattgctatccattgaacaaattaaaccatttggtcaattagtaaatagttctagggctatctcattaactgagccagaagcagaattcgttgtacgtggtgtcaaacatctcttcaaagacaatgttgttttacaatttaatattacgaatactctgacggatattgccctagacaatgtttctgtagtctgtacccctgaaatttctgatgaagctgaattagaagagctattcaccctacaagtggacagattattaccatccgaggaagcagcttgttacgttgcattcaaaaaacttgatgaaattgtaatggaaggtttcttgaacaacttaacattcactacaaaagaaataaaccctgacactaatgagccatttgatggtgatgaaggtttccaagatgaatatgaaattgactcgattttcttgaatgctggtgattatgttaagagttctttcactggtaacttctccgctacatttgatgagttgccatgcgaagaagttgctgttttcaacattcaagaagatttatccatacaagaagtagtagataagattattttgaacagtagctgcttaccggtggaaagtacccaatttgctccaagtgattcaaactcccacaccttgaaattatttggtaagagtgctttaactggatctaaagtagccctacagattaagatgatcaagagttcgaaaggtcttgctttgaaagttcatggtaaaggtgaagacagcttattatgctctgatctggtgaatggtctaatgcagtaa

SEQ ID NO: 81001 - DNA, 516 bp, Saccharomyces pastorianus
atgtctgcacatacttacaaaaagtttgaaaactcgacctcgggcgatttacctgataaaatgaccatttatcaggattgtatgaacacgtttaacgaatcacctgtcaattccaagagatgtcgtttattgatttctcgcttgctgagactcttggcccagggcgaaaccttcccacagaatgaagcaactgcattatttttctctatctccaaattatttcaacaccagaacgatcctttaaggcaggctgtttatttggcaatcaaggaattgagtggcatttcggaggatgtgttgatggcaacctcttcaatcatgaaggacgttcaaaacggttccgatttgattaagcctgacgctattagatcgctgacttatgtcttggatgaatctactgctttttccgctgaaaggttattaaaaagtgccgtggtaagtagacatccttcaatatcctcagcagcattatgtacttcttatcatttgctggccatttcagaagtcactatcaga

SEQ ID NO: 81002 - DNA, 1176 bp, Saccharomyces pastorianus
atgaacgtttatatcaataacgctgcttctaccgcggactcaacttcatctactgctacctcaacatcgacaacatcttcatcaagcacaagtgttagttcaaaaacgtccacgaaattggacacgaaaacttcaactagttcttctacgcactcatcctcttcctcgtctacaacctccactaccacttcctcttcagagacaactacttcctcctcttcttcatcctcttcctcttctacgtctactacttctactacttctactacctctagtactacttctacttcttcttctccttccaccacttcctctagcacttctgcctcttccagttcagaaacgtcctctacgccggcaacttcttcatccaccacatcgacctcatcctcaacttcgacagcaacggtcacttctaccccctcatcgacttcaacaggtacttccacgcattacactacccgtgtggtgacgcagtccgtggtttctcaagctaaccaacaagcaagcacgatctttatcaccaggacctctgtttatgcaacagtatcgtctacgtcctcctctactagttctctcttaaacgggaaatcgagctcgtccaagagcaaaggcttgagtggtggcgccatcgcaggtgtcgtagtaggtgtggtttgtggtacagttggcttgttggctctggcgttattctttttcgtatggaaaaaacgtcgccaatcttctcagcatgtggacttggaagagacaaagcagtaccagccgtactcactgggtgatgctgacgctaaccctgttattccaccgtctgcttcgagcactaactggcacataccctctaggaataatacagcattgtccaagaatacagcgtctacttttgccacttatgatctgccgacaagggcgccgggcggcagagattctattattactggtgatgcacataatatcagcaaaagaagtcactttccctcggtggtgtacgaggagcctccttcgatctataacggggaccaaaggttcagtgctacttcgctgcccgatatgatggaagaaagacaactacacattgtcaaccccgataatgtgagttcaaatattaggagtaatgtctcagatggtgatgatgattacgatgatgcaaaggattccaataatagttctttgcgctga

SEQ ID NO: 81003 - DNA, 246 bp, Saccharomyces pastorianus
atgcagctagatctcatacacaagtccttcatcttagtgtggctcatatatatacgagccgcgttggctgaccaattcacatataaagcttgctattcagctagtgatatacgaaaattggggttgacttaccagggtgtttacgagtatcaatcagtttcctactgtcaaaatgaatgcctggtcaggctgtcgttgctcttttcaacgtacaggttgctactgtggtggttccgcagctcagtt

SEQ ID NO: 81004 - DNA, 735 bp, Saccharomyces pastorianus
atgcctgcaggtccactgtgtgttcttggaattggacttttgggaattttagtgtgcatatgccaatttgtcatgatagcactgttaaaacacaagataagccattcattgacttctaatgatggtgacggcgttcaaaatttgctgaagtctagcactgccgtcgatatagagaaccaaatgagcctttggagcgttcagactaataaatatataaatactacggagaccaatatcaatcaggaagtattcgggtggataaacacgacaacactttctgtgaacaatacagtggccaccatgatttctgatatagacacaactttagcagatgtattcaatggaacactgctatataacccaatgaaaaccgtggtcggatgtgccattgaaaataagctctacacaatagagaaggcaatgacgtggattcacgacaaggctcagctgcatatcccgagaattaatgggacacaaatcaagcaagctctggcaaagcaaaccgacaacagcactatacccactgcaagctccacttctgccgccacagaaaacttactggagaaccttgtgaatgatatgagagaaggacttttaaaaattctccgagcttaccaccgtataactctgggagaactcacggtagccttggtcattcttgcggtgtggctcgtacaattgcccatagctctggtaattctccgattacgtcttcgcaaagccacctttgactga

SEQ ID NO: 81005 - DNA, 105 bp, Saccharomyces pastorianus
atgatcagggatggttgttggatggtagaaaggacctcagtgatgtcatctactctgtctcttgccaaatcgtgcgtatccagtttacgtgtgatggcaatgtaa

SEQ ID NO: 81006 - DNA, 267 bp, Saccharomyces pastorianus
atgtgtggtatctatccctaccagttggtaacttcttcggcctcaccaaagacagacgtcttcgtttcatcgttaccaacgtcgcctccccaagctcttggagcggcatcggtaatggccttgcagttggtttttaaaaattgtactatcagtttgtttatcagcttaaactccaataggaaggcatcgtggccttcgggagattcaatgtttcctaagtgcgacttcggtatgtgctcagccaaaaatcttgttctgaatatgtga

SEQ ID NO: 81007 - DNA, 735 bp, Saccharomyces pastorianus
atgcatcagataaacttaaaggtaccaaactcagtaaagggattgcgaggtccaaaaaaaaaagataagaggaagcgtaggaaaggagaagccaagactaatttgccaatgtttggtgaccaggatgatgaacgacctcagaccgttagagaacgccatggcgtatacagtaaagagtttattagtgattcagaagatgacgaggatttgatgaaccctatattttttgaaaacgaaacatatttgagatggttactagataaaaacaatggtcagttgaccgaggatagatatatccagtttgccaaatttgccgcggaaaggatgaataatgggggtgttgtgacaggagattatacgaacttgtttggtggatccataccaagtattgaaagcataagagctacagaaagtagttcctttgcgccagatagaagcctcatttctttagcaagccacgtggcatctgaaatgtctattttcgatgtaaataataacaataataatcaactctctgatgacgatgtcaactcggaatcaagaaatagtttgggctcatcacagccatcaaattcgcaaaatatgttccaatctgaggtgtatagcagaaaagaatctacaaagcgttctttggaagcgaatgcagccgatgaaagcgatgaagatgaagaggccatccgcctttttggcaaaaagtctagagttgttttgagccaaggtgatagtgatgattga

SEQ ID NO: 81008 - DNA, 867 bp, Saccharomyces pastorianus
atgtctgcggatttgcaacaaggcactacaaatgcggctgatttctctctgacggtacttagagcaagaattgctttattggcaactgccatcggtgggccggattatacttcccagatagacccacccccttataagcttggcgatgactgtttggcgtgcttaaaagatctgaaaagatggtttaaactagtggatgaccagcagaaaagatgggatgtggcaatggcagtagctgaatatcgcatcttgacggatgatctgttacctattctcatagattgggaaaacaaatgttctcttgcagcaaagcttgcaaagaacaacccagaccatgaagagtttagaaacaaagcttattacgataaaattgcgctaaattgtctacaactattggtccttatgacttggcctttaattgtaactgaacagtcttcatcaaatcaaattactctctatggtgagctaaagaagcatcaattggtatacaagaaaacgattctgtctatggaaagtggtaaagtgttaagagctgccattagattggctctggatgttatcaaaatcgaccgattatcaagaactcctagggacaatatggttctcaaattggttttgaattttttcagaaatgtcattgctatagaacccggtgaatttactatcaatactaagaaaagcatgcctaagaaaggtatcacatctatcgatactttgccaccaaacgtctctatggatgacatctctttaaatacggttatttcctcattccataaaaacaaggtattcggtttcctcttaacgctgaccagctcctatcaaaagagtttgaccaggacttgggatcctctagagtcgacctgcagc

SEQ ID NO: 81009 - DNA, 1455 bp, Saccharomyces pastorianus
atgattgcatttaatgaactgttgaacctcgtttcccgtacaaaggccgctcaagaagaggattcgaccgatatagaattcattgtaagtaggcttttcagtgacgagagaatacaattactgtcaaatctgccgaagattggttccaaatactcgctccaattcatgaaaagttgcattgaactaacacactcggtattgaaagtattagagcaatactctgacgataaaacattagttattgaaggcaaatcaagacggcaaaaaaagtttaatatttcagaagatgatattactaaattgatagaagaagaaaatgtagatagagatgaagcgcttgatattctaacctcttctttaagaagtatagaagtcaattttcaaaaggtgcaagccaactatatgacagaaccggtaatagaaacgtacattaatttccttgaaagatttcgtgagcttgaggacgattccattaaaaaagtattttcctttttccatagagtatttgtccaggcaaaagaacaggcattgttatttagatttgatttgataatattattaagagaaatgctttcacctgacggattagatagaatgtctcgttcaaggaaatatgtgagtcaattttcagactacttcctcgccaggttgaagaaaaggttaaagaaatcacctgcttggtttgttggattacttttcccgccattacacaatagtgaagtaggattttaccaaagatatggtgaatataatgtacttaataatgaatcaatgtatgccgctcctgcatcacagttcaaaccaattcccgatgaagaagccttaccaccttcgattttgttggatatgaaatatggtattttagtttccacattacttgatgatggaaaaactgaactattggaccaactgctcaagcatataacccacacactagatatttttaagtcgtggctaaccgtaaatgttaatgctgggaaagaaacagttaatccacccaatgaatatttcacattgacaggtgtactcaacaacgaccctatttttaaagataaggactacagggctttattgttgctgataggatactccattccacgtaaaatcaatgaaccttgttttttaccggggactgttgaagtttctgacctgactgtttcttgtgaactagtgaaaaaatacttatcaacaccatttgaaactccaaacggactgccttcttcttcctatcttctacgagttcgttcagaaaaggatagtttttctcacaatgaacaagatggatgggaaggagacgatgattatgattacaacgatccctacattgttccagatgatcaaattctatcgaaaagcgacgcagcatacttcaaggatttagataacaatgcatcagataaacttaaaggtaccaaactcagtaaagggattgcgaggtccaaaaaaaaaagataa

SEQ ID NO: 81010 - DNA, 111 bp, Saccharomyces pastorianus
gtaaacgacggcagtgcaagcttgctgcctgcggtcctagaaaaattgagggcccgcaaggaaagatccataggtgaggctagcacaggtaacaggctaagtttcaaataa

SEQ ID NO: 81011 - DNA, 1635 bp, Saccharomyces pastorianus
atgacttatacgataagggttgttcttgctgatttagaaaaggcctttgtcgctagggaaattaaatcattagcaagcaagcgcaaggaagatctgcagaaaattacatttttatccagggatatttctcaacagtttggtatcaatttgcatatgtattcatcactttcggttgccgatctggtgaaaaagattctaaactgcgatagggattttttgcaaacaccgagtgttgttgagtttttgtcaaaacctgaaataattgaagtttctgttaatttagctaggaattacgccccgtattcgacagactgggagggcgtgaggaatctcaaagatgccaagcctcctgaaaaagatccaaacgatttacaaagggctgaccaaatttatttgcaattgatggttaatctagaatcatactggggttcacgtatgagagctctcacagtggttacttcgtatgaaagagaatataatgagttattggcaaagttaagaaaagtcgacaaagctgttagcgcgcttcaagaatcagataacttgcgcaatgtctttaatgttatcttagctgttggtaatttcatgaacgacacttctaagcaggcacaaggtttcaaactttcaaccttgcagaggttgacgtttatcaaggatactaccaatagcatgacctttctaaattacgtcgaaaaaattgtcaggttaaattatccaagcttcaatgactttctaagtgaattagaacctgtattggatgtcgtgaaagtttccattgagcagttagttaacgactgtaaggactttagccaatcgattgtaaacgtagagcgttcagttgaaattggtaatttaagcgattcctcaaagtttcatccattagataaagttttgataaaaacattgcccgtgttaccggaagccagaaaaaagggggacttgttagaagacgaagttaagctgactatcatggaatttgaaagtctgatgcatacgtacggtgaagattctggtgataagtttgcaaaaatctcattctttaagaaatttgcagattttataaatgaatacaaaaaagctcaagcgcaaaatctagccgcggaagaagaagaaagactttatataaagcataagaaaatagtggaagaacagcaaaaaagggcacaagaaaaggaaaaacaaaaagagaacagcaattcgccttcatctgaaggaaatgaagaggatgaagcagaagataggcgcgctgttatggataaactattagaacagttgaaaaatgcaggtcctgctaaaagtgacccatcttccgccagaaagagagccctagtgaggaaaaaatatctttctgaaaaagacaacgctccacaattactcaacgatttggatactgaagaagggtctattctttattctccagaagctatggaccctactgccgatacagtgattcacgctgaatcacccactccgcttgccacaaggggtgttatgaatacctctgaagatttaccatcgccatccaagacatctgcgctggaagatcaagaggaaattagtgacagagctagaatgttattaaaggagctaagaggctctgacacaccaagtaaagcaaaattccatactcgatga

SEQ ID NO: 81012 - DNA, 3813 bp, Saccharomyces pastorianus
atgttgaagaattcaggctccaaacattcgaactcaaaggaaagtcattcgaattcgagttctggtatattccaaaatttgaagcgtttggctaactcaaatgcaacgaatagcaatacgggttctccgacctatgcatcccaacaacagcactctccagtgggaaacgaagtgtccacttcacctgcatcttcgtcatcttttagaaaactgaatgcaccttctaggtctacatctactgaggcgaggccgttgaataaaaaatcgacattaaacacacaaaacttgtctcaatatatgaatggtaaattaagtggagatgttcccgtatcctcacagcacgcaaggtcgcattcaatgcaatcgaaatattcgtattccaagaggaattcttcacaggcgtccaataagctaacaaggcagcataccgggcaaagtcactccgcatcaagtcttctctctcaaggttcgctaactaacttgagcaaattcactacacccgatggtaaaatttatttagaaatgccgtcggacccatacgaggtggaagttttgtttgaagatattatgtataaaagaaatatttttcagtctttatcagaggacaaacaagaagctctgatgggctacagcattgagaagaaatggctgattgttaagcaggatttacaaaatgagctaaaaaaaatgcgagcaaacactacatcttcttccactgcctccagaacttcgatggcgtcggaccatcatcctatccttacggctaattcatctctttcgtctcccaaatctgttttgatgacaagcgcctcttctcccacctcaactgtatacagcaacagtttaaatcattctactactctttcatcggtaggtacgtcaacctcgaaggggaaaaaattagtgagcgggagtttgaaaaagcagccatctctaaacaatatttatagaggtggggctgagaacaatacgagtgcatctactcttccaggagacagaacaaacagaccaccgatacattatgtgcaacgaatcctggcagacaaacttactagcgatgagatgaaagatttatgggtaactttaagaactgaacagttagactgggtagacgcttttatagaccatcagggtcacattgctatggctaatgtactaatgaactctatttataagactgcaccccgagaaaacttgactaaagaattattagagaaagaaaattcattttttaaatgcttcagagtcttatcaatgctctcacaaggtttgtatgagttcagtacacataggttaatgactgatactgttgcagaaggtttattctctacgaaactggccacaaggaaaatggccactgaaatttttgtttgtatgctagaaaaaaaaaataaaagcagattcgaagcagttcttacctcactagataaaaagtttaggatagggcaaaatcttcatatgattcaaaacttcaaaaaaatgccccagtatttctctcatttaaccttggaaagtcatttgaaaattattcaagcctggttatttgccgttgaacaaactttagatggaagaggaaaaatgggttccttagtaggcgcgtcggatgaatttaaaaatggtgggggtgaaaatgcgattctagaatactgccaatggacaatggtttttatcaatcatttatgctcttgctctgataacataaatcaaagaatgctattaaggacgaaactagaaaattgtggaattttacgaattatgaacaaaataaaactgctagattacgacaaggtaattgaccaaattgagttatatgacaataataaacttgacgattttaacgttaaattagaggccaacaataaggcttttaatgtagatttacacgatccactatcattattaaaaaacctttgggatatatgtaaaggtaccgagaatgaaaagcttttagtatctttagttcaacatcttttcctttctagttcaaagttaatagaagaaaaccaaaattcctctaaacttactaagcaattgaaacttatggattctttggtgactaatgttagtgttgcctcaacttctgatgaagaaactaatatgaatatggctatccagcggctttacgatgccatgcagactgatgaagttgcacgtcgagctatattagaaagtagagctctaacgaagaaattggaagaaattcaggcagaaagggattctttaagtgaaaagttaagcaaggcggagcacggactcgttggacagttagaagatgagttgcatgagagagatcgtattttagctaagaatcagagagttatgcagcagctggaagctgagttagaagagttgaaaaagaagcatcttttggaaaagcatcagcaagaggtagaattgagaaaaatgttgactatattgaattcgaagcctgaagaaagcttcaataagaatgaaggcaccagaggtatgaactcgagcctaaattcttcagagaaagcgaatatccaaaaggtgttacaggacggattatcaagagcaaaaaaggattacaaggatgattcaaaaaaattcggcatgacacttcaacctaataagagattaaaaatgttaagaatgcaaatggaaaatattgaaaatgaagccaggcaactagagatgacaaattttgctgaatttgagaaagatcgtcttgaacctccaatacatattaagaagcccaaagtgaagaagatgaaaaataaggataggaaacctttagtcaagcctcaagaggcggacgtaaataaactaaatgacctaaggcgggctttggctgaaatccaaatggaaagtaatgatatttccaaatttaacgtcgaagaacgtgttaatgagctatttaatgaaaagaaatctctggctttaaagagactgaaagaactagaaacaaaatacaaaggatttggtattgactttaatgtcgacgagattatggacagtccaaagaaaaatactggggacgtggaaacggaagaagacgctaactatgccagtcttgaccctaagacatatcagaacaagttagacgagattaatagaataacggaccagttgttagatattcagactcaaaccgaacacgaaatacaagtagaagaagatggggaaagcgatctttcctcttcaagttctgatgatgaaagtgaggaaatataccaagacgcatctccaactcaagaactaaggagcgaacactcagagctatcttcaggatcaggtcctgggtcttttctcgatgccttatctcaaaaatatggtactggtcaaaatgttactgcatcggctgcttttggagagaacaataacggttcgggtattggacctctacatagtaaagttgaaaagacctttatgaacagactcagaaaatccaccgtgtcttctgctccatatttagaggagttaacacagaaggtaaataaagttgaaccatatgaacaaaatgaagatgaaggtttagataaaaaatctttaccggaaaacagcacggcaagtgcagcttccgcctttgacaaagctgagaaagacatgagacaacatgtggaaaacggaaagcaagggcgtgtggtaaatcatgaagaaaataaaacagcggatttcagcgctgtgagtaaactgaataatacagatggcgcagaagatctctctactcaatcatctgtactctcctcacagccgccatcgcctcctcctcctcctcctcctccagttcccgccaaattgttcggtgatcgttggagaaagagaaaagtcggagagaggggatcctctaga

SEQ ID NO: 81013 - DNA, 1134 bp, Saccharomyces pastorianus
atgaacatgtttcccgtaaagtattacggagaatttgagttttgtattgcctccataaaggtcatcgcgttgctcggttttatcattttctcattctgtgttgtgtgtggtgcgggacaatctgatggacccatcggtttcaggtactggagaaatccaggagcctgggggcctggcattatctccagtgataaaaatgagggccgttttctcggatgggtttcctctttgattaatgctgcatttacgtaccaaggtactgaactggttgggataaccgctggtgaagcggctaacccaagaaaagctctcccgagggcaataaagaaagttgtagtgaggattctagtcttttacattctttcactatttttcattggccttttggtcccatataatgacccaaagttggatagtgacggtatatttgtctcttcatcgccctttatgataagcattgagaattcaggcacaaaagttctcccagatatatttaacgcggtcgtgctaatcaccattctttccgcaggtaactctaatgtgtacattggctcaagggtactgtatagtctgtctaaaaatagcttggcgccaaggttcttgtctaacgtgaccagaggtggtgttccatacttttctgttctatctacatccgtgttcggatttttggctttcttagaggtttctgcaggcagcggcaaggcctttaactggttattgaacataactggtgtggccggtttctttgcctggcttttgatttcattttctcatatccgtttcatgcaagccataaggaaacgtggtatatcgagggatgacttaccttataaagctcaaatgatgccttttttggcatattatgcatcttttttcatcgctctaattgttctgatccagggcttcaccgctttcgcacctacttttcagcctatagactttgtcgctgcatatatatcaatattcctatttttggccatatggttatcattccaagtttggtttaagtgccgcttactctggaagctgcaggatatcgatatcgattctgaccgccggcaaatagaggagttggtatggatagagccagaatgtaaaacaaggtggcaacgagtttgggatgtcctttcataa

SEQ ID NO: 81014 - DNA, 1911 bp, Saccharomyces pastorianus
atgttaaaagcaaattattttcgttgcgagacacaatttgccattgcactagaaacaatatctcaaaggctagctcgagtaccgacagaagctagattgagtgccttacgagccgagttgtttctattaaacagggacctaccagcggaagtagatatccccactttattgcctccaaataaaaaaggaaagttacataaattagtgactattactgctaatgaggcacaagttttgaactctgcagaaaaagttccatatttactcctgatagaatacttgagagacgaatttgattttgacccaacaagtgaaaccaatgaaagattattaaagaagatcagtggtaatcagggaggcttgatatttgatttaaattacatgaatagaaaagaaaacaacgaaaatagaaatgaaagtactcttactagcaacaacactcgatcttcggtatatgatagtaactcgttcaacaacggggcctcccgcaatgaaggtctatccagtacctcaagaagtgattcagcgtccacagctcatgttaggactgaagtcaataaagaggaagatttaggtgatatgtcaatggtaaaagtcaggaacagaacggatgacgaagcgtatagaaatgctttagtaatacagagggccgcaaatgttccaattttacctgatgatagtcaagacagaagcccagagttgaactttggctcaaacttggacgaagtactcatcgagaatggaattaatagcaaaaatatacatagccaaactgacgctttagcagaccagatgagagtttcagctgttatgttagcacaattggataagtcgccacaacagttatcagaaagtaccaaacaaatccgcgctcaaattatttcatcaatgaaggaggtgcaggataaatttggttaccatgatttggaagcccttcatggaatggcaggtgagagaaaattggaaaacgatttaatgacgggtggtattgacacttcatatctaggtgaagattgggctaccaagaaagagaggatacgtaaaacttcggaatatggccatttcgaaaactgggatttatgttctgtaatcgccaagacgggtgatgatttgagacaggaggcgtttgcataccagatgattcaagcgatggccaatatttgggttaaagaaaaagttgacgtttgggttaaaagaatgaaaattttaattactagtgcgaatacgggacttgtggagaccatcacaaatgctatgtctgtgcatagtattaaaaaggctttaaccaaaaaaatgattgaagatgcagaactagatgacaagggtggtattgcctctttgaatgatcacttccttagagcttttggtaatcctaatggatttaagtatagaagagcacaagacaactttgcttcttcgttagccgcatattctgtcatttgctatctcttgcaggttaaagatagacacaacggtaacattatgatcgataacgaaggccatgtaagtcacatcgattttggatttatgctatcaaattcacccggctcagtgggctttgaggccgcaccattcaaattaacttacgaatatattgaactgctaggcggagtagagggagaagcgtttaaaaagtttgttgaactaactaaaagttcgttcaaggctctgagaaagtatgctgatcaaatcgtatcaatgtgtgagattatgcaaaaggacaatatgcagccttgtttcgatgctggcgaacaaacaagtgtacaactacgacaaaggttccaattggacttatcagaaaaagaagttgatgacttcgtagaaaatttcttgataggtaaatctttgggtaatatttacaccagaatatacgaccaatttcaacttattacacagggtatatatagctga

SEQ ID NO: 81015 - DNA, 1146 bp, Saccharomyces pastorianus
atgcataaagcatccagttcaaagaaaagctttgatgatactattgaactaaaaaaaaatgaacagttactgaaactgatcaactctagtgaattcacccttcacaattgtgtggagttactgtgcgaacactccgaaaatattggtatacattactatttatgtcagaaattggccacatttcctcacagcgaactacagttctatattccccaactagtacaggtcctcgtcaccatggagacagaatcaatggctttagaagatttactattaaggttgagggcggaaaaccctcattttgcactactgacgttttggcagttacaagcgttactaacggatttatctactgaccccgcttcttatggcttccaagtggctagaagagtcttaaacaacttacaaaccaatctctttaacacaagttcaggtagcgataaaaatgttaaaatacatgaaaacgttgcaccggccttagttctttcctctatgataatgtcggctatagcattcccccaattaagcgaagtgaccaaaccattagtggaatctcaaggtagaagacaaaaagctttcgtttttaaattggctagaagtgcaatgaaagattttaccaagaacatgaccttgaaaaataccctactaaacaagaaaacttccagatccaaaagagttagctcaaatcgcagttcaactccgacttctccaatagatttaatagatccaataaaaactaaagaagatgcatcattcaggaaatccagacatagtgaggtaaaattggatttcgacattgtggatgatataggtaaccaggtctttgaagaaagaatctcatcttcaatcaaactcccaaaacgtaaacctaagtatttggataattcatacgttcataggacatatgatggcaaaaatataaacagggacggaagcatttcaaataccgcaaaggctctcgatggaaataaaggtgattatatttctccaaagggacgtaatgatgaaaataatgagatcggtaacaatgaagatgaaactggtggtgaaacggaggaggacgcggacgctttaaactctgatcacttcaccagttctatgccagatctgcataatattcaaccaaggactacttctgcttcatct

SEQ ID NO: 81016 - DNA, 81 bp, Saccharomyces pastorianus
atgttagaagacgacgaagataaggaattctccagcttactatatggcacatcgtatgttttcgcgatttccttcaaataa

SEQ ID NO: 81017 - DNA, 846 bp, Saccharomyces pastorianus
atgtgtattcaaaggttaagatatgctcaagaaaagcaacaggcgattgcaaagcagtctcgaagacaggttgcacaactgttactgacaaataaagaacagaaggcgcattatcgtgtggagatgctgattcatgacgatattcatattgagctactagagatattggaactatattgtgaattactactggctagagtgcaggtaataaacgatatctccaccgaagaacagcttgtcaaagagcatatggatgatggtattaacgaagctatcagatccctaatctatgcgattcttttcgttgatgaagtcaaagaacttagccaattgaaagatttgatggcctggaaaataaacgttgagtttgttaatggagtaatagcagatcatatcgatgtccctgaaaagattataaaaaaatgctctccctcagttccaaaagaagaactagttgatctttatttgaaggaaatcgcgaaaacatacgatgtgccatatagtaagctggagaattccttatcttcgtcgtcttctaacatttcttcagactttagtgacccctcgggagatatcgaggataatgacgaagaaaagcctattttagccttagataatgacgataatgacaatgcagatgctaaacaccctatcactgttaaaaagcctaggcagaatagtgaaaatatcaagaacgagctcaagattccgaaagatatcaaaaaggaagtgatcgaaaagaaacaatcagaaaagaaaactacaaaaagaaagactaagaaggagcaagaaaatgatgaactagatgagttgaagaaacggtttgacgctttacgcagaaaataa

SEQ ID NO: 81018 - DNA, 564 bp, Saccharomyces pastorianus
atgaaaaatggtcgtcaaaacacagaatcttcctttagacaagtccaagaattagtctacatgatggaaactgcgacaactgtagctccccaaggtgtagaaaagatcacagtcttggtagatttcaaaagttataaagaacctggtattatcactgataaagctccacccatctctattgctaggatgtgtttgaacgtcatgcaagatcattaccctgaaaggttagctaagtgtgtcctgatcaatatcccatggtttgcgtgggcttttttgaagatgatgtatccgttccttgaccctgccactaaggcgaaggctatctttgacgaaccatttgaaaaccacatagagccatctcaactagatgctctatacaatggtctgttagacttcaagtataaacatgaagtctattggccagatatggttaagaaagttgacgatttacgattgaaacgttttgatagatttttaaagtttggaggcattgtcggattaagtgaatatgacaccaagggccaacatgacgaattaaaatatcctgttgatatggtcatttga

SEQ ID NO: 81019 - DNA, 105 bp, Saccharomyces pastorianus
atgaccttgacaagtgggacacatgccaatgacagacccttgagtgattgggagaagttttggctttctaggggagtgttttctaagatacctaagagccaataa

SEQ ID NO: 81020 - DNA, 165 bp, Saccharomyces pastorianus
atgggtcttttttcaagaaaacgggaccatacgcctgctgtgcctaaagagaaacttattccatgtgataagatattcttggaccctcctgccaagtttggttacgcacctctactggaacccatctccgaagatcaaaacgaaaaatatagagctgtcttatga

SEQ ID NO: 81021 - DNA, 489 bp, Saccharomyces pastorianus
atggattttgataatttactaaacctagaagaacagtattaccaagaaggttttctggagggccagaatgagaatataaagcagagctttctagaaggtaaacagtatggtttacaagtgggattccaaagatttacgctcctgggacaaatggaaggtttgtgtgatgttatagaatcgtatggattgcatagtccaacactagaaaagaatatacataccattcgtactttaatgaaaggtttgaaaatgaataacgatgatgaaagtgtgatggaatttgagagggtgttaataaaattgaaaaataagtttagaaccattctaataactcttcatcgattagttaaagataaaagaacccccaccgtgacatttgaagtctttgaagacgtttcaagggccattgccggagaaattagaggttttgtagaaaatgaagacatcgcaaagaataagacaaaacaaaatcaggctcaatcctggtaa

SEQ ID NO: 81022 - DNA, 2508 bp, Saccharomyces pastorianus
atgtcaaaggatatcacgttggtctttcaaacttcaaattatctagatttgaaatcatggttaatagcttttgaagcgacaaaaaagtatgtcatgagtatacaacatgatagtcttgaatatgagctggcgtttaaaagattttctcccaagttttttgaatttgcctctagtacaaccacctccatagatcaattaatcacaacatttgacaaagaaaccgagtccttgtatgaaacgctgaactgctcaatctctgaatatgatattttgactttaggagaggagaaggtgtttcagttccaaatgccaacaacaccaatatctacaaaaatgacacaactggctattctgtctaatttcctcacaaaaggtagctggttccctaatgctgttcttgcgaatatatggggcacgaccgattggagtgaatatactatattgccaggaaagggaaagaaaccctcctctttattaacgatcgatggcaaaaggcttccaataagaaactccactatatatcctcaatattattctaatgagttgaaagtgcttgatctacagttcaagtcattagtattttctccggaccaaaggttggagaagctaccggaagagcttttacttttcaagtttgaagcattttggtgtcctaacaaaaagcagaagttctcagctacctgcttttgcacaaaagactacatttattgctacatgaattctatggaatttatctgtcttacaaagatcagcttgtctgaaatcgtttctgtagaagccgacagatcatcaaagaagaccttaaaactttacgatgccagcggtctacaaatgaaagcaatcgttttattttctgactataagcttattgcatctaagttgcaatatctgttagaaaacaaggctataaaaaacccaaatagtaacgaagagattttagtaaagtttgaacagatggaaaaagaatctcaagaaaaaaaacaagaagaattatataagatagaacaagaaaactcctttgatcgtaaggccaccagcatatccaaaatcatcaaatcacgtgtgacattttgggagatgtccgatgatgcatctactttattaaacagactcaaaaaacttcagacagagtactcgattacttacaatcatgaatatgaaatatctagtaaaggactagcccacatactatttggagataaatcgaatgcttttccaaaatgcctgtttttagcaagaaaagatggggaagaacacgggaaacgtttttggtataaaaacaaagacatcaacgggaaatcacaattagttcgaaagataccatttcgattggatatgaccggtaattttttaaatactggtaaatatcatagagataaggaatctaaaatgatttttgctacacagaggatagtcaaaattgttgataacaaatattatgaagtcgatttagatccttttttcgttaaagtgccattttgtcatttattgaagctttcaattaaatttgtcataactgagtcatatgatatagataaccatcttgaaataaagttgaatatgacggcgagcagttcatcgcttcatgtcctatacaaactagaatatattgatagtagaactggcaaaacaatagaaaagctatctttggctgaaataatatgccaaacatgggccttgaaatttgctcatagtgaattcctactgataagaagggtgttacggtactacttggaaaagattggcaaacacggaaaagttatcaaagctatcaaactatgtggtatattaggtgttctcagcaacaaaagtgaagaacctgctactgaaaaaaatggcaactccaaagagagtgaaagtatgcaatatgacatcaggtattcttgtactatccttttcctagtgtttatcaaactaatggtttacagagtaacgaatttgacgtttgtattcttcagaatacttatcggtattctattattatgtgctgaaaagttctcacggattaatcgaatgatggtggtcggattattagcatctattatgataaacatacttttatcagaaaaagcatcagtgccctactggtcaataaagagagctgaaaaactgttccacgaccgtcttggatcagataaattcacaatgcaaagagccatttacataagtgattcggacttgctaagtagtcaactgtcagtgccgtcaaataaccccatttttgagaagttcagcgaggacaatttcaataaggactatcagtatagcgaaacgagaaaacagttggctatgaggagaaatgaattgctaattgaacttagaatactccaagacatggagaaacaattagtgcatgacgactacgaaaaattcttgctggaagaagtaaataaatgctcgatggtgtctatagagatgactgatctttggtttaatgacactcaattgcaaaattactgttctatttgtaacgaagaactcgagaagttaagaccaccaataacttga

SEQ ID NO: 81023 - DNA, 1002 bp, Saccharomyces pastorianus
atgtccgttcacgggagggatcccaaaaagaggcagttaaggctaatatcggttgcattcaaagaagcatcaattgactctccttcctttcgtgcatccgtaaatttcttccaaacaagggtggatgcattagaggattggatagagaagactgtcgactttttcgatcagaaatataaggtttcatttgaagattttcgaagagcaaaggaaactctcctatcccaattgttacctcctccagccttgctgagcaacggttttgtcagtaaccaatcgtttactcccaggctgattgatagttttaacaaggactattatgacttttctatgaaattactgcaaattgtaaagggtgatgactctagccactcaaccgcgctattagaacttatgactactgcaattgaaccctacagaaacgtgagaaaaaatttcgatttttaccaaggtaaatatgacagtatgctggcatcctaccaggctataagaatttcaaaaaccagtttagagccatcttctatcaaaagtgatgccttacaattatttgaagtgcaaaaaaactaccttaaggcctccctagacctcataagtgccatatcagcagtaaaattaagcttagataaattcatactagagtcaatgaaagtattaaagtcaagaagcatttttataacgaaagattctggaaggaaaatagatttatctccttgcattaatgagtatttagacaattacgcaatatgggtagaaaattccatcgaaggatcgaaagtattggattctgatatcagtaatgcaaaaaagcaagcatataggtataccttgaaacgaattacgccgtcaagtgacacaagtgattacaatataagatcaatacattcctcgaagctgctatcaaaggatacgcaagtgcctccaaaatcgcccgaaaagtctgggtggatttatatgaaaacacaggttggaaagcctaccagggacatatgggtgagaagatgg

SEQ ID NO: 81024 - DNA, 156 bp, Saccharomyces pastorianus
atggctaaggactgtatgaaagaggacggaattagtggattgaaatgttacacttgtggtcaagctggccacatgtccagggactgtcaaaatgacaggctttgttacaactgtaacgaaactggccatatttccaaggattgtccaaaggcttag

SEQ ID NO: 81025 - DNA, 114 bp, Saccharomyces pastorianus
atgtctcaaaaagcttgttacgtttgcggtaagattggccatttggcagaagactgtgattctgaaagactatgttacaactgtaacaaacccggtcacgttcaaacggattga

SEQ ID NO: 81026 - DNA, 813 bp, Saccharomyces pastorianus
atggtactaccatctccgatactagaatctggagtatggggaccttttgatactatacttgacaacaggggtgatttttctgtttatgctgcgggccagtcgtgtactggtaaattaattgaacatttatttgagagtcatccatgtgccaggaaaattctgaaagatggtgctgatatctatcaagtactcgaacaaaccattcgtgacattgagaagaacaatggtctctcaattcatattcttacgaaagatatgtttttctacggtgattacgagggaaataggactccttttgcagatccacggataaagggttctttcattggcgagtccaccgatacatcaatgttgaatcttacatataaatatatttgtatcttggaatttttatcatttcagacaaaattgataattgatacatttcaaaatgaaaattcaaatatacatatcaacgagttaaggatatctggtagtcaagcgaaaaatgaaagactattatcattgatttccttggtcaacaacggtgtagcaataattaaacctaaagagaatgtcgatatgatgggtatcaaaggtgcttacgtgcttgctaagtctgcaaaggaaaagaaacaactagctgacgttataacagagagagatattagtaatgatagcgaaaaattccaatctcttgctgaataccgacttggaaacgatagcatattactaagaaaattgctttgcgttaaatatcatatacacttagatatggctaagcaacagaagcgttatcacaaactcgtcgacgaagtatttcagcacctctaa

SEQ ID NO: 81027 - DNA, 693 bp, Saccharomyces pastorianus
atgaatagcagtctgcaagttggcatcggaattgatgtaggttcatcaagtgctagaataggtgtatataattactacaatgatgcgctgttagaaatggcgcaggaaccagtcccatactaccaggattcttcaaagaagtcatggaaattctggcaaaaatcaactgaaataattaaagcccttcaaaagtgtcttcagaaactgaacattagagaatatgaggtaaagtcatgtggtgtttctgcaacgtgttcattagctattttcgaaagggatcgcacaagtaacatgctgataccgtatccaaatgaagataatgtcatattttggatggactcttctgccgtaaacgaatgtcaatggctaaatatgcaatgtccacaacagcttttggattatttgggaggaaaatttgtacccgaaatgggcgtccccaaattgaagtactttttagatgaatactctcatttacgagacaaacattttcatatctttgatcttcatcaatacattgcttatgaactgagccgcttgtatgaatggaacattgaaggacttttgggaagagaaaatcttaatggtataggcaatgatggagaggtatctggctggtcatcttcattttacaaaaacattataaatttaccatctaatgtaagcattggaaccactagttcttgttgccaataa

SEQ ID NO: 81028 - DNA, 297 bp, Saccharomyces pastorianus
atggaaattgtcaagctaaacgaggagaaacatgccaacgaactagcaaagaaacaaaagaaattggaacagcagaaattaagagagcagaaggaaaacgagaggaagcagaaagctcaaattaaaccacaagatatgttcaaggatgtcacattgtacagtgcttgggacgagcaaggccttccaacaaaggacaaagacggtaatgatatcaccaagagtatgaccaagaagttgaagaagcaatgggaacaacaaaagaagctacatgaagagtactttggtgaagacaaatag

SEQ ID NO: 81029 - DNA, 771 bp, Saccharomyces pastorianus
atggtcagtgcaaaagcattcttaggattggctaaatgcgaagaagaggtggacgctattgaacgtgaggtagaattatacagattgaacaaaatgaagcctgtttatgaaaagagggacgcgtatattgacgaaattgcagagttctggaaaattgtgctttcacaacacgttagttttgcgaattacataagggcttcagattttaaatacattgacactatagataagatcaaagtagaatggctggcattggagtctgaaatgcacgacactagagattttagtataacattccatttccatggaattgagggagacttcaaagagcagcaagtcaccaaggtgttccaaatcaaaaaaggcaaagatgaccaagaagacgggatactgactagtgagcccgttccaattgagtggccccagagttacgactcgataaacccggacttgatcaaagacaaacgcagtccagagggtaaaaaaaagtacagacagggaatgaaaaccatatttggctggttcagatggaccggcctaaaacccgggaaggagttcccgcacggcgactcattggcgtcattgttcagtgaagagatctaccctttttgtgtgaagtactatgctgaggcccagagggacttggaagacgaagaaggagaatccgggttaagcgcagatggcgacagcgaggatgacgatggcagtctcggtgaggtggacttgccactatccgacgaggaaccaagctctaagaaaaggaaagtttag

SEQ ID NO: 81030 - DNA, 117 bp, Saccharomyces pastorianus
atgagtaggtttagggtaactaaacaacaaagaagaactccagactcaacacaaaaaagagcaatgtcgcaacgagggaaaccgttgtccaagcccgctccggacctagactactaa

SEQ ID NO: 81031 - DNA, 141 bp, Saccharomyces pastorianus
atggggtcgggcgatttgaatctgttgaaatcatggaatcccaagcttatgaaaaatagaaaaaaagtatgggagaccgaacaggatctaattaccgaacagcagaagcttaacacgcgattgaaagaaattgaaaaagaa

SEQ ID NO: 81032 - DNA, 723 bp, Saccharomyces pastorianus
atggcgattgggtcaggggtgaagaccctagtcacagtactaatgtcagaatacaggcaagaagggcatttgggaaggagtctgaaaaagggtggcaatgtcttcttgaaaacgacaacgggagattttgtgaaattgggagttaaattaacttcagggacacaggcgatattggagaacaccgaggaactattcggtggtgttggttccaatggcagggtgtacgatgcatcgaaatttggctccgctgatggtgcagacagtgatactgcagctgtattagacttggatactttattcgaggaggatcagttagttggtagtaaatattccaggataagagatcatgagcccacggcagtagtcatcgatatgtcttcaccgggggatcacaacgaacccacaatagtgagtctgtacgcagatcagcccctcgacctgcccacgggtttgaaggaggcgtatagttcattagaaaagcatatgcatattgcgtacgatgcggtatggagggcaaagggacagatgaaggatgataaacggggagggccgagcgccgcagcagtttatgttgctagagctgcacctgtggcaattattcggccgttaattggggccactgaggcagtgtctaagactttacagggaatagctaatcaagtggataagacgcataacgagcaaatcaatgataagtacaagtccaatcggactgattcgtaa

SEQ ID NO: 81033 - DNA, 1452 bp, Saccharomyces pastorianus
atgcttcctacttctgtttcccggtccttgtatctcaagacgtttagaagccaccttttacgagcaccacaaattgttttaaaaagaatgtcctcttccatcgatatcagtaagatcaactcttggaacaaagagtttcaatccgacttaacccatcaattggcaaccactgtccttaagaattataatgccgatgatgcactgttgaacaagactagactgcaaaagcaagataacagggttttcaacactgttgtctctactgattccactccagtcaccaaccaaaaaagctctggtagatgttggttgtttgccgctaccaatcaactgcgcttgaatgttctttctgaattgaacttaaaagaattcgaactgtcccaagcttacttgttcttttacgataagttggaaaaggccaactatttcttggaccaaatcgtctcctcggctgatcaagacatcgactcacgtctcgtgcaatacttgttagcagctccaacagaagacggtggccaatacagcatgtttttgaacctagtcaagaagtatggccttatccccaaagatttatacggggatctaccttattctactactgcgtccagaaaatggaattctctgttgactactaaactgagagaatttgccgagactctaagaacagctttgaaagagcgttctgccgatgattccataattgtcactctgagagagcaaatgcaaagagaaatcttcaggttgatgtcgttgttcatggacatacctccagtgcaaccaaacgagcaattcacttgggaatacgttgacaaagacaagaaaatccacactatcaaatcgactccgttagaatttgcctccaaatacgcaaaattggacccttccacgccagtctcattgatcaatgatccaagacacccatatggtaaattaattaagatcgatcgtttaggaaacgtccttggcggagatgccgtgatttacttaaatgttgacaatgaaacactatctaaattggttgttaagagattacaaaataacaaagctgtcttttttggatctcacactccaaagttcatggacaagaaaactggtgtcatggatattgaattgtggaactatcctgccatcggctataatttacctcagcaaaaggcatcgcgtattagataccatgaaagtttgatgactcatgctatgttgatcactggctgccacgtcgatgaaacgtctaaattaccacttcgctaccgcgttgaaaattcctggggtaaagactccggtaaagacggattatacgtgatgactcaaaagtacttcgaggagtactgctttcaaattgtggtcgatatcaatgaattgccaaaagagctggcttcaaaattcacctcaggtaaggaagagccgattgtcttgcccatctgggacccaatgggtgctttggccaaataa

SEQ ID NO: 81034 - DNA, 273 bp, Saccharomyces pastorianus
atgcacagtcttgtatacatggttggccatcttttggtttggatgctagtgggtacaatagtcttatcactcgatattatatttcctgctcttgtgacggaaccgcacctactgcatctcttaagtttcccatcggatatttctgatacactcagtttgtcacaggttacatcgtcgtacagtaatttgctaaaagatttggaggttctattttttatgggtagtttatctgtatcaataattaatccctcttctaatggttgcaataaatga

SEQ ID NO: 81035 - DNA, 129 bp, Saccharomyces pastorianus
atgcgtacccttggtattctagaagaaagaaattccagacactgtcactctcatttctttttattaagtcgagaagtgaaatgtttaaaacaattctatacaaaactatgctatagtactaataattag

SEQ ID NO: 81036 - DNA, 1362 bp, Saccharomyces pastorianus
atggaatttaaactacatcgtgaaattgcaggcagcttggcattgcaaatcgcaaatatttggattattttccaattgtttaatccgggctggttccatgcatctgtggaattattgccttctgccgttgccatgttgttgtatgtaggtgccaccagacactctctacgctatctgtccactgggtctacttctaactttacgaaaagtttagcgtacaatttcctggctagtacactaggctggccatttgttttaattttaagcttgccattatgtttacattaccttttcaaccatagaattatttctaccatcagaaccgcattcgactgctgtttgatattttcattgactgcatttgctgtgattgtcactgacagtatattttacgggaagcttgctcctgtatcatggaacatcttattttacaatgtcattaatgcaagtgaggaatctggcccaaatattttcggggttgagccatggtactactatccactaaatttgttactgaatttcccactgcctgtgctagttttagctattttgggaattttccatttgagattatggccattatgggcatcattattcacatggattgccgttttcactcaacaacctcacaaagaggaaagatttctctatccaatttacgggttaataactttgagtgcaagtatcgccttttacaaagtgttgaatctattcaatagaaagccgattcttaaaaaaggtataaagttgtcagttttattaattgttgcaggccaggcaatgtcacggatagtggctttggtgaacaattacacagctcctatagccgtctacgagcaattttcttcactaaatcaaggtggtgtgaaggcaccggtagtgaatgtatgtacgggacgtgaatggtatcacttcccaagttctttcctgctgccagataatcataggctaaaatttgttaaatctggatttgatggtcttcttccaggtgattttccagagagtggttctattttcaaaaagattagaactttacctaagggaatgaataacaagaatatatatgataccggtaaagagtggccgatcactagatgtgattattttattgacatcgtcgccccaataaatttaacaaaagacgttttcaaccctctacatctgatggataactggaataagctggcatgtgctgcattcatcgacggtgaaaattctaagattttgggtagagcattttacgtaccggagccaatcaaccgaatcatgcaaatagttttaccaaaacaatggaatcaaatgtacggtgttcgttacattgattactgtttgtttgaaaaaccaactgagactactaattga

SEQ ID NO: 81037 - DNA, 705 bp, Saccharomyces pastorianus
atgatattgctgggtgactttattcacaagggcccggactcagacaaggtcgtgtcgtatattctaaatcacaaggatcaagtcaagtgcgttttgggcaatcatgaaatattggtcatgatggcctatttaaacccagacttctcgaaatgggtaagacgccccaaattaatgacacctttaactttcagtacggagactaatttcataccacaagacatctctaaaatcagcaacgcacatggacggttagctcgcgaacttgggttttccaaattaagtcagctagcggaacattgttctatggccatagaactagatctggatattaccggtgatatactctttggtgcacatgcagggatggttccgggagacttcatgaagcccaaccaaattccgggcgtgagctctctgtcaaacatgaagtacgttgataagaagaactggtcaaaaacatcacgtgaaaaggaaaacaagaattatgtgagatggtacacactgtgggacaaatacggagaccactttagtaacgccaaagtattttacgggcacgatgcatccatgggactaaacctacggagacagaccaaaggtttggacacagcatgtataaagaacaatctgctttcatctatgaaagtgaagtacgatattaagaaggggcaatatgactatgaattaattcaagtacaatgctcttaa

SEQ ID NO: 81038 - DNA, 366 bp, Saccharomyces pastorianus
atggaagataagcggaaaagacgagccgctacacttagtacagcattgatattatttgtggcatgctgcgtttatacactatatatattcaagtttgataaccctcggttgtctccaccagtttccttattgcctacaattagcaccttgaagaaaattgagcatgtaacagatttaaataaggagtacgtttttgttggtgacgttcatggtaactatgatgagttcatagaactcattgatgacaagattggaggactaggagaaaatataacaatgatattgctgggtgactttattcacaagggcccggactcagacaaggtcggtcgtaattctaaatcccacggatcagtcagtgcgttt

SEQ ID NO: 81039 - DNA, 1413 bp, Saccharomyces pastorianus
atgttaaaatttaaggacttagataagtgtattcaattcaggtttgcttgggttaaatgtttatggatgactttgaacaaagaaacgtggaccgacgttcctgaaaaggagaaagattatattttagattcatcatccgtgccattggaaaagcaatttgatgacattttacacatagatgacagatcaaatgaggaaagagataaagaatcaagcgaaagtgaaaatgatagcgaagatgaggatgacgaaaacgatcactccaaaagaatcatttcatctgaagcctttgaagaacctaggcgtgcgacttccaaaggaaatagttcattgactgtcgcctttaggaacaacaggtcatatgttacaagagataacagaattggtgtgttcaaaacggatgatgaagacgattctctagaatttgtagctgccataaagaatatttctaatttaggtggtaaaagcattgatcctcataagccaatgttgtatatggaagatcgtaatttaattttgactgatggcgaaaatgagaacaaactttataagatggatatagaaagaggaaaggtgattgaagaatggtctactggtgacaagaatgttgttcaatatggtccaaccaaaaaattcgatcaaatgacgcctgaacaaacaattgttggcgtttcacagaaaggtgtctttaaaattgatcctagaattaacggaaaaaataaaatagccgtcgatgaatcaaaagattacgtgggtaaatataactttagctctattggaacaacagagagtggttatattgctattgggtcagaaaaaggtgacataaaactatatgataggctcggtattagggcaaaaactgctataccttcactaggccaagcaatcaagtttattactacctctgctgacggtaaatggttattggcgacttgcgagagtactctgcttcttatggatttgaaaattaaggatggaaaaaatgctggcaacattggatttctgaagtcgttcccagccagtgaaaatgttaaaacatatgtattaaaaatacgaccagaacattcggcatcaatcttaacgtacacaaaaaaaccaatccgatttacgaaggcttattttaataccggtataggccggcaagaacaaactattgttacatcgacgggtccttatgcgatttcttggtcattaaagggcattttaaatcaagatggtagtaataattatccttacagaatccgtaggtacaatgctgatgttgttgctgataattttgaatttggttcagacaaaaaggttatcgttgccttgaaagacgatgtctctctatcgaaagtgaaatcctttaaacagccaagcaaaggagtcttgatgccaagtgcttccctccaagatttttatggctaa

SEQ ID NO: 81040 - DNA, 813 bp, Saccharomyces pastorianus
atgaacattttgaagaagtttatggagtctggtaacaagccagagctcatcacgataccttctgggcagtttaatcttttgaggtctaagaattcccctaaagctgctttagaatgtatttacaacaatgcaactttaagcgtacgtaaaataggcaaatttgattatgagttggcggtttatagggtagaggacgatagtgaaggaggcacgggagatgaggctgagaattttgaagacgacaccatcagtgttttatccacacagtctaaaaagaaagaagaggagtggagcgttgaaatatcggataaaatcatgtttcacaaaacatgggataaacaaggaaacgtggcgcttgtgtgggagaacttaagaggtgatgaacaagatgaaaaggttcaatttgttgttgccgctgatgtgtcgttttctgatgttgaacagtttatccaaactgtttaccgatgccaattcgaagtaaggaataaaaaatcctctctcactgcctcagcagatgacttaaaggaaatagagcatagatcaaccaggctctttgttcaagatgatgatgacgagttagattcaagctcagatgactttcaagatgctaaagacacctcttttgagcacgagaaggaaagtgaaatattggaaagaactccttctccattgaaaaaagttccagaaggggaatattgttgtttagtgatgtctagcctatacatgtatgatccaattcaagaaaaatttattctgcaggagcccgtggtaaaggtagcaattattgatacaggcaagtacgaatttggctag

SEQ ID NO: 81041 - DNA, 237 bp, Saccharomyces pastorianus
atgtgcttcgttgaattcgatgatgtcagttttgcaaccagagcgttagctgaattgtatggtagacagttacctcgctccactgtgagcagtaagggaggtatcagattaagcttttcaaaaaacccactgggtgttaggggcccaaacagcagaagaggaggcagtggtaacccaaatcctaatgtaaatatgctttccagttacaattctaatgttggtcatataaaaaactaa

SEQ ID NO: 81042 - DNA, 804 bp, Saccharomyces pastorianus
atgctagtagggctctcatcatatctatctgacggaccacaagaagctattcaagcagtgatcgatgttagaattcctaaaagacttgttgaattactgagccatgaatcgactttagtccagactcctgctttaagagctgtaggtaatatagtcactggtaatgacttacagactcaggtcgttataaatgctggtgtcttacctgcgttaagacttctgctaagctctccaaaagaaaatatcaagaaagaagcgtgttggaccatttccaatattacggctggtaatactgaacaaattcaagcggtaattgacgcgaacttgattcctccattagttaaacttttggaagttgcagaatataaaactaaaaaagaagcttgttgggctatttctaatgcctcttcaggtggtttacaaagaccagatatcataagatatttagtatctcaaggctgtataaaaccattgtgtgatttgctagaaattgctgacaacagaataattgaagttaccttagatgctcttgaaaatattttaaagatgggtgaagctgacaaagaagctcgtggtttgaatatcaatgaaaatgccgattttatcgaaaaggctggtggtatggaaaagattttcaactgtcaacaaaatgaaaatgacaagatttatgaaaaagcatacaaaatcattgaaacctactttggtgaagaagaagacgccgtagacgaaactatggctccacaaaatgccggtaatactttcggctttggttctaatgtcaaccaacaattcaattttaactaa

SEQ ID NO: 81043 - DNA, 822 bp, Saccharomyces pastorianus
atggataatggtacagattcttccacgagcaagttcgttcccgaatatagacgaacaaactttaagaataaaggcagattctctgcagatgaacttcgtcgtcgtagagatacacaacaggtcgaattaagaaaagcaaaaagagatgaagctttggccaaaagaagaaactttattcccccaactgatggcgctgattctgatgaagaagatgagagctccgtttctgcggaccaacaattttacagccagttgcagcaagaactaccacaaatgactcagcaacttaactctgatgatatgcaagagcaattgagtgctactgttaagtttagacaaattttgtctagagaacatcgccctccaattgatgtcgtcattcaagccggtgttgttccaagattagtagaatttatgcgtgaaaaccaacctgaaatgttacaattggaggctgcttgggctttgactaacatcgcatcaggtacatctgctcaaacaaaagtggttgttgatgctgacgctgtacctcttttcattcaactattatataccggctccgttgaagttaaagaacaagccatttgggctttaggtaacgttgcaggtgattcaactgactacagagactacgttttacaatgtaatgccatggagccaattttgggtctttttaactccaataaaccatctttgatcaggaccgctacgtggactttatccaatttatgcaggggtaaaaaaccacaaccagattggtcagtggtctcaccagcgttgcccaccttagcgaaattaatctattcgatggatactgaaacttaa

SEQ ID NO: 81044 - DNA, 552 bp, Saccharomyces pastorianus
atgggagggcaagctctctcaagaggatctctattgtgtggcagttatgcgaatgaaatgtttcaggtagactgccgtcatcaacgactagagagactgaactacacccgcacagttgcaggtgggattgtacaaatccttacaagcgataacgggcgttacgtgtacgttgtcagacgcaacagtgacgcgattagtatttacgatcggcgaaacctgcagcacgagcttaacgtattgcgcctaccgtttcggatccaccacaactctgcaaagttgaaggcatatatagatacggcttacggactaagtatggggacgccgcagggaacaatattgaactggggtcgagaccttgtggaatttggaggtgttccctcacacaatagtgttgaagacccactaatcacgtctatcccgccagagtcagagtggcgcactaaccttgattctactattcctgccacggtagtgaagaattgtcctggggatcccgaactgttcgccctatctcatgggggcacaatttcattatgcaggttcggcggctaa

SEQ ID NO: 81045 - DNA, 555 bp, Saccharomyces pastorianus
atggtacaagggcattatgagtccttgaatagaaaaaatgatgaaagaatgaatgcaattccgtattgcgacactggcgaagtgttcgaggctgagacgatagcgaatgtatggaaaagagaagataaggaatggttaaaaaggactcaaagtgatcgaagtggatacgagtatccacgactaggagaatcaccatatatcaatatgacagaggacttcagaatggaaaagaaggtaatatgtcaagatatcttttggtcatgtgatggtacatcgtttgtttctgtgcataatgattttggcatcagacaatatttagtgccggaggaaggtaatacggacaagctaaacagaaacctccttctaccatttactaggttttttagaaaccagtctattgtttcatgtgcaatagacccgttttactcgctttataacgagaattccgacaggttagctggtgacagaatcgtggttggaggaaaaaatttccctctacaactatactctttgatggacgggcagtgtatcctcagctatgacacgatgaactaa

SEQ ID NO: 81046 - DNA, 261 bp, Saccharomyces pastorianus
atggagataaaaatattcgagaacaaaaacagcaaccacaccataataatagtacagatagtactcttccgaaaggaagcttacagcaggagaaggaagatctcaatatcaaacccacaaaaaagggacaaaagacaaaattcacgagcatcaaaaagcaaaggtagtaaaattgcctcaaataatcatcacaacaagcaagctaaaccaaagacgagaaacgacaagaagaaaaagaagtcaaagtgtgtaatactttaa

SEQ ID NO: 81047 - DNA, 900 bp, Saccharomyces pastorianus
atgaggtctattaaatgtgtgataattggtgatggtgcagtaggtaaaacgtcacttctaatatcatatactaccaattcgttcccaacagactatgttccaacggtttttgataattattctactacgatagctatcccgaacggaactgcgagtagccccctagagcttgacaatggtaatgataaaagaggttcgctttcatctgccagttctttaccaagtacggacagaaaactatataaaatcaatttatgggacactgcaggacaggaagattacgatcgtttaagaccgttatgttatccccaaacagatatttttttaatatgtttctcagtaagcgaacatgctagttttgccaatgtcacagaaaaatatctacctgaactgaagcagacttccaatattgaaggtacctctctttatactaagttagggaagtatccaattctattggtaggtaccaaaagtgacctaagagatgatccggcaactcagaaaaaattgcaggaagcaaactccgattacgtgtctcaagaggaaatagatgaactcgtacaaagatgtgggtttatgggctataccgaatgttcagctgctaccaaagcaggtgtccgggaagtctttgagcaggcggtgaggtacgctatctacgaaccagaatcccctaaccaaaaatcagcaaatcatactctaactgatgaattaacgactgcaacaaccaacaccaatggagataaaaatattcgagaacaaaaacagcaaccacaccataataatagtacagatagtactcttccgaaaggaagcttacagcaggagaaggaagatctcaatatcaaacccacaaaaaagggacaaaagacaaaattcacgagcatcaaaaagcaaaggtag

SEQ ID NO: 81048 - DNA, 432 bp, Saccharomyces pastorianus
atgcatggttactttccactggaaataaatttcactaaggactactcagcttctgatttttttagtggcggtacaattatttatatacaaagaaaatccgaaagtgttttcgagaacaaagcctcttttaggaacgtagaagatattcatgtggcactcaaaagaaaggcagcagaatctaaaaattattcaagattaaacctaaaaaatgaacaaggaaataccacctcttcgcaactggttgaaagtttgggtattcaagatttgacaatggtagaactcgatactcttttgagtgcaggaaataatacagcattaacagattcagaatcttataatttaggtttgctgtgttcagataaaaacagtggagatattttggattgccaactcgaattgtggtacaaaagctttggaccacatgatgaataa

SEQ ID NO: 81049 - DNA, 156 bp, Saccharomyces pastorianus
atgcctgtagagcctcggtgccttgttataaaggacatttccactggtgacgcagtaaacaacgttcctattgaattggtggtcgaggaagacgtcgaaaaagaagaagtaataagagagatgtctacaccttgcctgcttcctgatttctcctaa

SEQ ID NO: 81050 - DNA, 165 bp, Saccharomyces pastorianus
atgaccattacggtaagtttatttcgaccaaatcttgcactgggttttcttttccttgggtctggacaatacgctctcaatacttctactttagaatctatcgctttcttaagcatgtccgttttacccacatatacaacgtccacatcccttagcaagaattga

SEQ ID NO: 81051 - DNA, 1362 bp, Saccharomyces pastorianus
atgagttcaagtatgaagggtagtatggactctaaactaatcaaagttattagtgtacacctagtggcctttctcccaagcggatctagcgatttgaatatagatctaaaactacaaactgctggtattatagggatgggtatgttatatttaaactcaaggcataaacgaatgagcgattcaatttttgcccagctggtgtcactgctcaatgtaaatgatgaaatggttgctgacgaagaatatcgattagcagcgggtatatcgctgggcctcataaacctaggggctggtcagacgaaactgagaaagtgggattcatcattgttgggcttgggggacgatcttccggaagatgtttatgactctagtgatgttgaacaaaatgtaatgtatgaagacctgactacgaagttattagagatcgtcacaagcacatacgatgtagaaaacgattggataccagagaattcgcaaattggagcagtaattgcaatcatgtttttatttttgaagtcaaacaattttggaatttccaacatgcttaaagttgacttaaaggaaatattaaaagcaaatattaacacccgccctgaattattaatgtaccgagaatgggcatccaatatgattttatgggaatttataggcgacgacctatcgttcatcatgaaagatgttgatattggagtaaaatttagtgaacttaataccgatttgcttcctatatattacactatggcgggtaggatcttagccatgggtattagatttgcctctactggaaatttgaaaattcggaatatactactttctctcgttgataagtttctgcctctttatcagtacccaggaaagcagaatctagactttaggttgacaatttctgttattaacgttttaactaatgtcatcgttgtttctttgagcatggttatgtgtgccagtggcgatttagaagttttgaggagggtcaaatatcttcatgaagttgtatctggtccatattcagacttatttcaagaaattcctagttctaaaagtgatgtttcaggtgtaacacaggtgacttcaaacactaacacacctggaaatagtgatcgtgaaagggttgatgagaccgctgcttctctcgatgacgaaaggtcctcaaatggcagtgatattagtgatccaacagcatatttagaagacaaaaaggatatagatgaccattacggtaagtttatttcgaccaaatcttgcactgggttttcttttccttgggtctggacaatacgctctcaatacttctactttagaatctatcgctttcttaagcatgtccgttttacccacatatacaacgtccacatcccttag

SEQ ID NO: 81052 - DNA, 2667 bp, Saccharomyces pastorianus
atgacttctaagccgtctactagaaatgattatttaccaagggaaactcacaatggcgaatatactggtgattctcccggatggcagttgcaggttaatatcacaaacaaaataggtggtataaatggagatatttggttgtcaagggacggaaggagtgttaaatggtgtattgaagaccagtacttacgtcagtttacttataatcaaaagatcatcaaagctgggtacattgattttgaaaagacaccagattgttttgtggtagttctctctgatattgcgcatgtatatatgttgaaaaatgggggttctacgactgtatgtttcccattccagataggtaatgcattctggtatgcaaatggagtaattttagagagagagacttcagcgtccttcatggatggtggctacgatttaaaacccattgagttcgatttaaaacataaatacatcactttgacggatccgatggcgcctttcggcttgatttcaatcacaaatacctttaaaggcggtataaatagcgcttcaggtaacaaaacggatatcctgcaagactttcagctcgtgctcttcccgagtgacaaggacaagtgtatagctgtttttttagatcgaaattccaaagtgttgcgattttattacagtagaattctatcatcagatcagtcacggaagggagagctaacaatttcctcgaccaaaaaaacaggtttggacgcagcaggcaatagtcaaaagagtggcgggattagcaaagatttgcgtaagttttcacatttgacgcgccggtcgacgtctataaactctaactctcatgatttcaatgcagccgaaagagtacttagtggcaatgttggcaacgcttcaggcagaacagatattttcgctttaccttcttcttgttcaagaagaagcttatctgcgaccctagatagaatggggaacaatattgccccgaccaatagagctacaccttctggattttttgactcgtcatcagcaaatactgctactcactctaatattactcctgtatcacaaccaatgcaacagcaacagcaagaatatttgaaccaaacagcgacctcttctaaggatattgttttgacggaaatatcgtctttgaaattaccggatgatatcatttttacttcacgacgcttgagctctattttaagtaaattaaagttcctatcgttgagatttgaacgtcgagaaggacttttaatatttcatgagcccacacatttctgcaaaatctggttgattgatcttttacccgatgttctggattctattccattcaaaatatacgggaactctccgcaaaacatgatcagactagagaacttaaagcttaaggaaccctcaagaatacaagctatgtatattcatgaactccttgaaagttgcctgattttggtgtcggagggacagaataaggaagaatacaaagcatgtctatatgaccccttcgttaaaattacatccccttccaaaaatatctccgaagagctcactaaacaaaattctcttccttccttacagaaactattcccttatcccgagactagtttcaccaaactgtgcttcgaagccgtcaagtatattacttctcctgcattcaatatttcatttatatttctatggcaatctgcatattcgatgcttctttcaagggctaacgacgtagttgggggtttgaaaatggagcacgatgctttttcactggttctttcattgctgattttaccgatacctagctcctctgctcaagaataccaggagtacaaagaaatatatgaacgcgacctgtttcagcatttaaagcaggactcagaaataacaagctctgtgctaccaagaattgttattggattgcatttaataagggaggaatattccctgaatgtattgtgtcgaaatgagcatgcgttgttaggacagtttctaagattcgctactgccgcgatgggctggcctgatctgtggcaatcttactatgtaccgaaaatggattcagaatcgaaaactttcctacatccaagggaacaaaattccactttttttcatcccttagatgaaccgccatcgattaccaagtcgttatacagcataactgaaaacagttcaataccattatgtccgttcattagtttctcgagacttgttgcaaccgatacacaggtcgaattacgcattactccaagaagtttcaaaatcttgggcttgtatgaactcgtacactctccaaattttttaccggattatgttttaggcatcctttccagctttaaagtggataaagacgagttacaaacatatcccttaggcattttggtgcctttacaaaacattttaaaaattctggaagataagctatctgaagtaagagacaacttggagttattagatagggccgatttacaaaggtgtagtgccattatcaatagtataagaagtgattctaaagaagttctcaaaagaggccaaagagatagttatatgttatacaaagtgccactcgccaagaatagaagctctttgtctaagaagcccagtgacatatattcaatattatccgagattgtgaaaagtgcaagtcaagttccactggatggatcagactatgcaggatgtcgcaatattcaggcatga

SEQ ID NO: 81053 - DNA, 372 bp, Saccharomyces pastorianus
atgtcagtattatcaaacatgaagcaattgatatgtgaaacgaatttttaccgaaggggaggcaaaaacccaagggacgacatggatggccaagaagacagcttcaataaggacactaacgttgtcaaaagcgaaaatgcgggctgtccttccgttaattcaagaccaataattctagataaaaaatactcactgaactctggagcaaatatcagcaaaagtaacacaactactaataatgtgggaaatagtgcacagaatataatcaattcatgctactctgttactaatccattggtaataaatgcaaattccgatacccatgatactaataagcatgatgtactatccactctacctcacaataattga

SEQ ID NO: 81054 - DNA, 1236 bp, Saccharomyces pastorianus
atgtcaagcgaggaacgctcgagacaaccaagtactgtttcaactttcgatttagaacccaatccttttgaacaaagcttcgcctcttccaagaaggctttgtcacttccaggcacgatctcccatccgtctctaccaaaagagccttcacgaaacaattctacctcaacgataacacaacattcccaacgttccactcatagtttgaacagtattccagaagaaaatgggaattcaaccgttacagataatagtaatcataatgacgtaaaaaaagactcacctagttttttaccaggccaacaaagacctactataatatctccgcctattctcacacctggtgggtcgaaaagattaccacctctactcctttctccctctattttatatcaggcaaattcaactacgaatcccagtcagaattcacattctgtttcagtctctaattcaaaccctagtgcaataggcgtttcttctacctccggatctctgtatccaaacagctcttctccttcagggacttcacttatacgccagccacgaaactcgaacgtgaccacaagtaattctggtaacggcttccccacgaatgattcacaaatgcctggctttttattaaacttgtccaaatctgggttgacacctaatgagtccaatatcaggaccgggttgacacccggtattcttacgcaatcttacaattatcccgtattgccgtcaattaataaaaatactataacaggtagcaaaaatgtcaacaaaagtgtcacagtgaatggaagtattgaaaaccaccctcatgttaatataatgcacccaactgtaaatggtacaccacttacgccgggattgagttctctgctaaacttaccatctactggagttttggctaatccagtattcaaatcaacacctacaacaaataccacagatggtaccgtcaacaacagcatcagtaattccaatttttccccaaatacttcaacgaaagcggctgtcaaaatggataatccggcagagttcaatgccatcgagcactccgctcataatcacaaggagaatgaaaatttaacgactcaaattgagaacaatgaccagttcaataacgatacacgaaaaagaaagagaaggatgtctagcacaagttctacttctaaggcttcaagaaaaaattccatatcaagaaaaactcagcagttacgactgcaccagcacaaaaagatgatgttgtaa

SEQ ID NO: 81055 - DNA, 867 bp, Saccharomyces pastorianus
atggaaggaaaagctttatcaaatgcacggttagaagagctcaaagatgctcttcctaagatggactcgttgagtttggaagatgaacttgcgaaaatagatggccaaagtgcataccatattgattctgcagaggaaaaggaaacctttgaaagtaaaataggccaaatagcttctagaaatagtgcagacttcataatagaggaggacttgcaaaatattttagatgatgatcttaaagactcagaacttaacttggatggcgaagaagccgaaataattttcgattatgagagccaagaactggatacaccggatggtataggggaaaagatttctcaaatgatagaatcggtgttaccgggagggtttggaagtgaagaacagggggggttgcgaactgtaacaaatgtagaggatttagatgttgcagaagaagtcacagatatcgatcatgataccgttgacgcagctcgtttgcatggagacggtcaacattccatatcttctagaaagcacagcaggtcaaagaactcgaaaaagaatgggcatgtaaggcgacatgacttttatgacgaatctagagaccataaaagttgttgcccgcatcatcattatgaaaacttatccaaactacgaaactactattatcatgattttgaatatatttccaaaacggaaaaccgtgttccagatttctctgtcctagttaacgaatcaagtcccatgtgtttattttgcgagtactacatggtgtttggtgaaccaccacgtaacatgataaagtggtataatcgtacgtttggttacaatcgtatgccgaatccaccaagagatgaacaagatagtaggaaaaggaatagatag

SEQ ID NO: 81056 - DNA, 1572 bp, Saccharomyces pastorianus
atgcaaatacaacaacaacaacagcagcaacaacagcagcagcaatcacaatctcccgttcagagcggctttaataatggtaccatatcaaactatatgtactttgaaagacgaccagatttgttgactaaaggaacgcaagataaagcagcagctgtaaagttgaagattgagaacttttaccaatcctctgttaaatacgccattgaaagaaatgaaagaagagtggagttagaaacagaactaacttctcataattggtcagaagaaaggaaatctaggcaattgagttctttgggtaaaaaagagtcacaatttttaaggctgcgtagaacgagattatcgttagaagatttccacactgtgaaagtcattggaaaaggggcatttggtgaagtcagactggttcagaagaaagacaccggaaaaatatatgcaatgaaaactttattaaaatccgaaatgtacaaaaaggaccaattagcacacgtcaaggctgaaagggatgttctggctggaagtgattctccatgggtggtttcgctatattactcattccaagatgctcaatacttatatttaatcatggaatttttgcccggtggtgatttgatgaccatgctaatcaggtggcaactatttacagaggatgttactagattttacatggctgagtgtattttggccatcgaaaccattcataaattaggattcattcacagagatattaaaccagataatattttgatcgatattagaggtcatataaaattatctgatttcgggttgtctacggggttccataaaactcacgactcaaactactataaaaagcttttgcaacaagatgaggcaactaatggtatttccaagccaggtacttacaatgcaaatacaaccgatactgcaaataaaaggcaaacaatggttgtggattctattagtctaacaatgtcaaacaggcaacaaattcagacatggagaaaatcacgtcgtttaatggcatattctaccgtaggtacaccagattatattgctcctgaaatatttttataccaaggttatgggcaagagtgtgattggtggtcacttggagcaattatgtacgagtgtctgattggttggcctccattctgttccgaaactccacaggaaacgtacagaaaaatcatgaattttgagcaaactctacaatttcctgatgatattcatatctcttatgaagccgaagatctaatccgtcgactattaactcatgcagaccaaagacttggtagacatggtggtgcagatgaaataaaaagtcatccattttttcgcggtgttgattggaatacaatcagacaagtagaagcaccgtatataccaaagttgagctccatcaccgatactaggttcttcccaaccgatgagttggagaatgttccagattccccagctatggcacaagctgccaaacaaagggaacagatgacaaagcaaggtggaagtgcgccagtcaaggaagatttaccttttattggctacacttactccagatttgactatttgacaagaaaaaatgcgttgtag

SEQ ID NO: 81057 - DNA, 537 bp, Saccharomyces pastorianus
  modified_base (498)..(498): a, c, g, t, unknown, or other
atgtataatagcagcagcaatcatcatgagggtgcacctacttcaggacatggctattatatgtcccaacaacaagaccaacagcatcaacaacaacaatacgccaacgaaatgaatccgtatcagcaaattcctagaccgcctgctgcaggatttagtagcaactacatgaaagagcaaggctctcatcaatcgttacaagagcatttacaacgtgagacaggtaaccttggcagcggttttacagacgttccagccctgaattatccagccacaccaccaccgcataataattacgcagcttcaaatcagatgatcaataccccaccgccgtcgatgggtggtctttatagacataataataattcccagagcatggttcagaacgataatgggagtgggaatgcacaattaccccaattatcaccgggccaatattctatagagtcagagtacaatcaaaatttaaatggcagttcttctagtagtccgttccancaaccgcaaacgctacggagcaatgggtcatattcaagc

SEQ ID NO: 81058 - DNA, 564 bp, Saccharomyces pastorianus
atgaagctgaatggtggccgtggttgggatttgtcgataaacaaaaagccgaacttacatggttatggtcacccaaatccaccaaatgaaaaatcaaaaaggcatagaagtaaaaaccatcaatattcatcacccgatcatcaccatcattacaatcaacagcaacaacaacagcaggctcaggctcaagcacaggctcaagcacaagccaaagtgcagcaacaacaattgcaacaagcccaggcccagcaacaggccaatcgttatcaattacaaccatatgactcgcactatgacgaagaaagagaggcgtcgaagcttgatccaacttcgtatgaagcatatcagcaacaaactcaacaaaaatatgctcagcaacaacaaaagcaaatgcaacagaaatccaaacagtttgccaatacaggtgccaatggtcaaactaacaagtatccatataatgcgcaaccaacggcgaacgacgaacaaaacgctaaaaacgcagcgcaagatagaaatagtaacaaatcatcgaaaggttttttcagtaagctaggatgctgttag

SEQ ID NO: 81059 - DNA, 927 bp, Saccharomyces pastorianus
atgtctcaagtgcaaagtcctttgacagcaacgaactctggtttagctgtcaataataacacaatgaactcacaaatgcctaaccgtagcaatgttagattggtcaatggtactttacccccatccttacatattagctctaacctaaatcacaacactggcaatagctctgcctcctattctggctcacaatcacgcgacgattccactatagtcgggctgcactataagataggtaagaaaatcggtgaaggttcatttggtgtactttttgaaggtacaaacatgatcaatggattaccagttgctatcaagtttgaaccaagaaaaacagaagccccacagctaaaggacgaatatcggacctataaaattttagcgggaacacctggtataccacaagaatactactttggtcaggaaggattacataacatattggttattgatctgcttggtccttctttagaagatttattcgattggtgtggaagaagattttcggtaaaaactgttgtacaagtcgcagtacaaatgataactttaattgaagatttgcacgctcatgatttgatataccgtgatattaaacctgataattttttgatcggaagaccgggtcaaccagatgctaacaaagttcatctaattgactttggtatggccaaacaatatcgtgatccaaaaactaaacaacatattccgtacagggaaaagaaatcattaagtggcacagcaagatacatgtcgataaatacacatttgggtagagaacaatcgagaagagatgatatggaagctatgggtcatgtcttcttttatttcttgagaggccacttaccctggcagggtttaaaagctccaaacaataagcaaaaatacgaaaagatggtgaaaagaaaagatctactaacgtttacgatctag

SEQ ID NO: 81060 - DNA, 222 bp, Saccharomyces pastorianus
atgggtggtaaattagttataggtgtcctaaaaggctatgatcaactgatgaacttggtacttgatgatacagtagaatatatgtctaatcctgatgatgaaaacaacactgaactgatttctaaaaacgcaagaaagctaggtttgaccgtcataagaggtactattttggtctctttaagttccgccgaaggttctgatgtactatatatgcaaaaatag

SEQ ID NO: 81061 - DNA, 105 bp, Saccharomyces pastorianus
atgactattacaaagccaggaatgatttcgatggccgacatgaattacgtcgtttccaagaacagaagcttaaaccgtcctgctgagcggggcgataatcggtga

SEQ ID NO: 81062 - DNA, 195 bp, Saccharomyces pastorianus
ggtaaacccgtaaaccccggaaaaaaaaccccaagatttttttttgttattgggaaaaaaaaaaaaaaaaaaaaaaaagatgtcttatcttatctttcttatcttaaagacctaccatttgttccttttctattttggcagcccgggtattcgcaaagggaaaaaacccaagacagcattccttgttcattatga

SEQ ID NO: 81063 - DNA, 1293 bp, Saccharomyces pastorianus
atgatggcttccgccgtgtgtattttccaatggtttttctggggatactcattagctttctcacacaacactagaggtaacggttttattggtaccttggaattctttgggtttcgtaacgttttaggagccccatctagtgtcagttctcttcccgatatactgtttgccgtttaccaaggtatgtttgccgcagtcaccggtgccctaatgctaggtggtgcctgcgagagggcaaggttgtttcctatgatggtgttcttgtttttatggatgactattgtttattgtcctattgcatgctgggtctggaatgccgagggttggttggtcaaattgggtagcttggactatgcaggtggtttatgtgtccatttaacatctggacatggtggtctagtttacgctttgatactgggtaagcgtaatgaccctgttacacgtaaagggatgcccaagtacaaaccacattccgtcacctcggtggttttaggcacagtgttcttatggtttggttggatgttctttaacggaggctctgcaggtaatgcaactatacgagcatggtactctattatgtccacaaacttagctgctgcttgcggtggcttgacatggatggttatcgattatttcagatgcggaagaaagtggactacagttggtttgtgttcaggtatcatcgctggcctagtgggtatcaccccagccgccgggttcgtgccaatctggtcagccgttgtcattggtgtggttactggtgcaggatgtaaccttgctgttgacttaaagagtctattgcgcatcgatgatggtctagattgttactctatccatggtgtgggtgcttgtattggttgtgtattaactggtatctttgctgcagactatgtaaatgccactgcaggctcttacattagtccaattgatggtggctggatcaatcatcactataaacaagttggttatcaattagcaggtatgtgcgctgcactagcctggactgttactgtcacatctatcttgcttctaactatgaatgccattccatttttaaaactaagattaagtgctgatgaggaagaattaggtaccgacgctgctcaaattggtgaatttacatacgaggaatccactgcttacatcccagaaccaatcagatctaaaacatcggcacaaatgccacctcctcatgaaaacattgatgataagattgtgggtaacacagacgcagaaaagaattctacgccttccgacgcttcttctactaagaacactgaccatatagtataa

SEQ ID NO: 81064 - DNA, 2562 bp, Saccharomyces pastorianus
atggatatctcaaatataatcacctatattttaaagacgttgcataatgggaatatcatagcagtttctatcctaaaggaattaattattacagtcgggggcattagagacttaaacgaagttaatatgaagcaactattaatgttaaactcaggatcaccattaaagcaatatgcaagacatctcatatatgattttagagatgataattcggttatttcgtcgaggctaacctcatttttcactgatcagagcgctatttctgagattattctcctgttatacactttaaacctgaaagcaaatacgcaaaattctcattacaaaattttatccactagatgcgatgaaatgaatacattgttatggtcgtttattgagttaattaaacattgtttgaaagggaaagcatttgaagagaatgttctcccatttgtagaattgaataataggttccatttatcgacaccgtggactttccacatatggagagactacttggataatcaattgaactcaaatgagaatttttctattgatgaattaattgaaggtgcagagtttagcgatgttgatttaacgaaaatatcaaaggatcttttcactactttttggagactttcattatacgatatccatttcgataaatcactatatgacgagcgtaagaatgcactatccggagaaaacacaggccacatgtcaaatagaaaaaaacacctgattcagaatcaaatcaaggatattttggttactggaatttcgcatcaaagagccttcaagaaaacttcagaatttatatctgaaaaatcaaatgtctggaacaaagactgcggggaagatcaaattaagatattcttgcagaattgtgttgtgccaagggttttattttctccttcagatgctctcttctcttcgttttttatctttatggcttttagtacagaaaatttgatgtcgatattgaatacttgtattacatcaaatattttaaaaacgttgctgttctgttgtactagctctgaagcaggcaatttaggtctgtttttcactgacgttcttaaaaagcttggaaaaatgagattaaatggcgatttcaacgaccaagcttctcgaaagctttatgaatggcattcagtaattaccgagcaagtcattgaccttttatccgaaaaaaattacatgtcaattagaaacggtattgaattcatgaagcacgtcactagtgtcttccctgtagtgaaagctcatatccagttggtttacacaactttagaggaaaacttgataaatgaagaaagggaggatattaaactaccaagcagcgcattgattggccatttgaaagcgcgtttgaaggacgctttagaattggacgaattctgcaccttaactgaagaggaagctgaacaaaagagaatacgtgaaatggaattagaagagatcaaaaattatgaaacagcttgccaaaatgaacaaaagcaagtagctttaagaaagcagttagagcttaataagtcgcaaagacttcaaaatgatccacccaaaagtgttgcaagcggcagtgctggattaaatagcaaggatagatatacttattctcgtaatgagcctgtaatcccaacaaaaccttctagtagtcaatggtcatattccaaagtcaccaggcacttcgacgatataaaccattatttggccacgaaccatttacaaaaggcaatttccttagtagagaacgacgatgaaactcggaatttaaggaaattatctaagcaaaatatgccaatattcgactttagaaattcgactttggaaatattcgaaaggtactttaggacactcattcaaaatcctcaaaatccagattttgcagaaaaaattgattcgcttaaaaggcatatcaaaaatatctcgcgcgagccatacccagatacgactagctcatattctgaagcttctgctcctgaatataccaaaagatcaagtaggtacagcggaaatgctggaggcaaagatggttatggtagttccaactatagaggaccaagcaatgatcgttctgcacccaaaaatattaagccaatcagtagttatgcacataaaaggtcagaactaccaactagacctagtaaaagtaaaacatataatgatagaagtagggcacttagacccacaggtccggacaggggcgatggttttgatcaaagggataaccgcttacgtgaagagtataagaaaaacagttcacaacgttcacaattacggtttcctgaaaagccatttcaagagggcaaagacagcagcaaagccaacccttaccaagcttcatcttacaagcgcgactcgccttcagaaaatgaagaaaagccgaataaaagattcaagaaggatgaaacaattagaaacaaatttcaaacgcaagattatagaaatacacgagatagcggtgctgcccatagagccaatgaaaatcaaagatacaacggaaatagaaagagcaatactcaggcgcttccgcaaggtcccaagggtgggaattacgtcagtaggtaccagaggtaa

SEQ ID NO: 81065 - DNA, 1926 bp, Saccharomyces pastorianus
atgtttatcgccgtctcaagcactgttccaaatataaatgatctaacaaccatatcattatgtaaactaataccgtcgttgcatgaagaattgttcaaatttagttggatatcctctaagctgctcaacaaggaacaaaccaccttattaaggcatttgttaaaaaagtcaaaatacgaactgaagaaatataaccttttggtagaaaattcagtgggttatggtcaattggtagccttattaatattggcgtattatgatcccgacaatttttccaaagtgtccgcatatttgaaagaaatctatcatattatggggaaatattccttggattctattcgtactttagatgttattttgaacgtttctagtcagtttatcactgaagggtacaagttctttattgctcttttacgaaagtcggatttttggccatctagccatgtagctaacaattccaattattcttctcttaatgaaggcggtaatatgattgcagcaaacattatttcattcaatttatcgcaatataacgaagaagtcgataaggaaaactatgaacggtatatggatatgtgttgcattttactgaaaaatgggtttgtcaatttttattctatttgggataacgttaaaccagagatggaatttctacaagaatatattcaaaacttagaaactgaactggaagaggagtccactaaaggcgtagaaaatcccttggctatggcagctgctttgtccactgaaaatgaaactgacgaagacaacgcccttgttgtaaatgatgatgttaatatgaaggataaaatctctgaggaaacaaacgctgatatagaatcaaaaggcaagcagaaaactcggcaagatattttattatttggtaaaataaaactcttggaacgcttactcatacatggttgcgttattcccgtgatacatgtgttaaagcaatatccgaaagtgttatatgttagtgaatccttatctagatatttgggaagagtatttgaatatcttttaaatccattgtacacatcaatgacctcatctggtgaatcaaaagatatggcaactgctttgatgataacccgtatagataatggtattctagcccataagccaaggttgatccataaatataaaactcacgagccatttgaatcccttgaattgaattcaagctacgtcttctattacagcgagtggaattccaatttgactccttttgcttctgcaaatgatctatttgaaaactcgcatatctatttatctatcataggaccgtatttggggagaattcctacgcttttgagtaagatttcacgtattggggtagctgacattcaaaagaaccacggttctgagtctctgcatgttacgattgataagtggatagactatgtaagaaaattcatttttccagctacctcgctattgcagaacaatccaattgccacatcggaagtttacgaactaatgaaatttttcccttttgaaaaaagatattttatttacaacgaaatgatgacaaaattatcccaagatattctaccgcttaaggtgagcttcaataaggccgaaagagaagcgaagagtattttgaaggctttgagtatagatacaatcgcaaaagagtccaggagatttgccaaattaatctctacaaatccattggcctcactggtaccagcagttaagcagattgaaaactatgacaaagtttctgagcttgttgtttacaccacgaagtactttaacgattttgcgtatgatgtattgcaatttgtattattgttacgcttaacttataacaggcctgctgttcaatttgatggtgttaaccaggccatttggcccagagattatcaatatttattgcaggtttggccaaaagttgtcccaatatggatatctcaaatataa

SEQ ID NO: 81066 - DNA, 267 bp, Saccharomyces pastorianus
atggatgtcatcaaatccaacaagtttggcattcaagttaaccattccctacctcaaatctccattgataaatctgacggcggtaacatctatttatccaaagaatccttgaatactgaaatctacacttcgtgctcaactgctattaacgtcaacttaccaatcggcgaggacgatgattacgtagaattcccaatccctgaacagatgaagcatagcttcgctgatggtaagttcaaatctgctgttttcgaacatgctggttaa

SEQ ID NO: 81067 - DNA, 1050 bp, Saccharomyces pastorianus
atgcctgactctaagtacacaatgcaaggttataaccttgttaagctattaaaaaggctagaagaagccactgcaagattagaggatgtcaccatctatcaagaaggttatattcagaataaattggaggcatctaaaaataacaagccttccgaatccggggccgatgcgaatactacgaatgaaccttctgcagaaaatgctcctgaagtagaacaagatccgaaatgcataactgcgttccaatcttacatcggtgagaatattgatccgctggtagaattatcaggaaagatcgacacggtggtcttagatgctttgcagttgctaaagggaggctttcaatcgcaattaacttttttaggagctgctgtgagatcaagaaaaccggattattcttctcaaactttcgctgattctttaagacctatcaacgaaaatattataaagctgggtcaattgaaggaatcaaaccgtcaaagcaaatacttcgcatatttgagcgctttatctgagggtgctcctttgttctcctgggttgcagtggacactcccgtgtctatggtcacagatttcaaggacgcagcacagttttggactaatagaattttgaaagaatacagagagtctgatcctaatgctgttgaatgggttaagaaatttttggcctctttcgataatttgaaagcctacattaaagagtatcatactactggggtttcctggaaaaaagacggtatggattttgctgacgcgatggcacaatcaacgaagaatacgggtgctacttcatctccttcgccagcaagtgctacagcggctccagcaccaccacctcctccaccagccccaccagcttccgtctttgaaatctctaatgatacaccagcaacgagtagtgatgctaacaaaggcggtattggcgcggtcttcgccgaactaaatcagggtgaaaatatcactaagggtttgaaaaaagtagacaaatcccaacaaactcacaaaaatcctgaattacgaatcctctacagtttcttccacaggaagtaa

SEQ ID NO: 81068 - DNA, 1119 bp, Saccharomyces pastorianus
atgaagttggggaaggtatttactgcaaaagacatatgggataagttgagccaatcttacaatttagagaaaattgatgaaatggagaatacatattccttggaagccactacagagagttcacggaatggcaatggaaatggtgacgatgcagaaattcatgaagaaactttacttgaattgaataatcgaataagagtacgcaagcaagattttacattaccttgggaggaatacggtgagttgatcttagaaaatgcaagaaaaagtccaaactctaacgaagagtatcctcgagttgaagatatgaatgagaaagatagtacaattccaaaggaaagtctttctacagacctaaagaacgacaacaataaacaggaaaaaaatgcgacaattaaagtgaaagagttgcctgaatatcatacagaggaaaatgatagccccatagacgtccagaaagaacccattaaggaggtgcaaagcgatgaaaaggaactccagagggaacatatgagtgaagaagaacagaaaatgaaaagtacaaataaaacagcagctccagtaagaaaatctcaaaggttgaaaagaagtaaggaagttaaatttgaagatgaagaaaaggaagagatagaagaagataatacgaaagacgaagaacagaaagaaaagaaagaggagatccgggagccaaaaataacccacaatgaagaagtagataaggaaaaaaacgaaaacgaagaaggtgatgatgagcgtgaaaaatccacctcttatgaaaataccaatggctctgaaagcgaaggagttgaggaaggagttgacgaagaactgggatacgagtctgaacgtgaggcagaaggtaaaggaaaacaaattgaatcagaagggggcaacttaaagaaaaaaacggaaaacaaaaaaggagatgatcaacaggatgataccaaaaaggattctaaggacaaaaatgaaccattagcaaagagaaccaggcattcatcatccacaggtaatactagcaatgaaacctcgccgaaaaggaaaaggcggaaggcaggctctcgtaaaaatagccctcctgccacaagagtttccagcaggctacgaaataaaaaataa

SEQ ID NO: 81069 - DNA, 111 bp, Saccharomyces pastorianus
atggtagtacattggacaattgtggatgaaatacgacttcttagatgggcatctgaattcaaaccgggcggaatcataagcatttcacatgtttgcatagtggaaagatga

SEQ ID NO: 81070 - DNA, 1047 bp, Saccharomyces pastorianus
atggcacccaatttggtaacattatcagggttctgctttattatatttaatgtgttaacaacactttactacgacccgtattttgaccaggaatcgccacgttggacctatttctcctatgctataggtttgtttttataccagacttttgatgcttgcgatggaatgcatgcacgtcgtacaggccagcagggccctctaggggaattgtttgaccattgtattgattcaatcaacacaactttgtcaatgattcctgtctgttccatgacaggtatgggttacacatatatgaccattttttcacaatttgcgatattgtgcagcttttacttgagcacatgggaagagtatcacacccacaaactttatctagctgaattctgcggtcctgttgaaggtattattgttttgtgtatttctttcattgcagtcggaatttacggacctcaaaccatctggcacactaaagtagcgcaattctcctggcaagattttgtgtttgatgttgaaaccgttcatctaatgtatgcattttgcacaggagcattaatatttaatattgtcacagctcatacaaatgtcgtgaggtattacgaatcccaatcgaccaaatctgcaactccaagcaaaactgcagaaaatataagtaaagcagtaaatggtcttttgccattctttgcatacttctcttcaatttttaccttagtcttgattcaaccatcttttatttctttggctttaattttatcgattggtttttcggttgccttcgtagttggtcggatgattattgctcatttaaccatgcaaccattcccaatggtcaatttcccatttttaatcccaactatccaattggtattgtacgcatttatggtttacgttttagattaccaaaaagaaagcatagtttctgcattggtttggatgggactcggcttgacacttgctatccatggaatgttcatcaatgatattatctatgacatcactacctttctggatatttacgctttatcaattaaacatccaaaagaaatttag

SEQ ID NO: 81071 - DNA, 237 bp, Saccharomyces pastorianus
atgatatcgggggtttacctttatgaaaagctggagttaactgataattgggtaacagggaaggatatatcaggagagttgagcgatgcttgtggtcaagaaattgcactccgggccttgcttcaattttacaattttcaacactatgaaatatctatggaggaccttggatatggacactgtaatagttccagccaagatctgttaaacaaggaatccgagtatttgaatatttaa

SEQ ID NO: 81072 - DNA, 2628 bp, Saccharomyces pastorianus
atgaatgctagtggaagatctcattccaaaggccccattataaggtctgtgtctttagaagatcttaagagaaactctagtttcaaaggcaatctaaagtacaaagatgaagtcacttcacataaagaaccacaggtcggaacattgagcaacgaagaactgctaaaagatttggacaacatgttgcgcggtaaactgaacatgggaagaaacagttttcatgccgataaaagaaataaatcagatggaaatatcagtgccttaaccttcaaggcaagatcaggtcttgagggagatattcgtaccatagatatacagcaagatagtagtgatgaaaatgataattttaagttcagtgatgatggcgttaataaggatagaaataatgagaaagataataatactgataacgccgttgaatttcaagacgatgctgaagaagctgaagaggagaatgaggatgaatcatttgctaatgtagatgaactggatggctttgatttgaataaggtttctgatggcaagcatgttcctatcaatgaaaagggcgaagttgattataatatgccggtagataaagaatttcagaaatcacttgatcagtgcgcagcttcacttgaggaaagatcaagtgcaccttatgctttacaaagagcagtggactgggaattgaagatgttttattctttggaagatgaactgtcggaatggttttgcagctctgattatatgcattttggacagacacagactctgtttaaacagaaaattacgcaaccacaattattctttgatgatgaaaactatgctgcgagcgtagttgaatgtttaattgaagacatccccaattctttagcatctaatttactcgcattatcatatatttctatgggatgctttgcgtttacgaatagcaaaagtgagcatacaaagattatacgacgcaacaatttaatgcttgttcctcatattcaagaaattgttcatgccttcaagaagattgcaataagttgtagggatgacaacagaaatttaaagaaacaaacaattttgctatttcattcgtcaacaatcctatacttcatatgcagtatttgtatagaaggtagaggagaaaatccggaagcagtaaatgttgttatcgacgcttttgagaaaacagatttgttggaatttttaacaaagtatattgaaaattggaggtggaatagcagattagctatgcgcataagaaatatgatttctttgctcttcaagcttattgtattacaatttggtgacagttctgtctacaaacagaccaaatcatctatttataatctccatggcttaacatatccatcaaagcatccagaaaagctttctatctccccattacattatcaagcattcagggaggacattacttcccgttttcctgattacaatatgcccagttctggcttacctaaagatgttgacaaatcagaatctctttcccagtttctggaaattcctcgtccaaaatcaaagaatcctctaaatatggcgctcattgttcctgaaaaacatattgctacacctgctccttcaccgccaagctctccacaattaatgcatttaggtgaaggtcctagacctcgtaaatctttccaaacaaacatggcatatccgtgtttgtatccatctgataatgaaggatctgaagatgacactctggaagataggatagattttaatatagagagaaaacctgataacgatatagttattccattcagtaccgaagaggcagcgagaatattaagcgagagtttagaaattaagctgagtacaaaacaactttggtacgaaagggacttattcatgataactgaacgtggttggaaacagcaattagaaaatgagccatatgattatgccgcgcttaatcatgatgcaaactcttcaaaagaggaaaaaagtgcgatttgcattatgcagcgaattgacaaatattataagagctgcctttcgagctttaactctcttgtttttgtcttactgcaaacaatggaatcaagcttgacaaataactttcataggaaaagtgaagtctccgataaaaatcttctaaatatgctgacaccccaattggagatcgtgagagctaaggaattgtccctaaagtcagcagcgggcatattacatgcgttattgaagtggtttaagttaagccatattttgaaatttgaacacttggcggtagttattcacgattcgcgatacatcaacacatgcgcatctattttaagcaaatattctgaggtttatccagagagggttttcaataaatatgtacaaaccccgaattcattttggaaggagtgttctctctctaacgagtcttatcgtgaatcctattcagtagatgactcaggagaggtcgacacggagattatgccttcgtttgcatatctgttaagaatcttgagaaaagtcacagggaataaaacacaaaggttaaaggagctgcccctctccatcggcattctatttaaacgctattatcggctcttcaaccttgacatgtatcatccaatattgaaaataacaagagaactcacaccattcaaaaacaagaggtggaaatccgagcatatggaatga

SEQ ID NO: 81073 - DNA, 1530 bp, Saccharomyces pastorianus
atgatttctctttattatgagtatttaatgaattggttgactaaaggtctactccgagctacttatggagaattcttcattgctggaaacactgatacaaatggtacagacgatgattttatttaccacattcctatagagttcaaccaagaaagagttccggccttcataccgaaagagttggcatataaaatattcatgatcggcaaatcgtatatcttcctagaaaagtactgtaaagaggttcaatggacaaacgaattttctaaaaagtatcatgtcctgtaccagagcaattcttatcggggaatatcaacgaacttttttgaaattataaatgatcaatattctgaaattgttaatcatactaatcaaattctaaatcagaagtttcattacagagacgtggtatttgcgttaaagaatattcttctcatgggtaaatctgattttatggatgctcttatagaaaaggccaatgatattctcgcgacaccatcggattcattgccaaattataagttaacaagggttttacaggaagccgtgcagctttcttccttaagacatttaatgaatagcccccgtaatagttctgtcattaatggattggatgcgagggtactcgatcttggacatggatccgtgggttgggatgtttttactttagattacatcctctacccccctttgagtttagtattaaacgtaaatcgtccttttggcaggaaagagtatctacgaattttcaattttttatggagatttaaaaagaacaattatttctatcaaaaggaaatgttgaagagtaatgatataatcagatcattcaagaaaatcagaggttacaacccgctcatccgtgatattatcaataaactttctagaatcagtatacttagaactcaattccagcaattcaactcgaagatggaatcttattatttgaactgcattatagaggaaaattttaaagaaatgacccggaaactgcaacgcacagagaataaaagccaaaaccaattcgacttaattagattaaataatggcaccatagaattaaatgggattttaaccccaaaagctgaagtactaacaaagtcttcaagcagtaaacctcaaaaacacgcaatcgaaaagacgctgaatattgatgaattagaaagtgtacataacacgttcttgacgaatattctttctcataagctttttgcaactaacacaagtgaaataagcgttggtgattattctgggcaaccatacccaacttcattggttttacttttaaattcggtttacgagttcgtcaaagtttattgtaatttgaacgacattggatacgaaatcttcattaaaatgaatctcaatgatcacgaagcatctaacggattattgggaaaatttaatacgaatttaaaggaaattgttagccagtataaaaattttaaagacagactgtatatttttagggcagatttaaagaacgatggcgatgaagagcttttcttattgagcaaatcgctccgttaa

SEQ ID NO: 81074 - DNA, 1032 bp, Saccharomyces pastorianus
atggaactagagcccactctttttggtataatagaggcattggctcctcaattattgtcgcagagtcatttgcagacatttgtatctgatgtagtcaatttactgcgatcatccaccaaatcggcaactcaattaggccctttaattgatttttacaaattacaatcactagattcgcctgaaacaacaattatgtggcataaaattgagaaatttctcgatgctttatttggaatccagaacaccgatgatatggtaaagtacctctctgtctttcaatctttgcttccatcaaattacagagcaaaaattgtccaaaaatcatctgggctcaatatggagaaccttgctaaccatgaacatttacttagcccagtgcgggctccaagtatatatacagaagcttcatttgaaaacatggaccgattttctgaaagaaggtccatggtatcttcgcctaatcgttacgttccctcttcaacctacagttctgttactttgagacagttgtcaaatccttattatgtgaacactatacccgaggaagatatcctaaaatacgtatcatatacattattagctacgacatcggcactatttccgtttgatcatgagcaaatacaaattccgtctaagatacccaattttgagagtggacttttacatttaatatttgaagcgggtttattatatcaaagtttgggttataaagtggagaagtttaggatgttgaatatatctccaatgaaaaaagcattgattatagaaatttcagaagaattacaaaactacacagcatttgtgaacaatctggtctcttcagggacagtagtgtcattgaaatcgttatatcgtgaaatatatgaaaatataataaggcttcgaatatactgtaggtttacagaacactttgaagaattgagcggagatacattcttgattgaattaaatattttcaaatcccacggagatcttactataagaaaaatagcaacgaatttgtttgaattcaatgatttctctttattatga

SEQ ID NO: 81075 - DNA, 1473 bp, Saccharomyces pastorianus
atggatgaaactgctcattcaaactctcaagctttgctagatttgttgaaaaaaccaacatcatcgcagaagacacacgcttccaaaccagatacttcctttttaccaaatgactccgtatctgatatacaagatgcagaatatgaagatttcgagagtagttcagatgaagaggtggagacagatagagatgaaagaaattcattgaatgtagacattggggtgaacgttatgccaagcgaaaaagacagccgaagaagacaaaaggaaaaaccaaggagcgacgcaaacaaaacaaacttgaacgcttctgcagaatctaatagtgtagaatgggggcctggtaaatcttcaccctcgactcagagtaaacagaattcatcagtaggaatgcagaataaatatcgtcaagaaattcacattggtgatagtgatgcatatgaagtcttcgaaagcagttctgacgaagaagatggaaaaaaattggaagaactggaacaaactcaagacaactccaaattaattagccaagatattttaaaagagaacaatttccaagacggtgaagtgcctcatagagatatgcccactgaaagtaataaatctataaacgaaactgtcgggttatcatcaacaacaaatactgtaaaaaaggtacccaaagttaaaatactgaaacgaggtgaaacctttgccagtctggcgaatgataaaaaagcttttgattcaagctccaatgtgtcttcatcaaaagatttattacagatgctaagaaacccaatttcctctactgtatcttcaaatcagcaatcaccaaaatctcaacatctgagtggggatgtagaaatcatgatgatgttgaagaggaattctgtgtcaaaacctcaaaatagcgaagaaaatgcatcaacttcaagtataaacgatgcgaatgcaagcgaacttttgggaatgttaaaacgaaaggaaaaggacattgcagcaccaaaacagccctataatgttgactcatactcgcagaaaaatccagcaaaaggattgttgaatattttgaaaaagaacgactctaccgggtaccctcgcactgagggtggaccgtcaagtgaaatgtcaacgtcaataaaacgcaacgacgctacaaataatcaagaatcagataagaattcaacagagttattaaactacttaaagcccaagcctcttaatgatgggtatgagaatatttcaaataaggacagttctcatgaattactgaatatattgcatggtaataaaaacagcagcgccttcaataataatgtatatgcaactgacggatattccttggcatctgataacaacgagaattcctcaaacaaactactaaatatgctgcaaaacaggtctagtgcaataaatgagcccaacttcgacgtccgttcgaatggaacttcagggtctaatgaattattaagcattttgcataggaagtga

SEQ ID NO: 81076 - DNA, 1446 bp, Saccharomyces pastorianus
atgtcactgccgctacgacacgcattggagaacgttacttctgttgatagaattttagaggacttattagtacgttttattataaattgtccgaatgaagatttatcgagtgtcgagagagagttatttcattttgaagaagcctcatggttttacacggatttcatcaaattgatgaatccaactttaccctccctaaagattaaaccatttgctcaattgatcataaaactatgtcctctggtttggaaatgggacataagagtggatgaggcactccagcaattctccaagtataagaaaagtataccggtgaggggcgctgccatatttaacgagaacctgagtaaaattttattggtacagggtactgaatcggattcttggtcattcccaagggggaagatatctaaagatgaaaatgacatagattgttgcattagagaagtgaaagaagaaattggtttcgatttgacggactatattgacgacaaccaattcattgaaagaaatattcaagggaaaaattacaaaatttttttgatatctggtgtttcagaagtcttcaactttaaacctcaagttagaaatgaaattgataagatagaatggttcgattttaaaaaaatttctaaaacaatgtacaaatcaaatatcaagtattatctgattaattccatgatgagacccttatcaatgtggttaaggcatcagaggcaaataaaaaatgaagatcaatcgaaatcctatgcggaagaacaattgaaattgttgttgggtatcactaaggaggaacagattgatcccggtagagagttgctgaatatgttacatactgcagtgcaagctaacagtaataatgcggtctccaacggacaggtaccctcgagccaagagcttcagcatttgaaagagcaatcaggagaacacaaccaacagaaagatcagcagtcatcgttttcttctcaacaacaaccttcaatatttccatctctttctgaaccgtttgctaacaataagaatgttataccacctactatgccaatggctaacgtattcatgtcaaatcctcaattgtttgcaacaatgaatggccagccttttgcacctttcccatttatgttaccattaactaacaatagtaatagcgctaaccctattccaactccggtcccccctaattttaatgctcctccgaatccgatggcttttggtgttccaaacatgcataacctttctggaccagcagtatctcaaccgttttccttgcctcctgctcctttaccgagggactctggttacagcagctcctcccctgggcagttgttagatatactaaattcgaaaaagcctgacagcaacgtgcaatcaagcaaaaagccaaagcttaaaatcttacagagaggaacggacttgaattcaatcacgcaaaacaataatggatga

SEQ ID NO: 81077 - DNA, 600 bp, Saccharomyces pastorianus
atgatgcttgttgaatcatggcatgaagaactattgttaaaaaactacattcaaagattactacctccaggccgtggtgatggcgacgatggcgacgatggcaatggtaatgatggggatggctgcaaccatgataagacttggttaccttcggagatagaaaggcataacgaatttagattatggtggaaaggcatttggtcgagtttaggatggagattacagacttcatggttactagctcatcatgggtctaaagaacgtatatatgggcgtgatatgaaatatcaagggcgtttcttgcgttccaagtttttggaaagcgtgacgagttcaattctaagttacagagatgtgacaaacaatgcagaacctttgcaaaatgtgaagacaagcatcgttagctctaaggaaatggtgaagaagtcggcattatggggcgattggcaaagagatttgaccaaaatttctcataagactcaagaatggaaaatagttgaaggtgggcatgaaatatataagtatggtctgggcaaacaacaaactcaagaagtcctattaagattaataggtgagcttggcaaactaaccgaggattaa

SEQ ID NO: 81078 - DNA, 1251 bp, Saccharomyces pastorianus
atgaaggctaatggtttagataatgatccggcaaggacgggaatggaaagaacagatatagatagtgaacacccagaagcgcaaccgttactgaacaacaaccaccggacgcttggtgcaggatctgcaaatggcccagcagttaatgaaggtcgtgacattgaatccgatgggttcatcaaagatagtctctttcaaattcgcaaaggttatagaatctttattcataactccaaatggatattgaatatcctaattctaattaacaccatctggctagtcaccactttgatttcagatttctttttcaatatcaatattcttttcggattcagtaacaggtacgcaagttttaacgacttgactttaatattcatctcgatcattgctaattctttcaatctctggtttaataagctgggactgtactcagctttagattacagcttaaatgtaactctctgtgttttgacgttgttcaatctagcattgacctatctaattaaatacactaggcaaagaatcggctttgtgggcacgtttacatatttgtggacttcgttttcattttttattggggcaatattagattggtgtctcttgttttacaacaactcaataaatgagccattggaggaacgcagaattgatgatgctaatattagtactttcaacgaaaaccatacaaatagtaccgaaagcagggacagaagccaatatggctctgggtcgccaacccccacccaccgctcgcagctggtccaaaacaaacatacattgacagaatgggtatccattgggttcaggaatactattaagtttttaattttaatattcttcgctttattcaccctgaatacacttttaacgacattggatacctacagattgactcacaaattaccaataaccgttcagtcgccctcgtacgaggcgttccattacgtagatgccgctaaaacctatcagttgcatataacttgttatggtgacgtatttgatcaagaaaacaatacagatttgtctgaaaataagaagcaaactatcatcttgtttgaacacggaggttatgatactggttacctttctgccacctggattgaggaactataccatttagacaaaattcaaagatattgtctatacgatagaccagggtacgggttgagcgattctcctcccgccccaatctctattgcgatggttgcggaatctttaaggtacgcattgatcaaagatgcaaaaatttaa

SEQ ID NO: 81079 - DNA, 333 bp, Saccharomyces pastorianus
atgccaggtaacattgaagattatgttcacagaatcggtagaactggtagagcaggtgctactggcactgctatatctttcttcaccgaacaaaacaaaggtttaggtgctaaattaatctctatcatgagagaagctaatcaaaatattcctcccgaattattgaaatacgacaggagatcttatggtggcggtcacccaagatacggtggtggtcgtggtggtcgtggtggctatggccgtagaggtggttacggtggtggccgtggtggttacggcggtaacaggcagagagatggtggctggggtaacagaggtcgttcaaactattga

SEQ ID NO: 81080 - DNA, 1305 bp, Saccharomyces pastorianus
atgacttacggtggtagagatcagcaatataacaagactaactacaattctagaggtggcgacttccgcggtggaagaaactctgatagaaactctcacaatgacagaccacaaggcggtaactaccgtggtggtttcggtggtcgttccaattacaaccaaccccaggaattgatcaaaccaaactgggatgaagaattacccaaattgccaactttcgaaaagaatttctatgttgaacacgaaagtgttcgcgacagatcggacagtgagattgctcagttcagaaaggaaaatgaaatgactatttccggacacgatattccaaagccaatcaccactttcgatgaagctggtttcccagactacgtcttgaatgaagtgaaagctgaaggatttgacaaaccaactggcattcaatgtcagggttggccaatggctttatctggtagggacatggtcggtattgctgccactggttccggtaagactttgtcttattgtttaccaggtattgttcatatcaacgctcaaccattattggctccaggcgatggaccaattgttttggttttggctccaactagagaattggctgttcaaattcaaacagaatgttccaagtttggtcatagttctagaatcagaaatacctgtgtctacggtggtgttccaaaaagtcaacaaatcagagatttatctcgtggctctgaaattgttattgctactccaggtcgactaattgatatgctagagattggtaagactaatttgaagagagtcacttacctggttcttgatgaagctgatagaatgttagatatgggttttgaacctcaaatcagaaagattgttgatcaaatcagacctgatagacaaaccttgatgtggtctgccacttggccaaaggaggtgaagcaactagccgctgattacttgaatgatccaattcaagttcaagttggttctctagaactatctgcctcccataatattactcagatcgtcgaagttgtttctgatttcgaaaagagagatcgtttaaacaagtacttagaaacagcctctcaagacaacgaatacaagacattaatctttgcttctacgaaaagaatgtgcgatgatatcaccaagtatctaagagaagatggatggcccgccttggctattcatggtgacaaagaccaaagagaacgtgactgggttctacaagagtttagaaacggtagatccccaattatggttgctactgatgtggctgccagaggtatcggtatgttaaaattttctccatttttttattga

SEQ ID NO: 81081 - DNA, 783 bp, Saccharomyces pastorianus
atggaaaaacaaaaggaaagtatacccttagatgcaaccgttcaatcagcgggcataaaactaattgacctagatgatacttcctcgtgcgtttcgcctctactttctggtcccagtccccaaccgtctgttgttggccctggaggactcagtaacgtatcacccgataaaaataagctcaatgtgcttcctccgcctcctcctacctcgaggcacaataaggaaccatcttctaaacttctttcccctaccaaagagatttccattgtcagcgtatcgccgcgtaaaggtgagagcaatcttcctgccttagagagacacagtacacccaaaccactgccgccagtgcccgctttatctttatctaagccagtctctttacagaaaagttcttcagaattacagcatgctaaagagaccatagataatgggaaaattgttcctcgaccttgtcctcctattagaaggaagagcagtactgccccggacgaaatctctacatctaccaaaaattcaggtgtgtccactacagaagatcctgagccagcaaaggcctccacaaaacctgagaagccaccagttgtcaaaaaaccgcattatttaagtgttgctgctaacaagcttaacacctctcaagaacactcaataaaagtttccccgtcgaattcaaaatctgaagaggaactcccttgcaagaaaaagtctaaaccaaaagttcctgcgaagaaccctgaactagagaagctaagcgttcatccattgaagccttgcgaccccaattaa

SEQ ID NO: 81082 - DNA, 183 bp, Saccharomyces pastorianus
atgaaggagtggtatatcagggactttaaagaaccgaccctccaattccgtccgacctataaacatgattatggcacagataattatgatacttctgaaaaggcgagaactccgtcttggactgatagaatcatatataaaggtgaaacctgcatccattgcatatttcggatgcacctttaa

SEQ ID NO: 81083 - DNA, 2232 bp, Saccharomyces pastorianus
atgaaaatactcctatcgaaacagcaaactagaaagatagcaatagtttcagaaacacatggactggtatttaggccgataaacagtaagaactctcgccgatctacatgtgctgtggaattggttccgaaagctgaattaaatggtaatggtttcagaagactatctaaccatgaagtatacggttttattggtctcatagaaattgaaggccttatgttcatagcaaccataacaggtaaatctaaggtggcccagccgatcccaaacaaaacggttaacaaaatatatgctgtggattttttttgcttaaataattctaaatgggatttcatggacatcgattcatccggttatccgattgttactaatgatggagattttgcaataagctcgcctcctagtatttccacacattcttctagatcatcgttacgttcttcttcctctaggagtttgaatgctcaagaacaagctcccaagcatccatgtcatgaactaagaaagctattatcaaatggatctttttactacagcaccgattttgatttaacttgtacattgcagaaacggggattcacggaacactctttgagttttgatgattttgaccgggagtttatgtggaactcgtttcttatggacgaaatcatcacatacagagacagactagatgtaacggccaaagaactattggatcaacaaggattcctcacgaccgtaatccgagggtttgctgaaacaatttttagctatattaataggttgaaagtaggacttaccattatttccaggcaaagttggagaagagcaggcacaaggtttaatgcacgtggtatagatgatgatggccatgtcgcaaattttgttgaaacagaaatgattatgtactcttctcagtattgttatgctttcacgcagataagaggaagccttccaattttttgggagcaggatacatctttgattagtccaaagattcaaattaccaggtctgttgaagcaacacagcccacgtttgatgaacattttataagactatttaagaagtatgggccagttcatataatcaacctgctgtctactaaatcttcagaaattcaattatcgaggcgatacaaggaacagttgaaaaattctgagaaaatgaaaatcggtagagatgtgttcctaacaagctttgacttccatagagaaacttcgcaagatgggtttgcagctgcaagtaggattatccctaaaataagaaacacaattttggacgccggttacttttcatacgatgtaaaagaagggcgattaatatccgaacaagacggtgtctttagaaccaattgcttggattgtttagatagaacaaatttgatccaacagacgatttcactggccgttttcaaactatttttggaagacttccgattggtaaaacccagtagtttcatcgacgataatgaatttgtgcaaaaggtgaatgctttatgggccgacaacggagatcagatatcacaaatttacactgggacaaatgctctgaaatcgtcctattcaaggaaaggtaaaatgtctttttctggcgccctttctgatgcgacgaagtccgttagtagaatgtacatcaacaattttgtagataaaggaaaacagcaaaatattgacacacttttgggcaaactaccgcaccagcaagttgttgaactttatgatccaatctgcgaatacgtcaatgaaaggctgttagagtcagaggaaaaattcaccactcattctaacataaatttgtttgtcggtacattcaatgttaacggaaactctcgaagagcagatttgtcagaatggttatttccaatcggcgataaattcaaacctgatgtcgttgtgttagggttgcaggaagttatagagttgaccgcagggtctatcttgaatgcagattatacgaaaagttctttttgggaaactatggttacagactgtttgaatcaatacgaagaaaaatatcttttacttagagtggaacagatgtcctctcttttgatactattttttgcaagatcagatagagcctataacataaaagaggtaggggggtctactaaaaagactgggtttggtggtattactggaaataaaggtgccgtagccattagatacgataatggggcaacttcatactgttacgttaatacgcatttatcagcaggtgcgagtaacattgacgaacgtcgcaatgac

SEQ ID NO: 81084 - DNA, 3348 bp, Saccharomyces pastorianus
atgttttggttggattactgtgaagtgaacaacactttgattttatttggtaaggttaaactaaaggatgataattgtgtgtcagccatggttcaaatcaacggtctctgtagagagctatttttccttccaagagagggtaaaacacctaccgatatacacgaggaaataattccgttactgatggataaatatggactggataatatccgcgctaaacctcaaaaaatgaaatattcgtttgagcttcctgacattccatctgaaagtgattatttgaaagtcttacttccataccaaacaccgaagtccagtcgagacaccattccatcggatttatctagcggtaccttttatcatgtttttggtgggaattccaatatttttgaaagttttgttattcaaaataggattatgggaccatgctggttagatataaagggagcagatttcaattcaattcgtaatgcttctcactgtgcggttgaagtttcggtagataagcctcagaatatcacgcctactacaacaaagacaatgcctaatctgagatgtctatctttatcgattcagacgttaatgaatcccaaggaaaataagcaagagattgtttcgataacgttatcagcatatagaaatatctcgttggattcaccgatacctgaaaatataaaaccagacgacttgtgtactttagtaaggccgcctcagtcaactagtttcccattaggtttggctgcactggcaaaacagaaactacccggtagagtcaggttgttcaacaacgaaaaggccatgctatcttgtttttgtgctatgttaaaagtggaagacccagatgttatcataggccatcgtttgcaaaatgtctacttagatgttttagctcatagaatgcatgatctcaacattccaacgttcagctctattggccgtcgtttaagaaggacttggcctgaaaaattcggtagaggaaattcgaatatgaaccatttttttattagtgacatttgctctggtaggctgatatgtgatatcgccaatgaaatgggtcaatcattaacacccaaatgtcaaagttgggatctttcagagatgtatcaagttacatgtgaaaaggagcataagccgttagatattgattatcaaaatccacaataccaaaatgatgtaaatagtatgacaatggccctacaagagaatattactaattgtatgatttctgctgaggtgtcttatagaattcaattattatccttgactaaacagttgacaaatttggctggtaatgcatgggcccaaacgctaggcggtacaagagctggtagaaatgagtatatcttactacatgaattttcaagaaatggttttattgttcctgacaaagaaggcaatagaagtagagctcagaaacaaagacaaaatgaagaaaatgctgatgcaccagttaattctaaaaaggcaaaatatcagggtggtttagtttttgaacctgagaaaggtcttcataagaattacgttttagtcatggactttaattctttgtatccatctattatccaggaatttaatatatgttttaccaccgttgatagaaataaggaagatatcgatgagttaccaagcgtacctccttcagaggtggatcagggtgttttaccaaggttattagctaatctggtggatcgtcgacgtgaagttaagaaggtgatgaaaactgaaactgatccccataagcgagttcaatgtgatattcgtcaacaagctctaaaattgactgccaattctatgtatggttgtttgggttatgttaacagtagattttacgcaaagccgctcgccatgttagtcactaataagggtcgtgagattttaatgaatacaagacaactagctgaaagtatgaatcttcttgtagtttatggtgatacagattcggtcatgatagataccggttgtgataattatgcggatgcaattaaaattggcttgggatttaaaaagctagtaaatgagcgctatagattattggagattgatattgataatgtttttaagaagttactattacatgccaagaaaaagtacgctgctttgactgtaaatttggataaaaatggtaatgaaactactgttctagaagttaaagggttggacatgaagcgtcgtgaattctgtccactttcgagggacgtttctatacatgttttaaacaccatcctgtcagataaggacccagaagaagcattgcaagaagtgtatgattacttagaagacatcagaataaaagtggaaaccaataacattagaattgataaatataagatcaatatgaagctttcaaaagatcccaaggcctacccaggtggtaaaaacatgcctgcagtccaagtagctctaagaatgcgtaaggctggtagagttgttaaagctggctctgtcatcacttttgtgatcacaaagcaggatgaaatagacaatgcagcggatacgccggctctttctgtggctgaacgtgcccatgcattgaatgaggtaatgattaaaagtaacaatttgatacctgatccacaatattatctcgagaaacaaatattcgcgccggtagaaaggttgttagaaagaattgatagcttcaacgtggtgcgtttgagtgaagcgcttggtttagatagtaaaaagtattttagaagagagggcggtaataacaatggagaagatattaataatttgcaacccttagaaacaacaattacagacgttgaaaggtttaaggatactgtaacattagaattaagttgcccatcatgcgataaaaggtttccatttggtggtattgtatcttcaaattactatcgcgtgtcatataatggtttacagtgcaagcattgtgagcaactttttactcctcttcaattaactagccaaatagagcattctataagggcacacatttccttatattacgcagggtggttacagtgtgatgacagcacatgcggtatagttacaagacaagtctccgtttttggtaagcgttgtttgaatgacggctgcacgggtgtcatgagatacaaatacagtgacaagcaattgtacaatcaacttttatatttcgattctttattcgattgtgaaaaaaataaaaagcaagaattgaagccaatatatctacccgatgatctcgactaccccaaggaacagctgacagaatcatctattaaggctttaacagaacaaaacagagaactaatggaaaccggccggagcgttgttcaaaaatatttgaacgattgtggacgtcgctacgttgatatgactagcatatttgatttcatgctaaattag

SEQ ID NO: 81085 - DNA, 183 bp, Saccharomyces pastorianus
atgagaagtgtgacaacaactagacgcgtgaatatagactcaagaagtaacccttcaacttcaccgtttgtcacagcacccggaacgcccatcggtcttacaggactaactccaagtaagtcttcgcagagcaacaccgatgttgctacactgcggttaatgtcaaaaaggaagatgtggtag

SEQ ID NO: 81086 - DNA, 189 bp, Saccharomyces pastorianus
atggttttcccaactgaaattgtcggtaaaagagttagatatttggttggtggtaacaagatccaaaaggttttgttagactccaaggatgttcaacaaatcgactacaagttggaatctttccaagctgtctacaacaagttgactggcaaacaaattgtttttgaaattccaagccagaccaactaa

SEQ ID NO: 81087 - DNA, 153 bp, Saccharomyces pastorianus
atgtcctctgtccaatccaagatcttatcccaagctccaagtgagttggaattacaagtcgccaagaccttcatcgatctagaaagctcctctccagaactaaaggctgacttgagaccattgcaaatcaaatctatcagagaagtatgttaa

SEQ ID NO: 81088 - DNA, 162 bp, Saccharomyces pastorianus
atgactaccatatatatttaccgcagttttacgccgccagaaacaactgcgccaatccaaatggagtgtgtttcatttttcttaatgctgcaatacccgctaatggttgttagcttgccatttttagtgtcttactttctgaaagtacagatgaacctttag

SEQ ID NO: 81089 - DNA, 2796 bp, Saccharomyces pastorianus
atgaatagtaacgggcaaggatttcttaatgcaatcgaagactttgtgcgagatggccagatacaagcatcgaaaaaagacgacagcatcactgaagatgaagcatctagtacagatttgactgatccaaaggactttaccacaatgctgcatagtggaaaaccacttacagaagatgagtatgccgacctccagcgcaacattgctgaaaggatgactaatgcgtacgataccgcaagtaagaaattcaaagatgtgtcacaattagagaaggagctatttacacgattcatgtcggggagagacaaaaaatctttcagagagttgataattcaatcctttaaaaataaatttgatggggaattaggtccatccgttctagcagccactttaagctcgtgcttttcatctcaatcgaaggatacttcgttggatactgattctatatatgaagatgaagatgaggaagactatgatgactattcagaatatgctgaagatagcgaagaggtttctgagtatgaaggaatagaggcagtcgaaaaaccagagcatgatgaaaaaagcaacgggatacgtgaaacattacatttaagttatgatcacgatcataaacgacagaaccaccctcaccatcactaccatagtaccagtacccacagcgaagatgaactgagtgaagaagagtatatttccgatatagaattaccgcatgatcctcataagcactttcaccgcgatgatgatatattagatggggatgaagatgagccagaggaagaggatgaaaatgaaggcgatgacgaagaagatacttatgacagcggtcttgatgaaactgaccgtttagaagaaggtcggaaattgattcagatagccattacaaagttgcttcaaagtcgaataatggcttcttatcatgagaaacaggcagataataacagactaaaacttctacaagaactagaagaagaaaaaagaaagaaaagagagaaggaagaaaaaaagcagaaaaaaagagaaaaagagaaagaaaagaagagactgcaacagttagctaaagaggaagaaaaacgaaaaagggaagaagagaaagaaaggctaaagaaggaattagaagagcgtgaaatgagaagacgagaggctcaaaggaaaaaggttgaagaagccaaacggaagaaagacgaggagagaaagcgtagattggaagagcagcagcggagagaagaaatgcaagaaaaacaacggaaacagaaagaggaactaaaacgcaagagggaagaagaaaggaaacgtattagagaacagaaaaggctagaacaagaaaagctacagaaagaaaaagaagaagaagagagacaaagattaattgcagaggatgcgctaagaaaacagaaattaaacgaagaacaaacatctgcgaacatactttccgccaaaccttttactgagaatggagttggcaaccctgtttcatctcaatcacatcccaacatgactaactaccaagaggataatagttgcagtatcaacgatgaaatacttaaaatggttaatagcgtggctgcatccaaaccagtttcacccacaggctttaacgttcatgatctacttcttccttcaactaacaaccagatgcctgctatggaacaatcacacttgtcacagccaggtaatcaaaacaaccattttggaactacaactattccgaatgcgttagacttggctacaaaatcttctttacagactgaaaacaactatttaatgaactcacaaactctggaaaatacaagtctattgatgcataataattcatcgccaactaagctattgccaaatgactttggtttatcatcttggggtggtctgacaaatacaatgtccataaatcctacatgtaaaccaccggttattcaaacttcagaaatgaaatcacaagcccataaatctagtcctcaagctacaatgccatcttttggactacctaatggtggtactcaccgtaaatcgtttaccgacgagttgaacactttaactagcatgctttcttcttccgggttcgcagatacatcactttcatcatcaggattccccccatcacagcgttctgtgtggaatgatcaaaaaagctcattttcgggaccgtcgactgcaggaaactttaacaacagcagtatacaaagcggtatgctgctcgcacctacattaggaagcgttgaatcgtttccaaatcgaacttctatctgggacagcagcaccactccgatgatgaataaatccgagctttccggtcgcaatataactagtactgcgcaagatagccctgcgttcatggcatcaaatatctggtctagtaacagtcaatacaattcaccatatttgactagcaacgtccttcaatcccctcaaatttcgagtggagtggatgaaagccacattctggatagcatctacaatacttatttagctatttccccacaagatagtttaaacccctacattgctatcgggacactattccaaaatttagtaggacttaacttggattactcgacgtttatcaacaaattgataagcatgcaaggagcctacaattgcgaattctttactgataacaatggatccattacccacgttcgatttgcgagacaaactcccgctggccactcaaaggggttgctgaatcaactctttagtggattgaacgatccaactgctacaccatttacgtcaaggcctcatacctccacaagggctagttttccaattgcctcttcaactacgcaaacgtcttaa

SEQ ID NO: 81090 - DNA, 849 bp, Saccharomyces pastorianus
atgcccccaaactccaagagtaagagaagaaagaacaaatccaagcaacacaacaagaaaaatggcaactctgatcctgaacaaagtataaatcctacacagctagtacctcgaatggagctagagttgtatcatacagaatcggattacccaacttcaagagtaataaaaagagcgcccaatggcgatgtcatcgtggaaccaataaatacagacgatgataagaaagaacgtacggcgaatttgactcataataaggatagtatggattctgcttcttccttagcttttactctagattctcactgggaatcattatcgccagaagaaaagaaaactattctacgaatcgaaaaggaggaagtatttaatgtcataagaaattaccaggacgatcatagttgtagttgctctgtttgtggacgccgccatttagcaatggatcaagaaatggagcgtatatacaatacactttatgccatggataaggataaagaccctgaaaccaatcctatcaaattccacttaggcataataaaggagctacagatttccaaaaatcaacagcaaaatgatttatcttctacaaagggcgaagttgtaaaaaatttcctttcgtcaagtacagttggctctttgaaagaggaagtgctgcatttcaaacaaaagcaactttcaaaacaagaacaagcgcataatgaaacggcggataatacctcattacttgaagaaaatttgaacaatatacacatcaacaaaagttctagtgaaatttccgcaaatttcaattctgtgagcgatgaagagttgcaacaaaaatattccaacttcacaaaaacgttaatttca

SEQ ID NO: 81091 - DNA, 441 bp, Saccharomyces pastorianus
atgcaacagttagcccctggttccttcttcataagcaaactggttcttgtagctacttcaaagacatcatccacaccctcaccagtcagtgcactacattccatgtatttcttggccccaatggcccttgcaacttgtttcgcatcttcaatgggaaccatttcatcggtagcattctctttaaaatgggcttcttgcctcaaatcttttttcaagcctacaagaacgattggtgcgtcaggacaatatcgtaatgcctcatccgcccatttcgtccttgcgttaattagtgattcaaaattgtctacagcaaacccaattaatattatatctgcttttgaatatgagaatggacgtaaacgttcatattcctcttgtcccgctgtatcccagagcgttaaggacacttttattccgtcaactctgcaatcagtgacataa

SEQ ID NO: 81092 - DNA, 1194 bp, Saccharomyces pastorianus
atgattattgaaaaggagttaacagtcaccaataagcctaggaacgctattatccaagaacttgagaatttagggttccccagatttaataaggaaggtaaaccatattatggaagtcctaaggatgagatagctgaacaaattaacgacgtaaaaggcgcaacttctgatgaagaagatgaagaaagttcacacgaagatactgaaaatgttataaatggtcctgaagaactatatggcacatatgaatatttattaggaatgagaatatggtcattgaccaaggaaagatatgaaaagctgttgaaacaaaaacaagaaaaggagacagagttggaaaacttgttaaaactttccgcgaaagatatatggaacactgacttgaaggcttttgaggtgggatatcaagaatttttgcaacgagatgcagaagctcgcggtggtaatgttcccaataaagggagcaaaacaaaaggtaaaggaaaaagaaagcttgttgacgacgaagactacgacccatcaaaaaaaaacaagaaaagtactgctagaaagggcaaaaaaattaagttagaggataagaattttgaaaggattttgttagaacaaaaactagtaaccaaaagcaaggcgcctacaaagattaaaaaagagaaaacgccttctgtttcagaaacaaaaacagaagaagaagagaatgctccttcttccacgagttcttcttctattttcgacataaagaaagaagataaagatgagggcgaactgagtaagatttcgaacaagtttaaaaaaattagcacgatttttgacaaaatgggttcaacttccgctacatcgaaggaaaatacaccagaacaggacgatgtagccactaaaaaaaatcaaacaaccgctaaaaaaacagctgtgaaacctaaattggccaagaagccagtcaggaaacaacaaaaagttgtggaactatctggtgaaagcgacctagaaattttagattcatacactgatcgggaagatagcaataaagatgaagatgatgctataccacaacgatcaaggagacaaagatcgtcgagagctgcgtcggttcctaagaaatcttacgttgaaactttagaattatctgacgacagttttatcgaagatgatgaagaggaaaaccaaggatcagatgtttcgttcaatgaagaggattga

SEQ ID NO: 81093 - DNA, 2667 bp, Saccharomyces pastorianus
atgtcaactgaaccggtaagcgcctctgataaatatcagaaaatttctcaactggaacatatcttaaaaagaccagacacttatatcggttctgttgaaactcaagagcagctgcaatggatatacgatgaagagaccgattgcatgattgaaaaaaatgtcacaattgtaccagggttgttcaaaatctttgatgaaatcttagtcaatgcggcagataataaagttcgtgatccatcgatgaaacgaatcgatgtaaacatacatgctgaggaacatactatagaagtgaaaaatgatggaaaaggtattcccatagagattcataacaaggagaatatttatattcctgaaatgatatttggtcatttgttgacatcatccaattatgatgatgatgagaagaaagtcactggtggtagaaacggttatggtgctaagctttgtaatatattttccactgaattcatattggaaactgcagatctaaatgttggccagaaatatgttcaaaaatgggaaaataacatgagcatttgccaccccccaaaaataacatcttacaagaagggtccatcatatacaaaggtgacatttaagccggatttaaccagattcggaatgaaagagctagataatgatatcttaggagtgatgcgaagaagagtttatgatatcaatggttctgttcgtgacattaatgtctatctgaatggcaagtccttaaagataagaaatttcaaaaattatgttgaactctacttgaaatcactcgaaaaaaaaagacaactagataacggtgaggacggtaccgctaagtctgatatcccgactattctttatgagagaataaacaacagatgggaagttgcttttgcggtttctgatatctcttttcaacaaatttcttttgtgaattccattgcaactaccatgggtggtacccatgtcaattacataacagaccaaattgtaaaaaaaatttcagaaattttgaagaaaaagaagaaaaaaagtgtgaagtcttttcagattaaaaataatatgttcattttcattaattgtttgattgagaatcctgcatttacctcacaaacaaaagagcaactgacaacaagagtcaaagattttgggtcccgttgtgagattcctcttgaatatattaataagattatgaaaactgatttggctacaagaatgtttgaaattgccgacgcaaatgaagaaaatgcgctaaagaagtctgatggtacaaggaaaagcagaattactaattaccctaaactggaagatgccaacaaagccggtacaaaagaaggctataaatgtactttagttctgacagaaggggattccgccttgtcattagctgttgcaggtttagctgttgttggtagagattattatggttgttatccacttcgtggtaaaatgctgaatgttagagaggctagtgctgatcagatactaaaaaacgcggaaattcaagccattaaaaaaattatggggttacaacatcgcaagaaatatgaagatacaaaatctttaagatatgggcatcttatgatcatgaccgatcaagatcatgatggttcgcatattaaaggtttaattataaactttttagaaagctcatttcctggtcttttggatatccaaggtttcttacttgaattcataactccgatcatcaaagtttccatcactaaaccaacaaaaaacactattgcattctacaatatgccggactatgaaaaatggagagaggaagaatcgcacaaatttacttggaagcagaagtattataaaggattagggacttctctagcacaagaagtccgagaatatttttcgaacttggacagacatttgaaaatattccattctttgcagggtaatgataaagattacattgatttagctttctccaagaaaaaggcagatgaccgtaaagaatggctgagacaatacgaacctggtactgttttagaccctactttaaaagagattccaattagcgacttcattaataaggaattaattcttttttctttggccgataatatacggtcgattcccaatgttttagatggatttaaacctggccaaagaaaagttctttatggttgtttcaaaaaaaatttaaagtcggaactgaaagtagctcaacttgcaccatacgtgagcgaatgtacggcatatcaccatggtgagcagtcattggcacaaactattattgggctagcccaaaactttgttgggtccaacaatatttacttgctattacctaacggtgctttcggtaccagagccactggtggtaaagatgcagcggcagcgagatatatctacacagaattgaacaaattaactcgtaagatatttcaccctgctgatgatccattatacaaatatatacaagaagatgagaaaacagtggagccagagtggtatttaccaattcttcctatgattcttgttaacggtgctgagggtattggcactggctggagtacttacattcctccattcaacccattggaaattataaagaatataagacatttaatgaacgacgaggagcttgagcaaatgcatccgtggtttaggggatggacaggtactattgaagaaattgagcctctgcgttacagaatgtacggtagg

SEQ ID NO: 81094 - DNA, 186 bp, Saccharomyces pastorianus
atggtatattgccaaacaggcaaagaccctgaacctaccacaagatcaggtcactctaagcaacctggttgtacttccaatgggtgcattcagtggaactgtaggagcttctgttgtttatccaatcaatcttttaagaacaagactacaagcccaaggaacatatgcacatccttatgtgtataa

SEQ ID NO: 81095 - DNA, 1638 bp, Saccharomyces pastorianus
atgctgctgaaaaattgcgagacggacaagcagcgagatatacggtatgcgtgtttgttcaaggaacttgatgttaagggaaatggtcaagttactctagataatctgataagtgcttttgagaagaacgaccatccgcttaagggaaatgatgaggcaatcaaaatgctgtttactgcaatggatgttaacaaggactctgtagttgatttaagcgatttcaagaagtatgcttccaatgccgaatctcaaatttggaacggcttccagaggatagatttagatcatgacggtaagattggcattaacgaaataaataggtatttgtcagacctcgacaaccagagcatatgtaataatgaacttaatcatgaactttcaaatgaaaagatgaacaaattctcgaggttttttgaatgggcgtttccaaagagaaaagccaacattgcgctacgaggccaggctagccacaaaaagaatactgataatgatcggtcaaagaaaaccaccgactcagatttatacgttacatatgatcaatggagagactttttgctgctggtaccgagaaagcagggttcgagacttcatactgcttattcctatttttacctattcaacgaagatgtcgatctgtcctcagagggagatgttactctcataaatgatttcattcgtgggttcgggttttttattgctggtggtatttcaggtgttgtttcaaggacttgtaccgcgccatttgatagactgaaagtgtttctcatcgcaagaacggatctatcctcgatcttgttaaattcaaaaacagatctccttgctaaaaaccccaatgctgacataaacaagatatcatctccattagcaaaggctgtcaaaagcttatataggcaaggcgggataaaggctttttatgttgggaacggtttaaacgtcatcaaagtttttccagaaagttcgataaagtttggttctttcgaggtcaccaagaaaataatgaccaaattagaaggctgccgcgacacaaaagatctttcaaagttctctacttacattgctggtggtttagctggtatggcagctcagttttccgtttatcctatagatactttgaaattcagggtgcagtgcgctcctttggacacaaagttgaaggggaataatttgctttttcagactgcaaaagatatgtttcgagagggtgggctcagattattttacagaggtgtcacagtcggtatagtgggcatatttccctatgctgcattagatttggggactttttctgccttaaaaaaatggtatattgccaaacaggcaaagaccctgaacctaccacaagatcaggtcactctaagcaacctggttgtacttccaatgggtgcattcagtggaactgtaggagcttctgttgtttatccaatcaatcttttaagaacaagactacaagcccaaggaacatatgcacatccttatgtgtataacggctttaaagatgttttgttaaagacgctagaaagggaaggttatcaaggtctatttaaaggtctagtaccaactttagcaaaagtatgtccagcagtttccatcagctatttatgttacgaaaatctgaaaaaattcatgaatctggagtag

SEQ ID NO: 81096 - DNA, 1536 bp, Saccharomyces pastorianus
  modified_base (951)..(998): a, c, g, t, unknown, or other
atgtgctcacaatcagaacaacaagctcagaaaagacttaaaacggaagtcgttgatgatagaagcacaacacacgaatccgataatgaaaattatcatagctccagaagcgaaagtaatcaatccaatcatgcacattttaatagtacttgtgaaggaactactggcgtaatagacaaaagtaatggtacagaactaacttctgtgatggacggtaattatactaatgtcactgatgtcattggttcggagtgtgaagtttcggttgattcatcagttgtattggatgagggcaactcaagtacaccgactaagaagctgccaagtatcaaaacagattctcaaaacctaagtgatctgaacctgaataatttttccaatcctgaatttcaaaatataactagtccagataaagcacgtagattggaaaaagttgttgaagaaccagtttattttgatattgatggtgaaaagttccaagaaaaagcggttctatcacaagcagatggtttagtttttgtagataatgaatgtcatgagcatacaaatgactgctgtcatcaagaaagaagaggaagtactgacacagaacaagatgatgaagctgactctatatacgcagagattgagccagttgaaatcaatgtgagaactcctctaaagaactcacgtaaatcgatttccaaagataattacaggtcattgagtgatggattgacgcatcgcaaattcgaggatgagatattggagtacaatttaagcacaaaaaattttaaagaaataagtaaaaatggcaaacaaatgagtagcatcataagtaaaagaaaatcagaagctcaagaaaacattatcaaaaacaaggacgaactagaggatttcgaacaaggagaaaagtatctgacgttaacagtttcaaaaaatgattttaaaaaaatggaggttgttggacannnnnnnnnnnnnnnnnnnnnnnnnnnnnnnnnnnnnnnnnnnnnnnntgatctgtttattgtcgatcagcatgcaagtgatgaaaagtataatttcgaaacactgcaggccgtgacagtttttaaatcgcagaaattgataatacctcagccggtagaattaagtgtcattgatgaacttgtggtgctggacaatttaccagtttttgaaaagaatggattcaaattgaaaattgacgaagaagaagagtttggctccagagttaggctgttaagcttacctacgtccaaacaaaccctttttgatttgggtgattttaatgaactaatacatttgatcaaagaagacggtgggttacgaagagacaacatcagatgttccaagattcgttctatgtttgctatgagagcatgtagaagtagtataatgataggtgaaccgctgaataagaagactatgaccagagtcgttcataatctcagtgaacttgataagccttggaattgtccccatggacgtccaacaatgagacatttaatggaattacgtgattggagctcattttcgaaggattacgaaatatga

SEQ ID NO: 81097 - DNA, 282 bp, Saccharomyces pastorianus
atggacatgctagatccttcctttccgttaagttcgtctttgcgttcaagtgcaaacttggcaagtaatcccgaattagcaacccagacgcctttatcgacatcttcgtcatatacagcaataggcaagcccatgcctttatcaacagatccttcttacgtgtcttcttctaatacgttatcctccgatcatgagttaagagttgaaaaagtcagtgaagtgcttaagaaaaaagtttcaaatggtggattttcaactgaatttaatagttgtgatacataa

SEQ ID NO: 81098 - DNA, 897 bp, Saccharomyces pastorianus
atgtgcgtgtacaagtcaaattcgaacaacagcaacccttcttttatcttcgaaagaaccgtgcaagaggcaagttcaaacgatttatttcttcaacctccggtttccgcctccaacacatctcatagctcaagatctaatagtttttacaacttgcagaccatttctccgatacctatctctggtagcaaggttagaactccatcgttgaggaagaactccaataatgtttcctctccgctaggtaacgtcataccaacgtctaggtcggcgtcgaactccaccacaagctcgttagcacatcaagagtacatcttgaaccccatttgcaacatgcaaaatcatcaccatcgccgtcgtacgttagaaaactcggtggctccagctttagatgctagttgctcaatagtgaacgatgagaacactgacctgagcgatgtcgatatggtttattcaagaaggccttcctctgctgtgagcctaaacatggccctgttggctagaacgaatagtgccactcttccctcatcagaatcttcgccagcatcgccagatcttaaactttcgagatctcattcgcattctgcggctacacgtcccaccttgaataacatcaataacaccgggatgaccaccacaacttcaaatggcgaaccaaactccagaatactaagattctactcttacgtcgatatgttgaatgatgaaaaacttgcacaggccaataatacgcctacatctagaccacctatgaaatcccaagcgtactcatgccctttcatcctcaagaggtccccaccacaagcctattcttcatcgtcagcaacaacgacattttccaaccccttcatcaaaactacagaattaccagctagttcgccttatgtatctccgcag

SEQ ID NO: 81099 - DNA, 342 bp, Saccharomyces pastorianus
atggtttcccacaagaccgcccgtggtaaggctgccttggaacgtttaaagatcttcgaaggtattccacctccatacgacaaaaagaagagagttgtcgttcctcaagctttgagagttttgagattgaaaccaggtagaaagtacaccactttgggtaagttgtctacttctgttggttggaaatacgaagatgttgttgctaaattagaagacaagagaaaggtcagatccgccgaatattacgccaagaagagagctttcaccaagaaggtctcctctgcttctgctgctgcttctgaatccgatgttgctaagcaattggcttctttcggttactaa

SEQ ID NO: 81100 - DNA, 873 bp, Saccharomyces pastorianus
atgtctgcctcacttgaagaattatataagggtaggacagctaagttagcccttaacaaacagatcctatgtaaagaatgtgaaggtcgtggtggtaagaaaggcgccgtcaagaagtgtaccagctgtaatggtcaaggtattaaatttgtaacaagacaaatgggtccaatgatccaaagattccaaacagagtgtgatgtctgtcacggtactggtgatatcattgatcctaaggatcgttgtaaatcttgtaacggtaagaaagttgaaaacgaaaggaagatcctagaagtccatgtcgaaccaggtatgaaagatggtcaaagaatcgttttcaaaggtgaagctgaccaagccccagatgtcattccaggtgatgttgtcttcatagtttctgagagaccacacaagagtttcaagagagatggtgatgatttagtatatgaggctgaaattgatctattgactgctatcgctggtggtgaatttgcattggaacatgtttctggtgattggttaaaggtcggtattgttccaggtgaagttattgccccaggtatgcgtaaggtcatcgaaggtaaaggtatgccaattccaaaatacggtggctatggtaatttaatcatcaaatttactatcaagttcccagaaaaccatttcacatcagaagaaaacttgaagaagttagaagaaattttgcctccaagaattgtcccagccattccaaagaaagctactgtggacgaatgtgtactcgcagactttgacccagccaaatacaacagaacacgggcctccaggggtggtgcaaactatgattccgatgaagaagaacaaggtggcgaaggtgttcaatgtgcatctcaatga

SEQ ID NO: 81101 - DNA, 405 bp, Saccharomyces pastorianus
atggttaaagaaactaagttttacgatattctaggtgtttcagtcactgccactgatgtcgaaattaagaaagcttatagaaaatgcgccttaaaataccatccagataagaatccaagtgaggaagctgcagaaaagttcaaagaagcttcagcagcctatgaaattttatcagattctgaaaagagagagatatatgaccaatttggtgaagaaggtctaagtggtgctggtggcgctggcggattcccaggtggtggattcggttttggtgacgatatctttcccaattctttggtgctggtggcgcacaaagaccaagaggtccccaaagaggtaaagatatcaagcatgaaatgtctgcctcacttgaagaattatataagggtaggacagctaagttag

SEQ ID NO: 81102 - DNA, 1143 bp, Saccharomyces pastorianus
atggttgaagcagaagatgatagtcacttggatgaaatgaatgaagacaaaacagcccagaaatttgatttgcttgatattgcagacgaagatctaaatgaagatcaaatcaaggagaaaaggaagcaaagatttttgaaggccagtcaagacgccaggcaaaaggctaaagaagaaaaggaaagagtcgccaaggaagaagaagaaaaaaaattaaaagagcaacaatggcgtgaaactgacttaaatggttggataaaggacaaaagattgaaattaaacaaactaataaaaaggagaaaagaaaagttaaaattacgtgacgaaatgaaggacagaaaatctcaagtttcacagaacagaatgaaaaatctagcttcattggctgaggataatgtcaaacaaggggccaaacgtaatagacaccaagcgacaatagataatgatccaaatgacacttttggcgctaatgatgaagactggcttatttatactgatattactcaaaatcctgaggcttttgaagaagcattagagtacgagtacaaagacatcgtggaactggagggactacttttagaacacgatccaaactttactgaagaagatacgctggaagcacagtacgattggagaaattctatcctccacctgtttttaagaggacctagacctcatgatagcgaaaatatacatgaacaacatcaaatgcatttgaatgtagaacgtataagggtaccagaagtgatatttcaaccgacaatgggcggacaagaccaagccggtatttgcgaattatcagaaaccattttactaaagaagtttggttctcaaccaggaaaattgagtcaaacttccatagacatggtgaacaacgttcttattaccggcggtaatgctaaggtgccaggattgaaagaacgtattgtgaaggaattcactggattccttcctaccggtaccaatatcactgtaaatatgtcttcagatccttcattggatgcctggaagggtatggcagctctagcacgaaacgaagaacagtataggaaaacagttatcagtaagaaagaatacgaagagtacggtccagagtacatcaaagagcataagttagggaatacgaagtattttgaagactaa

SEQ ID NO: 81103 - DNA, 534 bp, Saccharomyces pastorianus
atgtctagcagagacgcctctttgactcctcttaaggcagtagtgatagacgaccctccattgagacaaaccccagaaccattcgatgaacagtcagcttacaatccccagtcgcccattgccattgattttggatcaagcaaactgagagcaggattcgttaaccatgctacccctacacatatttttccgaatgcattgaccaagtttagagacagaaagttaaacaaaaatttcacttttgtcggtaatgacaccttgttggatcaagctgtgcgttcgcaatcgagaagcccctttgacggaccatttgtaaccaattggaatctcactgaagaaatattggactacacttttcatcatttgggagtggtaccagataacggaattcctaatccaatattacttaccgaaagactggcaactgttcaatcacaacggacaaattggtaccagattttgtttgaaacttacaatgtaccaggcgttactttcggaatagacagtctgtttagtttttacaattataaccca

SEQ ID NO: 81104 - DNA, 303 bp, Saccharomyces pastorianus
atgcagctgcatgcctgcaggtcaaatggtgaacaacgtcttattaccggcggtaatgctaaggtgccaggattgaaagaacgtattgtgaaggaattcactggattccttcctaccggtaccaatatcactgtaaatatgtcttcagatccttcattggatgcctggaagggtatggcagctctagcacgaaacgaagaacagtataggaaaacagttatcagtaagaaagaatacgaagagtacggtccagagtacatcaaagagcataagttagggaatacgaagtattttgaagactaa

SEQ ID NO: 81105 - DNA, 84 bp, Saccharomyces pastorianus
atgaagtatgaggtgccctttttcaatacgcaaaaatctacggctattcaaaaggattccatggtccatcctggtaagaagtga

SEQ ID NO: 81106 - DNA, 1533 bp, Saccharomyces pastorianus
atgcagaacaataacaatctgatgtcgggacacaatcacctggacgagttgagcagtataaaacaggagccaccgcatcaattgcagcagcagcaactaccaatggatgtacaatcggtagattcgtatacctctgacaacccagacagcaatgttattgccaagtcgcctgataagaggtcaagcttagtatccctatctaaagtttctccacatttactttcatccacatcaagcaacggtaacacaatatcgtgtcccaatgttgccacaaattcgcaggaattggaaccaaacaatgatatttcaacgaagaaatctctttccaattctactttgagacattcctccgctaatagaaattctaattatggtgacaacaaaaggcctcttagaacaacagtgtcaaagatatttgattcaaaccctaatggagctcctttacggagatactctggggtaccggatcacgttaatctagaagattacatcgaacagtcgcgtaattatccaacaatgcaaaatagtgtgaaaaaggatgaattttataacagcaggaacaataagtttccccatggtttaaacttttatggtgataacaatgttattgaagaggaaaataatggtgactcgtctaatgtaaatcgaccgcaacacactaaccttcagcatgagtttattccagaagataacgaaagtgatgaaaacgatattcactccatgttttattataatcataagaacgatttagaaacaaaaccgctaatatccgattatggtgaagatgaagacgtagatgattatgatcgcccaaatgctactttcaacagttactatggctcagcatccaacacgcacgaacttccattacatggaaggatgccttcaagatcaaataatgattactacgattttatggttggcaacaatactggcaataacaaccaattgaatgaatatacccccttaagaatgaaacgtggtcaaagacacctatcaagaacaaacaatagcataatgaatggtagcatccatatgaatggtaacgatgacgttacccattccaatatcaataataacgatattgttggttactcaccgcacaacttttactcaaggaagtccccatttgtgaaagtaaagaattttctttatcttgcatttgttatatcatcactattgatgacaggattcattctgggatttttattggccactaataaagaactacaagatgtagacgtggtagtgatggataatgtgatttcaagttcggacgagttgatcttcgacatcacagtaagtgcttttaatccaggattcttcagtataagcgtttcccaagtcgatttggacatttttgcaaaaagttcttacctgaagtgtgattctaatggtgactgtacagtaatggaacaggaacggaaaattttacaaatgacgacaaatctttcgttagttgaagagagtgctaataatgatattagtggtgggaacataggagactggtatgtatctagggaagccgcgtaa

SEQ ID NO: 81107 - DNA, 471 bp, Saccharomyces pastorianus
atgaaaatttcattgaaggaacctgaagaagaaataatcaaccaagaaaggcccaaagactactactttgcaagctattctgcagaccaaaagctgcaattccaacagagctctatcgactctgatgtgataatacaagaaagtacaaaaattctggaggatgatctacgtattcgtgataaatggccatattgccagggtcgaataatagatctgtataagcacaatgcgagaatagagttagagcagcagaaggaattgaagattaaaaagaggagacctggtcaaaagcaacgtgcagccaaaaaactggcacttgaaagaaccaaggagcgtgatgccaaagctcgtgagataaagaaacagttgaagaaaaagtttcataagcgtggtggaaagaaaaacaaaaaaaaggtacctttgaacccactggcaaaagctggcagtacccctaagtttaggacagaatga

SEQ ID NO: 81108 - DNA, 612 bp, Saccharomyces pastorianus
atggcggggtccactagatccaagcaagatgaaaattatgttaaaagtttacaagactggtcagaaaatgtattaaaaattcctaaacatttgatatcattcgaaaaaaatctgcccttcgataagattgaaatattactaaacaaatctactttcggtgttaatgccatgtggaatgagcactttggaattgcagttgtagagtatatggcttccggtttgatccccatagttcatgcctcggcgggcccattgttagatatagttactccatgggatgccaacgggaatatcggaaaagctccaccacaatgggagttgcaaaagaaatattttgcaaaactcgaagatgacggtgaaactactggttttttctttaaagagccgagtgatcctgattataacacaaccaaagatcctctgagataccccaatttgtccgaccttttcttacaaattacgaaactggactatgactgcctaagggtgatgggcgcaagaaaccagcagtattcattgtataaattctctgatttgaagtttgataaagattgggaaaactttgtactgaatcctatttgtaaattattagaagaggaggaaaggggctga

SEQ ID NO: 81109 - DNA, 699 bp, Saccharomyces pastorianus
atgggcagtgcttggacaaactacaattttgaagaggttaagtctcattttgggttcaaaaaatatgttgtatcatctttagtactagtgtatggactaattaaggttctcacgtggatcttccgtcaatgggtgtattccagcttgaatccgttctccaaaaaatcttcattactgaacagagcagttgcctcctgtggtgagaagaatgtgaaagtttttgggttttttcatccgtattgtaatgctggtggtggtggggaaaaagtgctctggaaagctgtagatatcactttgagaaaagatgctaagaacgttattgtcatttattcaggggattttgtgaatggagagaatgttactccggagaatattctaaataatgtgaaagcgaagttcgattacgacttggattcggatagaatatttttcatttcattgaagctaagatacttggtggattcttcaacatggaagcatttcacgttgattggacaagcaattggatcaatgattctcgcatttgaatccattattcagtgtccacctgatatatggattgatacaatggggtaccctttcagctatcctattatagctaggtttttgaggagaattcctatcgtcacatatacgcattatccgataatgtcagaagacatgttaaataagctgttcaaaatgcccaagaagggtatc

SEQ ID NO: 81110 - DNA, 1290 bp, Saccharomyces pastorianus
atgcagaaattttttctgcccttaggaagtggatccgttcaagatttgcccacgatgctgaccaagtatcatgataatctggcctctttggcatcgaaaagttccaaggagttgaccagtgaaattatacccaggctagaggatttgagaagagatttactagttaagattaaagaaattaaggctttgcaatctgattttaaaaattcctgtaacaaagagcttcagcaaactaaacacttgatgaagctttttaatgaatcattaaaagaatgtaaattaggtacaccaaagagtgacccatttttgataaaattgcaattggaaaagcaaatcaaaagacagttggtggaagaaaattatttgcacgaggcattcgataacttgcagaattcaggggcccagttagaaagtgttattgtaatggaaatacagaacggattgaccagctacgctagaattcttggcaaagaagcccaagttgtatttgactcagttatctctaaattagattccacgatactgaacaaaaacacgaatcttgaatgggatagtttcattctaaggaatatttccaattttgtgcctccaaatttacccatgaggaggtttaaagagatctcgtatagcaatcaaaacgatccttttacttttgaagttaaatctgggtttctggagaaaagatcaaaatttttaaagtcatactcacgtgggttttatgtcctcactccaagctttttacatgaatttaagacaccagataagcataaattttccacaccgttaatgtcaataccattagtggaatgtactgtcactgagcattccaaaaagacgaaatccaactcagagcagggcaagaacaagtttatattgcgtacgaattctaacggactaatacataggggtcacaactgggtattcaaagtagactcttatgacgatatgatagaatggtttggaaatatcaaagccttatcaagtttgcccaactatgacgacaaatgcaaatatgtgagtaaagttgccaaactgtctaaagaaaaagccaagagtaatgaaaacaccacggagagcgtgaccccccaggtaactaatgagcaacatacgagatacgatgatgtgagtagtagcaattttcccttgaattccattccaaaattagacaatttgacaatcactaacaccacgtcatcgataccggaaacgaatgattcacaaattcagaatagggttcctgaattttacatagaaaatgtagattcccctagaaaaagcaatcagctgtga

SEQ ID NO: 81111 - DNA, 438 bp, Saccharomyces pastorianus
atgtcttaccaacggaacagtgcaagagcctctcttgacctcagaagtcaatatcaacaactggaaggcagaatgaggtcaggacattttaatcccgcctatcaacagcagcaacaaaaaggccagaacatgcccttgtcactaccctcgtcgcttgcgcaacgcaatcctataccttaccctatcgacgctgtgacttccgatcccactatcccggctcagttgaacgtatatgatcacgatcggcaaaattcgatggtcgatgctgcggctggcaccaatacgacgcactctttgaactctaataatattccatcatctcaaaataataatattaataataacaatatcaataatgttggttccttcactgaacctttcatgctaacgctggccaaaatgtctttacatatcccccagaaagcgtatgattcttag

SEQ ID NO: 81112 - DNA, 1074 bp, Saccharomyces pastorianus
atggagtctccgaatatgacttttgctacgcccaccttgattgcacatgacagatccaacattgatgtcatcgcccatgaacttgctcactcatggtctggtaacttagtgaccaattgttcgtggaatcatttttggttgaatgaaggttggaccgtttacttagaaagaagaattattggtgccattcatggcgaaccaactagacatttcagtgctctgattggttggagcgatttgcagaattctattgattctatgaaagatcctgaaagattttccactttggtacaaaacttgaacgataacactgaccctgacgatgccttttccactgttccgtacgaaaaggggttcaacttactatttcacttggaaactattttgggtggtaaggctgaatttgatccatttattagacactatttcaagaagtttgccaaaaaatcattggatactttccagtttttggatactttgtatgagttctatcccgaaaagaaagaaattttggattccgttgactgggaaacttggctgtataaaccaggtatgccaccaaggcctcattttattacggctttggctgataatgtttatcaattggctgacaagtgggtcgaaatggctcaacatttgaaaaccacagaggatttccggtctgaatttaacgctattgacattaaggattttaattcaaatcaattggttttgttcttggaaactttgacacaaaatggccattccaacaagaaaccaaaagattttgactgggccaagtttcccgtggcatctagggcactgttagatatctatcaagataacattgttaaatcacagaacgcggaagttgttttcaagatgttcaaatttcagatctttgccaagctgcaagaagaatataagcatttggccgattggttgggaactgtaggtagaatgaagtttgtccgtcccggttacagactattaaactctgtagaccgtcgattggcacttgcaactttcgacaaattcaaggacacgtatcatccaatctgtaaagctcttgtgaaacaagatttaggtctttga

SEQ ID NO: 81113 - DNA, 477 bp, Saccharomyces pastorianus
atggaaaatattaagagcgagttccaatccttgcaatctaaattagcaacccttcgcaccccgcaagaatttttcaatttcaagaaaatttccaaacctcaaaactttggggaagttcaatccagagtggcgtataacctgaagtacttttccagtaactatggtttgattattggttgtttgagcatttacacattattaacaaacttgttgctactctttgttattgttctagtcgtagctggtattgttggtataaacaaactaaagggtgaggagctcgtaactccatttggttctttcaagaccaaccaactatacaccggactggtttgtgttgctgtgccaataggtttcttagcttcgccaatctcaactttgctatggttgatcggtgcttctgccgtcagcgttttcggacatgcatcattgatggaaaaacccatcgaaactgtatttgatgaagaaactgtttga

SEQ ID NO: 81114 - DNA, 363 bp, Saccharomyces pastorianus
atgaacacactgaaagccagtggaaagaaaagggcttattttatggaagaagaatacggaacattggaactgttgctacagatccacaaggaagtatctaattttttgaaagatgatacagaaggttacgaaattatcctatgcggttatgaaagacaaacgaacactggctcactgctaattctttcggaatcgggtgaaaaaattgccaatttggctgctaacttaggttcgatactacaaaacctaaaaggcggtggtggtaagaaaggtggcaagtggcaaggtaaaattacatccatttcgaatgccgagtttgccgccctctctgattatttaagccatgatttcgcatcatgttga

SEQ ID NO: 81115 - DNA, 888 bp, Saccharomyces pastorianus
atgcccacacctatgacgcctgtcaaggtcggcgctttagcctgccagaggaactcatttctcttcgatgggttcaaaacactggttgtttcttgcgaaccaacgaagaataaaaagggagagattgaaggttatgagattgaactacaagatactattctgttccccgaaggtgggggccaaccaagtgattctggttttttgaaaattgttgaagggaatcgtaattcgtcgaaaattgagaagatattagtttcacacgtttctcgtttcggtttacatgcaaagcatcatgtcaatgactacattgagcccggaacaacagtggaagtggccgtggacgagcaaaagagaatggattatatgcaacaacatactggtcaacacttgttaagtgccattctggaacgcaactacaaagtaggcactgtatcttggtcgatgggtggtattatcacaaagaaaaaacctgttctagagcctagcgactatttcaattatatagagttgaacaggaaattgactctcgacgaaataacgaacgtatcagatgagattaatcagttgatcatcaactttcctcaggaaattattgtagaggaaagaatcggtgaagaaacagtagatgaagttagtacatccaaaattccagacgattacgacctctccaaaggtgttctacgtactatccacatcggtgacattgattctaacccatgttgtggtacacatttgaaatgtacctctcaaataggttccactttaattcttcccaatcaatcagccgtaagaggttcaaactcaaggctctatttcatgtgtgggaagcgggtttctctgtatgcaaaatctgttaataaaattttactgaatctaaaaacttattga

SEQ ID NO: 81116 - DNA, 195 bp, Saccharomyces pastorianus
atgccctctgtaagcgaactatacacactttttggagattatacgataaaagtactgggcggcatcactaaactggcttcaactcttaacagagaggactggcagggggaaagaaacgggttcgcggttttatcgagagaccggcctaaccagacgttactaagcgtccatatgtactcttcaagcttgctatag

SEQ ID NO: 81117 - DNA, 105 bp, Saccharomyces pastorianus
tctgttacttacactgaacacgccaagagaaagactgttacttctttggatgtcgtttatgctttgaagagacaaggtagaaccttatatggtttcggtggttaa

SEQ ID NO: 81118 - DNA, 135 bp, Saccharomyces pastorianus
atgggtttctgcgtgaatatttgggtaaatctgcttaatcaacagagaggacacgaacgccacgtcgaagtactcaacggcaatgaaatggaggagcacataagggaagactatctaagacagttcggaaactag

SEQ ID NO: 81119 - DNA, 99 bp, Saccharomyces pastorianus
atgctcttgtgtaggcattttaaaactgaaagtggtagaagatgcatcactcccttgtacgaagaagccagacaggagaaatcgggacaagagagttaa

SEQ ID NO: 81120 - DNA, 1392 bp, Saccharomyces pastorianus
atgtctcacttaaccgcgaataacgatgattttgacgatcttttgagcgtcgcatctatgaactcaaattatttactgcccgtaaattcacatggttataaacatatttcaaaccttgatgagttggatgacttgctatctttaacatattcagacaataaccttttatcagcatcaaacaacagtgatttcaacaacagtaataacggaattattaataccgctgacactcaaaacagtaccattgccattaataaaagtaaagtcggtactaaccaaaagatgttattgactattccaacttcttccacaccttctccttccactcatgctgccccggtaacacccatcatttctatacaggaattcaatgagggacacttcccagttaaaaacgaagatgacggaacgttacaactaaaagttcgggataacgaaagttatagcgctactaacaataacaatctacttcgtccagatgataatgattacaacaacgaagctctcagtgatattgaccgctccttcgaagatatcattaacggtcgaaaattgaaacttaaaaaatcaagaagaagatcttctcaaacttccaataatagtttcactagcaggagatcctcgagatcaagaagcatatctcccgatgaaaaagctaaatctataagtgcaaatagggaaaagttattggagatggcagatcttttaccatccagtgaaaatgacaataatcgggagcgctatgacaatgatagcaaaactagctataacaccattaacagtagcaattttaatgaggataataataataacaatttgttaacaagtaaaccaaaaactgaatcgggcattgtcaatattaaaaatgaactagatgacactagcaaagatcttggcatacttctagacatagatagcttgggccaatttgagcagaaagttggtttcaaaaatgatgataatcacgaaaataacgataatggcacattttctgttaagaaaaatgacaatctagaaaaactagacagtgtaacaaataataggaaaaatcctgcgaatttcgcttgtgatgtatgtggtaagaagtttacaagaccttataacttaaagtcacacttaagaacgcatacaaatgaaaggccatttatttgttctatttgtggtaaggcgtttgcacgtcaacatgatagaaagagacacgaagatttgcatacaggtaagaaaaggtatgtatgcggtggtaagctaaaggacggtaaaccctggggttgtggcaagaagtttgcaagaagtgatgctcttggtaggcattttaaaactgaaagtggtagaagatgcatcactcccttgtacgaagaagccagacaggagaaatcgggacaagagagttaa

SEQ ID NO: 81121 - DNA, 969 bp, Saccharomyces pastorianus
atgtggaaggatcaaaaaagtgttacttgtggcgcaaaaagtgatagagtaagtgtaactgaatcttccgtgctggattgcaatgaagaatgtgaagctttgaaacgactaaaggaattgaaggaggcatttggaattaaggaagaaaccaataattttacaagtaatgaactagatgcgttaaaaaaactggtctctgttgctacaacatttgaagaactgcagttaccgtttacagaggcagcattatcagtatattcaaagcaagaaagatggtgttcacaaattgaagctattcttaataaattaatggacgataaaacacgttcaagcttgcatttcaaacctatgaggcctcctcaacgccacttcatccgtgaactagccaaagcttacggcctatattccgagtctcaggacagagagcccatgagatctgtatttattaagaaagaagataatggcgcaagcaataaaccagtcttatcattagcagaagcttacccactatatgaatcatttaaacaattgcagaaggaaaggaaagcacaagaatttcaagctcgcaccacagctaaactaatcaacttcgaggttcaagatacggaacctaaagtagaggtggctaagaaaaatggttttttggttcaaaatttggttgctggaaatactgccgaagatctaaggagattttttgaaccacatctcaagcatacgttagtagtgaatcctcaatacctaatccttgatgatggcaaaacagcactagtgtatcctgaaaattacgaaacagcatccgtgaataccgaacgtgacatggagcttttggttggacacttcgattttatggccaaagaggcatttttggccgattccatttcgttgtgttcaactgaagaagaacttgaaagaaggttggatacgcccgtaattcaagaggatagtcctgtaatggataataatacatga

SEQ ID NO: 81122 - DNA, 1980 bp, Saccharomyces pastorianus
atgaccgaacatgagtctttaggcctggagcaaaatcaagacggcggtgacacttatagacatcacaacctaagcgatgggtgtatttcgagtgttgaagacaccaacgagcagcctagttcgtatgaagaggaaagtgatgatgatatgcaatattacgaacgtgcgatccaggaaatttctagcggtgactcatatgtttgtatgatttgtacagtagagatggattatacgtgccaaatgtttgcttgcaagagatgttatagagtgtttgattacggatgcataagagaatgggcgttaaaatcaacggaaaaaaccgtagatagaatatggaaatgtccaaactgctattatgttagcaaaagagttccggtaaaaaatcggcccacatgttggtgcggtaaagttgttaatcctgatccgaatccgctggatcctaactcatgtggacaaacctgcaatgcttctacttgtatgcatggttgttccaaaatttgtcatctagggccgcatccagagtgtactagaatggtcgagattatgtgccactgtggtaagcattcgaaaagtatcttttgttaccagtctaaagttatgaaaaaaaacttcaactgtcaagaagtatgtggattgcctttatcttgctccatccacacctgtaaaaagaaatgccaccctggcttatgtgggccatgtccagaaatgataattaggaaagatagtccgaaaaagcaaataaaatgctactgtggtaaccacactcgtgctaacataaagtgtagtgaaacaaagtttcccaagtccggtaagtcgtcgaaggatgaaaatgggaacaggtggataggcgtgtttgcctgtgcagataatagagttgtcgactactcatgtcgcaagcattcattcatagaatcttgcataagcccacccacaattaatggagaaaaggcatgcccatttttgcctagctctttgaaaacttgtccctgtggccggacagccttagaggaactgactaagcctcgtaagcattgtgatgatccgataccaacctgcgactcaagatgcggtaaaccactaaaatgtggcaaacattcgtgccccttcacttgtcatgataaagcctgtatggaaccctgcttgcaaattgatagtgtaaaatgtgcttgtgagcaaagtacattttcagttccatgtggatttcaaggaaggccacgctgcaatattaaatgcgaatccctgatgtcatgccgtagacatagatgcaccgataggtgctgcagtggtaggccatcggcgataagaaggaagaaaaacctgttcagaacgcaagatttgttggatgagtctcttgtggaagcaaaacatatctgcctaaaaccgtgtaatttgaccctatcatgtggaattcataaatgtcagagaaaatgtcacccaggaaagtgtccgccctgtttagagagtgattcgaacgatctggtctgcccatgtggcaaaacagttgttcctgcacccgtgcgttgtggcacgaagctaccaacatgtaatcatccatgtattaaagttgtgcgtggcgaatctacgtgtggtcataaaccaatgccacatacctgtcattccttggatgtgtcgtgcccgccatgtacggaaaccgtatttaaaccttgtaaatgtgggaagaaaactaaagtgagaacggtttgttttcagacagacgtatcatgtggaataaaatgtgggataccactctcttactgttatcatacctgccaaaaaacatgtcatttaccaggaaattgccaaaaggtgtgtaaacagacctgtgggcaaaaaaggctcaattgtaatcatgaatgtcctaaaccgtgccatggtaagacagagtgtcccgatttaccttgtgccacgctagtgaaaatttattgtaaatgtggaaggatcaaaaaagtgttacttgtggcgcaaaaagtgatagagtaa

SEQ ID NO: 81123 - DNA, 318 bp, Saccharomyces pastorianus
atggtaaagcatgcaatgagtttcccagcggctaaaaaaatagtatacagcacatgttccattcatgcggaagaaaatgaacgagtcgtcatagaccttcttttagataagtcagttagagaatggggttggaaagtagcgccaaaaagagaagttattccttcttggcctagaagaggcaaggtagaagagttcgaagaggtttttagagatggagtcacctatgaccctcaacagcttgccgagggttgtatcagggcactaccaaaaagtgacggtggtattggtttctttgctgtctgttttgaaagagattaa

SEQ ID NO: 81124 - DNA, 1926 bp, Saccharomyces pastorianus
atgaggtatcatgcaaagattttcacatcgtacttcgagtacattgatccacatccagaggacccaagaagaatatatcgtatttataaaatactagcagagaatggtctgattaacgaccccactttaagcggcgtggatgaccttggtgatttaatgctgaagatacctgtaagagccgcaacctccgaagaaatcttggaagttcatacaaaggaacatttagagtttattgaaagcacagaaaaaatgagccgagaagagttattaaaagagactgaaaaaggtgattccgtatatttcaataatgattcttacgcgagtgctaggctgccttgtggtggcgccattgaagcatgcaaggcggttgtcgaggggcgtgtaaaaaactctctagctgtcgtaagaccacctggccatcatgcagagcctcaagctgcgggtggtttttgtctcttcagtaatgttgctgttgctgccaagaatatcttaaagaactacccagaaagtgtaagaaggataatgattttagattgggatattcatcatggtaatggcacacaaaagtcattctatcaagacgatcaggtgctatatgtgtcattacacagatttgaaatgggtaaatactatcctgggaccatccaaggacaatatgatcaaactggtgagggtaagggtgaaggattcaattgtaatattacttggccggtcggcggtgttggtgatgcagaatatatgtgggcatttgaacaggtagttatgcctatggggagagaattcaagcctgacttggtgattatttcttcagggtttgatgccgcggatggtgatactatcggacaatgtcatgtcaccccaagttgttatggacacatgacacatatgttaaaatctctagctagaggtaatctttgtgtagttttggaaggtggatataacttggatgcgattgcaagaagcgctttgagtgtagcaaaagtactaataggggagcctcctgatgaactacctgatccattaagtgatcccaagcctgaggtcatagaaatgatagacaaagtaattcggttacagtccaagtattggaactgttttagaaggagacatgctaactccggttgtaattttaacgaacctattaacgactcgataatatctaaaaattttcctctgcagaaggctattcgtcaacaacagcaacactatttaagcgacgaatttaatttcgttactttaccgttagtaagcatggatttaccagataatacagtgctatgtactccaaacatttccgaatctaacactataattatagtcgttcatgatacttctgatatctgggcaaagagaaatgttatttcaggtacaattgacttatcctcatcagttatcattgataattctctagactttatcaaatggggacttgacaggaaatacggcatcattgatgtaaatatacctctaactctgtttgaacctgacaattactcaggaatgattacatcccaagaagttctaatatatttatgggataactacatcaagtattttccttctgttgccaaaattgcttttattggaataggagactcatactcaggtatcgtacatctgcttggtcacagggatactagggctgttactaaaacggtaattaatttcttgggagacaagcagttaaagccactagttcctctagtagatgaaacattgagtgaatggtacttcaaaaactcacttatattttcaaacaatagccaccaatgctggaaagaaaatgaaagcagaaaaccaagaaaaaaattcggtagagttttgagatgtgatacggacgggttaaacaatataattgaagaaagatttgaagaggctacagactttatactggattcgtttgaagaatggagtgatgaagaatga

SEQ ID NO: 81125 - DNA, 105 bp, Saccharomyces pastorianus
atggattctgtaatggttaagaaagaagtactggaaaatccagaccatgatttaaaaagaaagctagaagagaacaaagaagaagagaatagcctctctgggatc

SEQ ID NO: 81126 - DNA, 1509 bp, Saccharomyces pastorianus
atggtaaaagagacagtcctttctaatcacgacaatgtcaccataataaacgaattactgccaacgtcttctgccatgcaccaggaagaaagcaccgctatgacaacctcctacctcttatcccactccgtaaatgatagttgcaacgtaatgctttcttcctcctcccacaaccgtgccatgctcccaccttctcttgtgcaaagaaataacactaccacatctcccacaacagactctgcatcagaacacaacgaatcggtaccctcactaacctcatctgttagcacatcctcatcagtttattcgtcatggaatcctcctcattctccccacatatcgtcatttccagacggcaacttcacatcgcttaacgcagaagtgacttgctttgatttccgccgcaccaaggactccagaacaaaagagacgaatgaatctatcattccaactgaaatttactgcccaataaattccactgatcaccacaaacattatccaggccgagagtatgaacaagaagcctgcgctcctgccccctgcaatcaaaatataagctgcagcgtcgggtccacagcggaattttcccagtctaaccacacgttgactactgtagttccttcatacatgcaaaagtaccttgacaggccacagaactggtttgaaagcaaaatgggaaaatactgtccactcttcctgagaagtacaaagaacattgactacgattcgctcgaatttaaatttgagcgcaagatgatagctgttcaatacctgcttttagacgaacaatctgagcccagaaggtactacaacccttcaaataaaagtattccattctggaagagacccttcaacttcgatacaatgcccagttacgaccaacttatggaggaagcagagcgccgtttttattcataccaatacaaatacgaaggtttccagaggattgaaccctactctattttttgtccctggaaaaacacacagagagaaatagatctggttcttgatcacattcatttttctctcgatgtcggcgagaagaagtctttaaaccgaaaaggaaacatcactctcgataccttagacagtaaggtcgatcctaacattcagatcaagccgtatcagatttttccgtccaacaacctagtatacgaaggcctaccgcatcctgccgaacaatccctaattttgagtcctgacacctctctcattgagagggcgtttcaggcactgatagacatatgcaaggaatccattccatcttctaatgactgtagtacccgcaataataatagcgctcctcagcttaccgtgccagaaccatctaaaccatgccggctgctacttgttcgtgagtctcgcacagcaactgaactaaaaactaataaaaagctctggctccactcacaaagaaggaatatcgaagtgaccgtaccaatgcatccttctgagcgtgggacaaaaagctggttacgaaaatggctctcaacttttgtacatcagtga

SEQ ID NO: 81127 - DNA, 783 bp, Saccharomyces pastorianus
atgtgggacatgcaaactggtagttcaagaggttacggttttgtttcctttacttctcaggatgatgcacaaaatgccatggacagcatgcaaggtcaagatttgaatggtagaccgctaagaatcaactgggctgctaagcgtgataacaataacaataataattatcaacagcgtcgtaactacggtaacaacaaccgtggtgatttccgtcaatataacaatagcaacaataacaacatgaatatggggatgaatatgaacatgaatatgaatatgaacaacagcaggggcatgccaccaagttcaatgggaatgccaattggcgccatgccattaccatctcaaggccaacctcaacaatcccagaccattggtttacctcctcaagtaaatcctcaagctgttgaccacatcattagaagtgccccaccaagagttactactgcctatatcggtaatattccgcactttgccactgaagctgatttaattccgttgttccagaacttcggttttattttagatttcaagcactatccagaaaagggctgttgcttcataaagtatgacactcatgaacaggccgctgtttgtattgttgccttggcaaacttcccatttcaaggcagaaacttgagaaccggttggggtaaggaaagatcaaattttatgccacagcagcagcaacagggcggtcagccacttataatgaatgaccaacaacaaccggttatgtctgagcaacaacagcaacagcaacagcagcagcaacaacaataa

SEQ ID NO: 81128 - DNA, 366 bp, Saccharomyces pastorianus
atgtctgaaaataacgaagaacaacatcaacaacaacaacaacaacagcaacctgttgccgtcgaaactccctcggcagttgaagctccagcatcagcagatccttcttctgaacagagcgtcgctgtcgaaggcaattctgaacaagctgaagacaatcagggtgaaaatgatccttccgtagttcctgctaatgctattaccggtggtagggaaacttccgatagagttttatatgttggtaacctagacaaagctatcaccgaagacattttaaagcaatatttccaagttggcggaccaattgctaacatcaaaatcatgatcgataagaataataagaacgtcaatttacgcttttgttga

SEQ ID NO: 81129 - DNA, 1611 bp, Saccharomyces pastorianus
  modified_base (16)..(16): a, c, g, t, unknown, or other
atgttagtaggtacgngatttattcccaaaatgaacgattatggcctttttgaatattcggattatattgctggattatcaggcggaagttggatcttgatggatttggtagttcaaaattttgaagtaagatccctgctacaagagtgggaccttgaagaggatcttttattaggcataccggaattcgatatttccgaagaagaaattgttaccaatgcaaaaaaggagtataatgataatgatttgaagatgaagaagcgtcaggggggttctctgattacaagctcttcaaatttttatgaacaaatagaggagatcatgaattccatagaagaaatcccagaagactatatgataacgaagagaaacttgaatccattagcaagactaaaaaaaatattctttcctaacaacactttcactggaactgatgcgaagattgaaacctttaaaacagtgctagacttttacaaaagtttgcatttgaaaattaagcctaaaaaaatggagggtttccaaatatcgttcaccgattattggggtaaagcaatcgttcaaagactaaaaaaaaatttcgatgacgatcccaaccattccttttcgttttcgaagcttgtaaactcgtctaaaaaatttaaggaatgcagtgtgccgatcccaatattcgttgcaaattgcaaaaatggacttctttcaaacgttatatttgaatttacgccctttgaatttggatcttgggaaaatatcctcagacttttcgtcaagttgccctatttgggctcaaaaattgtttctggaaaggccgagaagtgtattaataactttgatgatctaggttttattactgcgacgtcttcttcaatattcaacaatgtgctcatcttcatctggaatttggcttctcagtcctccagagaagcaatgaaagctttgaatatggttatgggaatttttggcctaggtaaagaggaaatatttagtatttcgaaagactcctcgagattagagacagactatgccgtatatcaacccaatcccttttatctttatcctgaaaaagacaatgtcctaactaacaaaaatcatttataccttgtagacggcggagaagacggcgagaatattccactcagaacattggtgattcctgaaagggaactagatgtaatttttgttctggattctagttcggatattgacaactatccaaacggctccaagttaaaaaggatattcgaaaaattagatgaagagaacgttcattaccaatttccgaacaatgtaaaaacattcactcaccccattgttataggatgcaatgctaccaaaagaactggacatgattcatttttgccaattataatttatcatgccaatgcgaatcatggaaacgcatctaatacgtcgacattcaaaataacttacaatcagtctgaagttagcagtatgttactcactggaaggggagtgtttagcaatgattatgacctttattataaaaattgcttaggctgtatattaaccaaaagaacaatggacaggctcccaagaaaaaagaaattttcgccattttgcttacaatgctttaaagactactgttactcataa

SEQ ID NO: 81130 - DNA, 426 bp, Saccharomyces pastorianus
atgaaaccaattatcaaggttttattgaccagattagttggacaagagtctattcacaaaattgacattgtttccaatgaagtggaaatcgatgcacatgatcaatggaaaatcatctataaggatgaaagtcccttcggacatgacaaatccagaagtatcgatgcttataaaaagaaatttgaatctaccttgaaagctggtgaacaaagacccgtttacttttactgtggtgacggtgtttctgatctaagtgctgcaaaagaatgtgatttgctatttgccaaaagaggtaaagatttggtcacttattgtaaaaaacaaaacgtcccatttcatgaattcgataccttcaaagacatcttggctagcatgaaacaagttctggctggtgaaaagacagtcgctgaattgatggaaaattag

SEQ ID NO: 81131 - DNA, 303 bp, Saccharomyces pastorianus
atggtcaaagctgttatttttaccgatttcgacggtaccgttactttggaagattctaacgattatctgaccgatactttaggtttcggtaaggaaaaaagattaaaggtcttcgaaggcgtgttagatgatactaagtcttttaggcaaggtttcatggaaatgctggaatccatccacacccctttccctgagtgtatcaagatcttagaaaagaaaattcgattggatcctggtttcaaggatacattcgaatgggctcaagaaaatgatgtcctgtcatcgttgtttccagcggaatga

SEQ ID NO: 81132 - DNA, 726 bp, Saccharomyces pastorianus
atggcaatgtttaatacaaatgattccattaaagggttcgcaaaggcatccttcgaattagctctcaaaagaaaactaccgttattctttacaaccaaaaacactattctgaaaaattatgataatcagttcaaacaaattttcgataatttgttcgataaagagtataaggaaaagtttcaggctttaaaaataacatacgagcatcatttgattgatgatatggtagcacagatgctaaaatcaaagggcgggtttataatcgccatgaagaattatgatggcgatgtccagtctgacattgtggcacaaggatttgggtctcttggtttaatgacgtccatattgattacacctgatggtaaaacgtttgaaagcgaggctgcccatggtacggtgaccaggcattttagaaaacatcaaagaggcgaagaaacatcaacaaattcaatagcctcaatatttgcctggacaagggcaattatacaaagaggaaaattagacaatacagatgatgttataaaatttggaaacttactagaaaaggctactttggacacagttcaagtgggcggaaaaatgaccaaggatttagcattgatgcttggaaagactaatagatcatcatatgtaaccacagaagagtttattgatgaggttgctaagaggcttcaaaacatgacgctcagctccaatgaagacaagaaaggtgtgtgcaaactataa

SEQ ID NO: 81133 - DNA, 1059 bp, Saccharomyces pastorianus
atgagtaaaattaaagttgttcatcccatcgtggaaatggacggtgatgagcagacaagagttatttggaaacttatcaaagaaaaattgatattgccatatttagatgtggatttgaaatactatgacctttcaatccaagagcgtgataggactaatgatcaagttacaaaggattctgcttatgctaccctaaaatatggggttgctgtcaaatgtgccactataacacccgatgaggcaagaatgaaagaatttaaccttaaagaaatgtggaaatctccaaatggaacaatcagaaacatcctaggtggaactgtttttagagaacccatcattattccaaaaatacctcgtctagtccctcactgggagaaacctataattataggtcgtcatgcttttggtgaccaatatagggctactgacatcaagattaaaaaagcaggcaaactaaggttacagtttagctcagatgaaggtacagaaaacatcgatttaaaggtttatgaatttcctaaaagtggtgggatcgcaatggcaatgtttaatacaaatgattccattaaagggttcgcaaaggcatccttcgaattggctctcaaaagaaaactaccgttattcttcacaaccaaaaatactattctgaaaaattatgataaccagttcaaacaaattttcgataatttgttcgataaagaatataaggaaaagtttcaggctttaaaaataacgtacgagcatcgtttgattgatgatatggtagcacagatgctaaaatcaaagggcgggtttataatcgccatgaagaattatgatggcgatgtccagtctgacattgtggcacaaggatttgggtctcttggtttaatgacgtccatattgattacacctgatggtaaaacgtttgaaagcgaggctgcccatggtacggtgaccaggcattttagaaaacatcaaagaggcgaagaaacatcaacaaaatcaatagcctcaatatttgactggacaacggcaattatacaaagaggaaaattagacaatacagatgatgtataa

SEQ ID NO: 81134 - DNA, 510 bp, Saccharomyces pastorianus
atggaaagtcagttgattattgatgaagaaaaagaattaacacatttatcaagtaatgctgtcgattctgatgatttagaggaaatagcctggaacatttccatgtggtctattttaaattatgaaatggatgtccataataaggttaatggaccgttgactagatcactatatggtaaaagaaacccacaaggtgtactagtcgatgttgttattgaacgccttctgcatcatacaaactccaggtatatgtacaaacgtttaaatatgaaggacgatgacaaattagagttcaagtttgattttgtctttgatagttgcgacgaagtggaggaaatggatctctcctgcctaatctgcaaagttaataaaagaaatattgtaacttggccctgtagatgccttgcattatgcgatgattgtaggatatctctgggttataaaggatttgctacatgcgtcagctgtgatagtgaggtgaagggttacagtaagttgaatatagtctag

SEQ ID NO: 81135 - DNA, 381 bp, Saccharomyces pastorianus
atgtctacaaatatattgcaacatgttaagcaattgctccataacagagatgtatttagcttttttcacaacaagactggaaatcttaattacctagataacacaactcagaaaccggaagtttttgtaagtccaaattctacaatagtttcagccccaactttggactcttttcaagcattgatggagaaaggtaacttcaccactttgcaactagctaaggtaggaattagaatgtttttctcctattcggtaagtaagtatgctgttctatgttttagtaccgccattattttgaataggttgactgtaatgtcttcattgagatcaaattctacaaacattcgtttacctctttggtcaaaactttgctccatttag

SEQ ID NO: 81136 - DNA, 498 bp, Saccharomyces pastorianus
atgcatgaactgcacgtgagtgatacagatttttatgctttaagtgtctatttatttgtagctctgtctgactgcattgaaatttttatttcttcaacgacgaacgttccttcattaatatgctctgatttttccatatggggtttatcattgaatctttatatcatatccaaaatgcccgcggggcagcagcatattggcgataatgttgaactactaggagcggtttttcacaggttagtaattcatttggtagaattgtttcatataagagcctatagattatgtggagaagttatattaaacgcgggtttttttaccgcattcgtcactaggacctatttgaacggattagattttattaacatctgtctcattcacaattatttccctggctttttctatatttccaccatattactggcgtctataggcattttcctgaaggctttgttcatcagtaatccgtccgatcattatattcaagtatatacataa

SEQ ID NO: 81137 - DNA, 150 bp, Saccharomyces pastorianus
atggtgaaaatcaaatgttgcaatggagaagaggagtttagcgcaatagctctttcattgtgtctacttttaccgtcgaatgactatgtaatatttcaccaatcagacaacgtagaacccgttaatgaagtccctgctttcggtatatag

SEQ ID NO: 81138 - DNA, 141 bp, Saccharomyces pastorianus
atgattccaaaggggcaccaactggaagtagctgtcgttgaatacgataacgtcgatgatgcagatgtttgtattgaaagattgaataattataactatgggggttgtgatttggatatatcgtacgctaaacgcctctag

SEQ ID NO: 81139 - DNA, 1458 bp, Saccharomyces pastorianus
atggttcccggtgtcatttctacgggaattgaaagctggggagttattggagacgatgagtgcgatagttctgcgcattttcgtaaacggctgtggggaagtttttacatgctgagaacaatggttatggataaagtttgttggttgaaacatgtaatgttagatcctgaaacaggtctggacccaccgaactttacgctacgtgcagcacagggcttcgaatcaactgattatttcatcgcagggtattggatttggaacaaagttttccaaaatctgggagtaattggctatgaacccaataaaatgacgagtgctgcgtatgattggaggcttgcatatttagatctagaaagacgcgataggtactttacgaagctaaaggaacaaatcgaactgtttcatcaattgagtggtgaaaaagtttgtttaattggacattctatgggttctcagattatcttttactttatgaaatgggtcgaggctgaaggccctctttacggtaatggtggtcgtggctgggttaacgaacacatagattcattcattaatgcagcagggacgcttctgggcgctccaaaggcagttccagctctaattagtggtgaaatgaaagataccattcaattaaatacgttagccatgtatggtttggaaaagttcttctcaagaattgagagagtaaaaatgttacaaacgtggggtggtataccatcaatgctaccaaagggagaagaggtcatttggggggatatgaagtcatcttcagaggatgcattgaataacaacactgacacatacggcaatttcattcgatttgaaaggaatacgagcgatgctttcaacaaaaatttgacaatgaaagacgccattaacatgacattatcgatatcacctgaatggctccaaagaagagtacatgagcagtactcgttcggctattccaagaatgaagaagagttaagaaaaaatgagctacaccacaagcactggtcgaatccaatggaagtaccacttccagaagctccccacatgaaaatctattgtatatacggggtgaacaacccaactgaaagggcatatgtatataaggaagaggatgactcctctgctctgaatttgaccatcgactacgaaagcaagcaacctgtattcctcaccgagggggacggaaccgttccgctcgtggcgcattcaatgtgtcacaaatgggcccagggtgcttcaccgtacaaccctgccggaattaacgttactattgtggaaatgaaacaccagccagatcgatttgatatacgtggtggagcaaaaagcgccgaacacgtagacatcctcggcagcgcggagttgaacgattacatcttgaaaattgcaagcggtaatggcgatctcgtcgagccacgccaattgtctaatttgagccagtgggtttctcagatgcccttcccaatgtaa

SEQ ID NO: 81140 - DNA, 243 bp, Saccharomyces pastorianus
atgggcacactgtttcgaagaaatgtccagaaccaaaagagtgattctgatgaaaacaataaagggggttctgttcataacaagcgagagagcagaaaccacattcatcatcaacagggattaggccataagagaagaaggggtattagtggcagtgcaaaaagaaatgagcgtggcaaagatttcgacaggaaaagagatcgggatacggtagaatacgttggagagattccagaagactga

SEQ ID NO: 81141 - DNA, 603 bp, Saccharomyces pastorianus
atgcttctaaataaaaatctaaattgcgcggactttgttttctactttgacaggttagcaacaattttgttatcatgggcacttgatgacattcctgtagcacatacgaacataattacacctggtgagcataccatgaaaaacgttgttgcctgtcaattcgatcaagttacagctgttaatattattcgatctggcgattgttttatgaagtctttgagaaagacgatccccaatatcacaattggtaaattgttgattcagtccgattcacaaactggggaacctcaactgcattgcgaatttttacccccaaatatagaaaagtttggcaaggttttcttaatggaaggtcaaatcataagtggtgcggccatgatcatggccatccaggtgcttttagatcatggtattgatttggaaaagattagcgtggtggtttatttggccactgaagttggtatccgacgtatattaaatgcatttgataacaaagtcaacatttttgctggtatgatcatctccagagaaaagttacaaaatcatcaatacaaatgggcattgaccagatttcttgattcaaagtattttggttgtgattga

SEQ ID NO: 81142 - DNA, 711 bp, Saccharomyces pastorianus
  modified_base (13)..(13): a, c, g, t, unknown, or other
  modified_base (48)..(49): a, c, g, t, unknown, or other
  modified_base (60)..(62): a, c, g, t, unknown, or other
  modified_base (97)..(98): a, c, g, t, unknown, or other
  modified_base (115)..(116): a, c, g, t, unknown, or other
atgaaaccaaggnagaccacattggaaaagctaaatgcagtccatggnnatggtgaagtnnnagatgtccaaaaaaacccaaaagggaaaaagctcnntcggtatatccccaccnnatggacaactccatatataataggtataggtggtgcttcaggttcaggcaagacaagcgttgctgctaagattgtgtcgtcaattaatgttccctggacagtattaatatctttggataacttttacaatccattaggcccagaggacagagccagagcctttaaaaatgaatacgatttcgacgagccaaatgccatcaacttagatttggcatataagtgcatcttaaacttgaaggagggcaaaaggacaaatatcccagtttatagcttcgtccaccacaatagagttcctgataaaaatatagtcatatacggggccagtgtggtagttatcgaagggatctacgccctttacgatcgtcgattgctggatttgatggacttgaaaatttatgttgacgctgatttggatgtctgcttagcaagaagattgtcgagagatatagtttctagagggagagatttggatggttgtattcaacaatgggagaaattcgtgaaaccaaatgcggtaaagtttgtgaaaccaacaatgaagaatgcagatgctatcattccatcgatgagtgataatgcaacagcggtaatttaa

SEQ ID NO: 81143 - DNA, 1239 bp, Saccharomyces pastorianus
atgattcctctgcttattgtagtgttccctgttatcaaggaccctatcacctcccaaccaatgtctccccgtgattcctctcagttcatcttatcaacgatgtggtcgagtgtcatcatgcttttgctgggtgggtttactttagcagccgctctttccaagtacaacattgccaaagtcctttctacgcatattttggcatccgccggtacaaacccacattttattcttttaacaaatatgtttgtggcgctctttgtttccatgtgggtttctaatgttgctgcccccgttctttgctattcaattgttcaacctttgctcagaacactgccaagaaattgttcctatgccaaagctctaattcttggtatcgctcttgcctccaatatcggtggtatgtcttctcccatcgcttctcctcaaaacattttttctattggtataatggacccttcaccatcttgggctgaatggtttatgattgcgctacctgtgtgctttatttgtgtcatggcaatttgggtgctattgatcataaccttccctcctgagccaaatgtgaaaattttgcaattgcatccatcccgtgatccattcactctgaagcaatggtttgtcactttagtttgcattataacaattgttctttggtgtctttcaaaccaaatctccggtatctttggtgaaatgggaatcatatctattatacctatagtagtcttcttcggtacaggtcttctaacttcggatgatttcaataatttcatgtggacaatcgttgttttggccatgggaggtaccaccctaggtaaggcggtaagctcatccggtttattgtctacaatggcacagttaattaaggcgcaggttgagcatgaaccaatcttcattattgtgttgatcttcggtctagtgattcttgtaatggccacttttgtctcccataccgtcgcggcaatgatcatcgtaccattaatgagtgagatcggttccaatctaccttcaggtgatcattctagactattgatcgttatagccgccctattatgctctagtgctatgggtcttccaacctctggtttccccaacgtgactgccatttcaatgattgatgaagttggtgatagatatttgaccgtgggtacatttattacgagaggtgtaccagccagtttgttaagttatgccgctattgttacagtaggttatggcatattgaaagtaatgggattttaa

SEQ ID NO: 81144 - DNA, 1320 bp, Saccharomyces pastorianus
atgaagttctcgcattccttacaattcaattctgtaccagaatggtctaccaagtatctggcctattcgcagctgaaaaaattgatctattctttgcaaaaagataagctgtacagtaacaataagcaccatgttgtggagccacatgacgccaacgatgaaaatctgccgctattggcagatgcttctccagatgatcaattctacatctctaaatttgttgctgccttaaaccaagaattgaaaaaaattgataaattctacatatctcaagaaacaggtcttatcgccaactacaacgagttgaaggacgatgtcatggaactggaaaacacgaacaaggccacccaactgtttaatcagcagcaacagcatcaattgcaaagtgttgcaagaaacaggaagtctaagtcacaacaacgccaaagaaggtttagtagtgtctcctccacggactccaacccctctctgacagacatgtcgattgactctgcacccgtcatccacacgcaggtctcgaacacgactaataatggtaactcaatgcaaaacctggcctccgcttcagtgtcgctttctaactctaaccctgtgtatctttctccttttacccagcataggctctctttaaagaaaagattgatatcgatctacacccagttgtccgagttgaaggactttattgagttgaaccagaccgggttctccaagatctgcaagaaatttgacaagtccctaaatacgaacttgaagcagaactacttgaactatatcaaattccattcgcatgtcttcaatcctgctacaataaataggattcagcatcacattaccgagaccatcctcacttacgctagcttgaacaagggcacgcgtcgaccatctaatacgtttaatttggacgctgaccgaatcaacaatgacgaaaacagcagcggtaatgaagaagacgaagatggcaacagacaagaagtcctcgatttccaggatgctgagcgtgaattatcctctcatttgagagatcatgtagtttgggaaagaaacaccgtttggaaagatatgatgaatttggagagaaagtaccagtctgccaagactgacaacaagaagttttcaaagttgagttccagtcaattgcgccccagtgccaacattactgaatccatggcaatgtcgagtggtggcgccggtattatcgctccatcaacggactccctaactttccgtgaactcatgcatttaccacccaagcaatggttgcaatttatcatgggccaaacttccctgctgaagtttctgttaatcacctcatgtttcatg

SEQ ID NO: 81145 - DNA, 1002 bp, Saccharomyces pastorianus
atgtatttaacagaaaaactaaaactacactggctgtccaagatcttcctttttttgcattctttagttttattgatgaaaatgcattctttcgccttctacaatggctatctatggggtataaaggaagaactacaattttccaaaagcgctcttgccaaatacaaggattctataaatgatccaaaagttattggtgctcttgagaaaagctgtgagttttgtagttttgaattgagctctcagtctttaagcgaccaaactcaaaaattccccaacaatatcagtgcaaaaagctttttttggttcaccatgtttccaaccctaatttaccaaattgaatatccaagaactaaggaaatcagatggagctacgtattagaaaagatctgcgccatcttcggtaccattttcctaatgatgatagatgctcaaatcttgatgtatcctgtagcaatgagagcattggctgtgcgcaattctgaatggactggtatattggatagattattgaaatgggttggattgctcgttgatatcgtcccagggtttatcgtgatgtacatcttggacttctatttgatttgggatgccattttgaactgtgtggctgaattgacaagatttggcgacagatatttctacggtgactggtggaattgtgttagttgggcagacttcagtagaatttggaacatcccagtgcataagtttttgttaagacatgtttaccatagttcaatgagttcattcaaattgaacaggagtcaagcaactttgatgacctttttcttaagttccgtcgttcatgaattagcaatgtacgttatcttcaagaaattgaggttttacttgttcttcttccaaatgctgcaaatgccattagtagctttaacaaatactaaattcatgaggaacagaaccataatcggaaatgttattttctggcttggtatctgcatgggaccaagtgtcatgtgtacgttgtacttgacattctaa

SEQ ID NO: 81146 - DNA, 684 bp, Saccharomyces pastorianus
atgaatagcagtggggataatgctgggtttgagtggtggagacggaccatgcagtacaagactggtataggcttgacaccggaggagaaaactcgatacgaagacgactctaaagctcgagaactaaaaaaggaatgtctgaaatgttatgagtatcgagattggatgcttaaatactctcccacagttcgctttatggtacaagctattacgaaacttaataagggtagcgacagtaaattcgacgattcgaagatcatctgcgattactgtcccgactggaagggcggtggctttcatcctgaattgggaatcctattgtgccagaacaggttacgtgataagtggcatttagaggatacgctttcgcatgaattaattcattatttcgatgatctaaaatggcaagtagattggttaaatctgaagcatcatgcatgttctgaaatcagagcctcttcgttaagtggggaatgcaggttttgggaagagttcaagagaagagggtttaggacaggattccatgtggcaaggggacaccaagattgtgttagaaggagggcaataattagtgtttcagggaaccccaactgccaaagcaaagaacatgcagcaaaaattgtagatgaagtttgggacagttgcttcgccgatacgagaccgtttgatgagatttacagatga

SEQ ID NO: 81147 - DNA, 603 bp, Saccharomyces pastorianus
atggatgtcgacatgaagggtgaattggcggtactggcaagtaatgacaattccatagctcttgtgaaactaaaagacctgtcaatgtctaaaatattcaaacaagctcatagttttgccattacagaggtcactatctctccggactctacatatgtggcgagtgtttcggcagccaacactatccacataataaaattaccgcttaactacgccaactacacctcaatgaaacaaaaaatctctaaatttttcaccaacttcatccttattgtgctgctttcttacattttacagttctcctataagcacaatttgcattccatgcttttcaattacgcgaaggacaattttctaacgaaaagagacaccatctcttcgccctacgtagttgatgaagacttacatcaaacaactttgtttggcaaccacggtacaaaaacatctgtacctagcgtagattccataaaagtgcatggcgtgcatgagacgagttctgtgaatggaactgaagtcttatgtactgaaagtaacattattaatactggagaggcagagtttgagatcaccaacgcaacttttcgagaaatagatgatgcttga

SEQ ID NO: 81148 - DNA, 699 bp, Saccharomyces pastorianus
atggtgcccaagacagtaatgactttttgccagtatattgatagtgtaaaagatcgccttgcttctcgtcacagttactcgccagaacgcgattttgataaaattctaccgaatggagctatagaaggtagctccgtttcttcctcctctattgaagaaacggaaatgttggctccaaaactcccggaagaaaatcatagtttaattcatgataggccaggcagagtttccatgattaaggacgataggggtcttaagtttataatggagaccagtgagacgccacttgaaggtgaaagtgttgtgtttggccaagttaccgccggattaaaagatctgatggataaactagctaatgtgaaaactgacgaaaatggcaaaccagagcaaccaataacaataggttacatttcatcccaggaacacagggttcagcatgcaaaggaagctcacgaaaagtatttacaaaggcttcaagattaccaaaacggcgatttggaaaaaggtattaccttgaagaattatttataccagggtagtcaaagaaagttagaagacgcaaaatataatcagcttcaccatcctttaccaaagattatgcttggtatttcggtattgttacttttctacgttttggccaagtacaggaaaagaatattcaacagatcgtctaaaatagtttctattagagaggattaa

SEQ ID NO: 81149 - DNA, 150 bp, Saccharomyces pastorianus
atgaagagcttttttctttatctttatgtggcattcatgtttagttgcataacggctctgccattacctgtggataacaaaagggcttcttcagactccttagacctaagaaaaaatacgcaccagaccctcctattacacataatgtaa

SEQ ID NO: 81150 - DNA, 2538 bp, Saccharomyces pastorianus
atgtttagaaacgtcggctattatattgatgatgcaggcgaactgatcgcagcagaatttacgaagttgacacttagattggttcacagattgcacgcttaccttttaaggcagcaaaacactccgccaaaattagagaatgaagctgctgctgaaaaatggctggtgcaaatattcgaaatacttggatccatgaaaagaaaactcaatagattcaccaatattttgacaaaagcatttcaaaattttgtccgctacaagatagaagatcacaactatctgctaaagcaactaaaagaaacaggccactttcttatatacacaggaggttacctagagcaaaatggtacttatttaattggtagcccagagctattaggctgtaaagatgatgatattttaagaatcattaagaattcagacatcggttgtgatttagtgcctaagctagaaattaataacagtctgacaatttataatgctttggatgataattggaactccaactcatcactgggttcagatatctcgaatgatggtaccccattttattatatcaaaaacgatttgaccacccagcctagatcttataacggtaatagagtcaatcgtgaaccggattttgaaaacagcaggagcacggaggaagagatttatgaactggagacaagattgaactctcttggttatgtattggtattgactccgcaagagccattactttgggagggtgagatgtataatctatccgataacaaaacaattaaaccagagggattgaacttgaaagtaattcccaattcaatagatttgatgtgccaaggatccagttatgccttagaataccaatgtgacaggttccaacagatatctggtagctcagtttctttcttggaaaaaaaatcttcctcagaaacggttaaaaacaacttacaaaggataaataaagcatatttcagatgcacgtacagtgttctgaagaactatacaaagattgtgaccacgttcaagaaggtaagtcctgtcaatgatttattgaataatattttcctttttgggagggattttggtctgaactttttgagaattaatgttgccaacaatgaaaaaagatccattataatacttttaatgatgcggttaagtatcggatggctgaagttcttagctgaagactgcgatccgactgatcaaagggtatttaggtggtgtgtcacgtcaatggagttcgcgatgcatatggtaagcggttggaacatactagctcttgatgaatgcctattttcttctttaaaacaaaaaatttcagaatgcatgtcattacttatttctcattttgatataataggcgcacgctccatagaagttgagaaaatcaatcaacaagctagatcaaatcttgatttggaagatgtgtttgacgatgatatgatgctacaagtgaattccgagttccgagtacaaagtataatggaattggaagaaaggataaagcggaatcctcatcaaactggtaaagtaattgatgatagtgacaaaggtaacaagtaccttgtttctttggcatcttccatatcgaacgtttctatgagatggcaaaagaggaactttattggtggcggtacttttggaagggtatattctgctgttgatttggataatggtgagattttagcagtcaaggaaatcaatattcaagatagcaaatcaatgcaaaaaatattccccttaatcaaggaggaaatgagtgtcttagagatattgaaccatccaaatatagtttcatattacggtgttgaagttcatcgtgataaagttaacatctttatggaatattgtgaaggcggttccctagcagctcttttggagcatggtcgtattgaagatgaaatggtcactcaagtctacactttacaattactagaaggacttgcatatttgcatgaatccggcattgttcaccgtgatgttaaacccgaaaacatcctactagattttaatggtgttattaagtatgttgattttggtgctgctaaaaaaattgctaataatggaactagattggcaagtatgaacaaaatcgaaaacgcagatggtgaacacgaagatgttacccatgtttctgattcaaaggcagtgaaaaataacgaaaatgctctattagacatgatgggaactcctatgtacatggctccagaatccatcactggatctaccaccaaagacaaacttggggcagacgatgtttggtcgttaggctgcgtggtattagaaatgatcactggtagacggccatgggctaacttagataatgaatgggctatcatgtaccatgttgctgcaggacataccccacaatttcctactaaggatgaagtgtcgtctgctggtatgaaatttctggaaagatgtcttattcaaaacccctccaagagagccagtgcggttgagctgttgatggatccttggattgtacaaattagagaaatagcctttggcgacgattcttcctctacagatactgaggaaagagagtag

SEQ ID NO: 81151 - DNA, 123 bp, Saccharomyces pastorianus
atgtttccaatgcgtttggtaaaagatataatactaattcgcctatcttacgcgaagaaaatacagaatccaaccttgatgatgatcgatcaaatgatggacgattttcagtacatatattaa

SEQ ID NO: 81152 - DNA, 1878 bp, Saccharomyces pastorianus
atgtcgcattcagactacttcaattataagccttacggcgattccacggaaaagcccagcagctccaagatgaggcagtcatcttcatcatcttcatctagactaaggtcggaaagtttagggcgaaattccaatactacgcaggctcgagtagcgtcatcgcccatcagcccagggctgcattctacccagtactttagatcaccaaacgctgtttacagccctggagagtctccattaaatacagtacagctattcgatcgtcttccgggtatacctcaaggtcagttttttcatcaaaatgccatttctgggtcctccagctcctcggcaagatctagtagacggccctcgtatattggtcttcctctaccaaaaaatcctcagcagtctctaccgaagttgtctactcaacctgttcctgtacataagaaagttgaggctagtaaaacagagagcgagataattaagaagcccgctcccgtgaatagtaatcaagatccattattgacgaccccaacgttagtgatatcaccagaactggcttcactaaatacaacgaatacatcgattatgtcaacgccacaaaatattacaaaccaaacttcgaacaaacacattcccaccagatcgcaaccaaatgggtcaacaagttcctccactttgcaggatattgtcacgacaaatagctcgcaacggtctgtaggccaccatggtggaagcacaacgagtctccgaacatacaaaaaacaatatgtattaaatgaacagttatatttaagaaaaatgagaaaccgtgctaatgatgattattacactagaggtatagtcgcatcatccaactttgaagatgacgaagaaaattttagtaacaaaggtgaagatgacttagaactagaaatggatgatcttttaaaggtagaaggtgaggataaagataacgacttcaattttggttataattttattacgtcgagcacaaaaaataatgaaaatgttgtttcgatgagcctaaattatctaaagggcaaattggattggttgagggatgtgaacaatgatcaaccgtgtgaaatagaagatgaggagtggcattccatactggggagcgaggatttgctgtcaaaattgttacaaaatcctatggtgaacaaccgatttgaatggcaaacaatgttatctaaggtactgaagggagatattgtgaggaatgaaaaaacgaagattgcaaatcaagggaaaggccctggcttcaatactcagttttcagatgacatttggattgagttgaaggcatggatgaatgggaggaccgtggaagatcagaacaaatctctgaggatttttagggattctactgactccgtatttcaagaaatcatggcctttaaactagaagataatatgagtgctgacgaggctgcagagactatcaaatcactagtagacaaatattatagagtcttaaatctatggcctaacattaaaagaatgcatgctgaaaaacccattactaaaacagaagcattcaggaatcgaatagatactttgaatagttggcttaatttcaaatttaactttgatactaatattgcgtacctgaaaaaatggatagttggcaataaagagctagaaagcactaccgaagtggataacaccaccgtgaatttggatgatccagccgttttcgccactaattgtaaacgctttgcggagcaaattatgaaggaaaaggatattgaactgatatttcaaaaaaaaatattctttccattagcaccatggattttgaaggccaaatttttcttcttgaaataccaaaaaacttggaatgaattgaatctatcttatttggatcaagatctggaattttattga

SEQ ID NO: 81153 - DNA, 552 bp, Saccharomyces pastorianus
atgaacttggcaaaagccacacgaatcctgaagacaccaaaagaatttggtgagaacttaatgattttggacttaatcagaaacgacctttacgagttggttcctgacgttagggtggaggagttcatgtccgtggaagaatatgccaccgtttaccaactcgttagcgtcgtaaaggcacatggattgacctctgccagtaagaagacgagatattcaggcattgatgtccttaaacactcgcttcctccgggatctatgacgggagcccccaagaagattactgtgcaattattgcaggacaagatagaaagcaagctaaacaaacatgtcaatggtggagcacgtggtgtttacagcggtgtcacgggatattggtctgtgaattccaacggagattggtctgttaacattagatgtatgtattcctacaacggcggaaccagctggcaactcggtgcaggggggggcataacagtcttaagcacactagatggggaactagaggaaatgtacaccaagttggagagcaacttacaaattttcatgtag

SEQ ID NO: 81154 - DNA, 1725 bp, Saccharomyces pastorianus
atgctgtccgatacaattgacacaaagcaacaacagcaacagcttcatgtcctgttcatagactcttatgattcattcacctacaatgtagtgagactaattgaacaacaaactgatatctcaccgggagtcaacgccgtgcacgtgacgacgatacatagtgatacgttccaatctatggatcagctattgccacttttgccgctttttgatgctatcgttgttggcccaggacctgggaatcccaacaatggtgcacaagatatgggtataatatctgagcttttcgagaatgctaatggaaagttagatgaagttccaatattgggcatatgtcttgggttccaagcaatgtgcttggctcaaggtgctgatgtcagtgagctaaatactatcaagcatgggcaagtgtatgaaatgcatttaaacgatgcagccagagcttgtggccttttttctggttatcccgatacgttcaaatctacgaggtaccattcattgcatgtcaatgccttcggcattgacacccttttgcccttatgcacaaccgaagatgagaacggtattcttttgatgagtgctcaaacgaaaaataagccatggtttggcgtacagtaccacccggagtcatgttgttcagaattgggggggctgttagtcagtaactttctcaagttgagtttcataaataacgtgaagacaggaaggtgggaaaagaagaaacttaatggagagttttccgatatcctatctcgattggataggactattgatagagaccccatatacaaggtaaaagagaaatatccgaagggcgaggacacaacttacgttaagcagttcgaggtctctgaagacccgaaattgacatttgaaatttgcaacatcatacgagaagaaaaatttgtcatgtcatcttctgtgattagtgaaaataggggtgaatggtctatcattgctttaccaaactccgcatcccaggtattcactcattatggagctatgaaaaagactacagttcattattggcaagatagtgaaattagttacaccttgttgaaaaagtgtctagatggtcaagattcggatttgcctggctcccttgaggtaatacatgaagataaatcccaattttggatcactttgggtaaatttatggagaataaaataatcgataaccacagagaaataccttttattggaggtcttgttggcattttaggttatgaaataggtcagtacattgcatgcggccgttgcaatgatgatgagaattcccttgttcccgacgccaaactagtttttatcaacaatagtatagtcattaatcacaagcaagggaagctttattgtatttctctggataatacatttccagtggcattagaacaatccttaagggacagttttgttagaaagaaggatattaagcaatccctgtcctggcccaagtatcttccagaggagatagacttcattataactatgcccgataaacttgactacgctaaggcgtttaagaaatgtcaggattatatgcataagggtgattcttatgaaatgtgtctcacaacgcaaaccaaagttgtaccatctgcggtgatagaaccctggaggatttccagaccttggtacaaagaaacccggctccattttcaagtttttttgagtttagagacattattccccgccaagatgaaacgcctccagttttgtgcttcttaa

SEQ ID NO: 81155 - DNA, 105 bp, Saccharomyces pastorianus
gccgccggtcgtgtttcatgctttgtagacgacgatgctttgaaagatgtctttgtaattaagaagaagtacaagttttatgatgatgagaatttgactgagtag

SEQ ID NO: 81156 - DNA, 1185 bp, Saccharomyces pastorianus
atggcatcttcatcaacgtctgtgtcattatacagcccatccacacctgtttactccgtcccttcgacttcgtccaatgttgcaactccttctacgacttcttcaactgttgaaacaactgttagttcacaaagttcgtctgaatatatcactaaatcctcaatttctactactatcccatcattttccatgtctacatatttcaccactgttagtggagtcactacaatgtatacgatatggtgtccttatagctctgaatctgagactagcacattaaccagtatgcatgaaacggttacaacagacgctaaagtctgcactcacgagtcttgcatgccctcgcagacaacgagtttgattacatcttctataaaaatgtccactaaaaacgtcgcaacttctgtaagcacctcaacagttgaatcctcatatgcatgctccacatgtgctgaaacgtcacactcgtattcttccgtgcaaacagcttcatcaaattctgtaacacagcaaaccacatccacaaagaattgggtaagttcaatgacaacttcggatgaagatttcaataagcacgctaccggtaagtatcatgtaacatcttcaggtacctcaaccatttcaactagtgtaagtgaagccacgagtacatcaagcatggactcagaatctcaagaacaatcaccacacttattatcgacatcggtcccttcatcctcctccttgtctgctacattatcctctgacagtactattttgtcattcagttctgtatcatcactaagtgtcgaacagtcaccagttaccacacttcaaatttcttcaacatcagagattttgcaacccacttcttccacagttattgctacaatatctacatctacatcatcactttccgcaacatctacctctacaccatctacctctgtggaatcgactgttgaatcttcatcattgactccgacggtatcttctatttccctctcatcatcatctgctccctcttctctacaaacatctgttaccactacagaagtttccactacttcaatctccatacaataccaaacttcatcaatggtaacaattagccaatatatgggcagtggatcgcaaacgcgtttgccattaggaaagttggtcttcgccatcatggcagttgcttgcaatgtaatttttagttaa

SEQ ID NO: 81157 - DNA, 351 bp, Saccharomyces pastorianus
atgacattatctttcgctcattttacctacctgttcacaatattgttgggattaactaatattgccttggcatctgatccagaaacgattctagtgacgataaccaagacaaacgatgcaaatggggttgttacaactacagtttcacccgcgctagtctccacatccactatcgttcaagctgacactacgacattgtatacgacttggtgtccattgacggtatccacttcatctgccgccgaaataactccttcaatatcgtacgctactaccctatccagatttagtactttgacattatctacagaagtctgctcccatgaggcatgtccttcgtcatcgacgtag

SEQ ID NO: 81158 - DNA, 348 bp, Saccharomyces pastorianus
atgcccgacgacaaggagggttgcgagtgggtgggtccatcgagtagcatgcgcaagttgtacgacttagacctggtgtatggagataatccaggagttgcagaaccgtggaatggcggacaatcttgcacaagcagggacggcagcagcaatagttcagcggaccagcagcttgccgatgagttagggctaccaagattctctatatttactactacaggcggccagagtctattgatgcttctatccttctgccaattgagcaagctgtctatgcataagttcccaaacggtacggatttcgccaagtaccaaggtgtcatatacggtattgatggggaccaatga

SEQ ID NO: 81159 - DNA, 1212 bp, Saccharomyces pastorianus
atgcaatctatgaatgtacaaccgagggtattagctgtaggaggtgagcagtttttctctcagaggcaggcttctgaacaacaccagcagcaaaacatgggacctcaggtgtattcgccacaggttaatagagcaagaatgtttcctcaagggatgcctgtaaatacaattaatggctctgttaatcaggagatgaacaatgcctatcttttgaagcagaagaacgagccactgttaactcagcaacaacagcaacagcaacaacaacagcagccatttaatataggaacgcctgtatcggtggctagtttgccgcccggactgaacgttctgcagcaacaacaacagcagcaacaacaacagcagcaacagcagcagggagtgggactcaatcgtcccttggcttcccagctacccaagcatttaaccaaccaaagtatgccaccgatctttttaccacccccaaattatcttttcgttcgcgatgtctggaagtccaacctttacagtgaattcgccgttataagacaactggtctcgcagtataatcatgtgtcaatcagtactgagtttgtggggactttggctaggccgatcggcactttcaggtcgaaggtcgattaccactatcagacaatgagggccaacgtagacttcttaaacccaatacaacttggtctttccttgagtgacgccaacggcaataagcctgacaacggtccctcaacgtggcagttcaattttgaatttgacccaaagaaggaaatcatgtccacagaatcgttagaattactcagaaaatcaggtatcaacttcgaaaaacacgaaaatttaggcatcgatgtatttgaattttcgcagcttctaatggactctggtttaatgatggatgattctgttacttggatcacataccatgcggcatatgatctaggtttcctgatcaacattctaatgaatgactccatgcccaacaacaaggaggatttcgagtggtgggtccatcaatacatgcccaatttctacgacttaaacctggtgtataaaataatccaggagttcaagaaccctcaattgcaacaatcttcacaacagcaacagcagcagcaatattcactaaccacacttgccgatgagttagggctaccaagcattctctatatttactactacaggcggccagagtctattgatgcttctcatccttctgcc

SEQ ID NO: 81160 - DNA, 387 bp, Saccharomyces pastorianus
atgaaaagaatttttttgattgattgtccaggtattgtgccgccttctagtaaagactccgaagaagacattttattcagaggtgttgtcagagtcgaacacgtcacacacccagaacaatatattccaggtgttttaaaacgttgtcaggtaaagcacttggaaagaacttacgagatctcaggatggaaggatgccacggagtttattgaaattctggcaaggaaacaaggtagattactgaagggtggtgagcctgatgagtctggtgtttctaagcaaatattgaatgattttaatagaggtaaaatcccttggttcgtccttccacctgaaaaggaaggggaagaaaaaccaaagaagaaagaagttgagaagacggcatag

SEQ ID NO: 81161 - DNA, 819 bp, Saccharomyces pastorianus
atgggtactggtaagaaagagaaatctagacgtattcgtgaaggtgacaccaaagatggtaatcttcgtgtgaagggtgaaaatttctacagagactccaagagagtcaaattcctgaatatgtacactagtgggaaggagatcaggaataagaaaggtaatttaattagggccgcttctttccaggactccacaataccggatgcgagggtccaaccagatcgtcgttggttcggtaacacaagagtgatatctcaggacgcactgcagcatttcagaagtgcattgggtgaaacccaaaaagatacatatcaagttcttctgagaagaaataagcttcccatgtcattgttggaagaaaaggacacagatgaatccccaaaagccagaattttggataccgaaagttatgctgatgcgtttgggcccaaagcccaaagaaagagaccacgtcttgctgcatccaatctagaggacttggtcaaggctacaaatgaagacattaccaagtatgaggaaaagcaagtcttagatgccacattaggactaatggggaaccaggaagacaaagaaaatgggtggacctccgcagcaaaagaagctattttcagtaagggtcaatccaaacgtatttggaacgaattatataaagtcatcgattcgtctgacgtggtaatacatgttctagatgcaagggatccattgggtacccgttgtaagtccgtggaagagtatatgaagaaggaaacaccacacaagcatttaatttatgttcttaataagtgtgatttggtacctacctgggttgcagtatgttaa

SEQ ID NO: 81162 - DNA, 102 bp, Saccharomyces pastorianus
atggcacaggttgcacaatgtactacggcacatgatcaggatatggcgttgcatgaactgccatcggtggagtcattaatgacccaacaagacgtagaatag

SEQ ID NO: 81163 - DNA, 387 bp, Saccharomyces pastorianus
atgaacagcaaatctcaacaacaagaacaacaaccaattgtattcgtcaccggtacagacactgatgttggtaaaacctttgtatcaacattattggtacacaaatggaaagctgcatactggaaacccgtacaaactggaattgagtcagatcaaggtgactccgagacattgaaaaatttcaaaatagccgcatcaacttggcaaccacctatattcacgcccacttatgcgctgcagaagcctctatctccgctccaggccatggagtacgaacctaatgtcgacatcaggttgttggatttcgtagttcctgaagagtggagcgcagagaatccattggtcgtagaaggagccggcaggggtttgcgttcctatcactcgtaa

SEQ ID NO: 81164 - DNA, 117 bp, Saccharomyces pastorianus
atgtacagctattgcacacattataggaagggacagtacggaaaattgatagagtttacagattctcaaaagaaatattacgagaaagttgtagaattatggaacaaggttgtatag

SEQ ID NO: 81165 - DNA, 912 bp, Saccharomyces pastorianus
atggcgttggcacaattaattgtcatattttttggatattgcgattttaaaattaaagggtatcgcattgcctcttacaatgcaccgacatttgcctccagtttcataattcttgcagtatgccttttattagttgtcgttctggaaaatcctgaggttaaagttacaaattcggaaaatagccttttcagtgctctgaaacaattttttagagtcgaaagaaaaaaactcatctcctgcttgattttactatggagcatgttcctatcgtcatttattatgagcgaagtagtttattttatgccactattcctgacgctccgcgttaactgggacaccaagtttcaaggcatagcgtttatggtcgcatctatacttggtgtgactggaagctatttcgctccaaagttaataaacgtcgggtgctcctgcggcagagccaaagatggcggattagaagagtcagatacaactggaagtgagaccgttgaggtaaagaaaaaagattcgctgtacagcggtcaagtttttctgtccatctttgcattgtttgtttcattgctgggacaagcttttatgattggagcatccgaagccttgaagcataaatcaatgccacccacaaattctggtatatttttttcagctgggatgtcgattacattgttagggtacaactttttggcttcgagcattccagcccttttttccatgtacatcgaccccaaactcaaggtccagttgatgccttcaattggagcaatctctgggattggtaaactggtggcaccgattgtattagcagctctttatggcacaagattggggctttcaattgcggttggatttgatatgattttggtagctgtttcaattccaccgcttatttggctcaggaaaaaaaggtgttag

SEQ ID NO: 81166 - DNA, 456 bp, Saccharomyces pastorianus
atgggggatttcaagattgaagaaataagattaggagacgatgggctgatagaaaacaataggaccgatagagttgtcaacatcattgtaagactaggattatgcatttctttaattaccaagtctgcatttcaacgcacgaaggcaggtgtagcacgcttttcttcaaaattaagggcaaggtttggcaacagaaaaggtcctacttactcttcgctgcttcagggtcagttttcagatgaatcagatggcttgcatgaagatgctaacgatttatccagtttcacaagtcaagacagtaattttgaaattgaacaagaagatgcttacagacccgaacaagagcacacgtcacagatagaccagcctgccactagcaatattccagacgcattgccagcacgtagtgctattcacaagcctgattcaactgctgtgcgcaacgaggacgagtaa

SEQ ID NO: 81167 - DNA, 459 bp, Saccharomyces pastorianus
atggaattgaggggtgacttgatgattagtataatgaaggatgcaatgaacgactatttctattatcaaaatgacaacacagttgagcctgaagaaatcataggaaataaagtgagtggtattttattcgataatattatcgattatactacttattttggaacaaacacagaatatatccacggtattcatatgctacctatcacaccagtttcttctaatattcgttctgagactttcgtcgaagaagaatggcagactaaaatcgagccaattattgaatcgatagaaagcggctggacaggcatattgaagctgaatcaagcactcttcgacccagtagattcgtatgcatttttcagtgattcaacttttgattcatccacatatttggataacggaatgagtcgcacatgggcattagcattttcagggggactggcaaactcaattgcttag

SEQ ID NO: 81168 - DNA, 2868 bp, Saccharomyces pastorianus
atgcaattatatctgacacttctttttctattaagtttcgtcgaatgttcatatataagtttcatatcgaataatgcagacgaaatattggaaactgatttaattgaaactttatcttacgctactttgacagtaggtgagccttatgttgcacaatcggtggttgtaacaagagtatctgcagcttctcatagccctctctcagtttcgccaaaaaatagagtgagcgcatctccaattaattcacaagacagtgattctaatacaagaacagcagttcaactgtcattgtcgttatcaaactacgcaagccaagtatctcaaaaaataagcgcacaaaccaataatgatcctgtcactgtttcaaatatttacgcaaatgataattcgaaaagcaaaagttcagtacacaatttgagttcggtttccggcgtcgcctcagtcatgccaagtgcatcaacaatgcgtaaagtcaccacattattatctcaaactgcttcgacttcgacttcgactttattttcttcatctttatctatttcggggacacaattaaatggaactttattgacttctgtttcaaaaggtacaatcgatccactggtaactcaaatgccttcctattcttcccaagaaacaaaaattattccttcttcattgacctcgaataaaacgatatatactatttcagtaaggacaaatgcagctacagctaccggcgaagattccttcattgcttcaactcctgcttcctcgactttgttctatccatccaactcaacccaggatttagtccagacgctcgcatctacaacagcaagccctgcttacccatctaataggacacaaatcactctttctccatctgtatcactatattcgacaactagtccaatttacccttcaaacattacagaaaacggttcttcaccatcaccatcactatcatcgactgttagtccagtttatccatcgagttcaacaggaaacattcttttgtcatcactattttcaacagtagattcttcttcctctccggtttcttcgacattagataccatttatgtatcttcttcaatgcaagctaccatctcttcgtcctcatcttcgagacaaacaaaaacttcctcctcttctctgtcaacctcgaccagtagcaccgctaccacaacggagaactcttcaacaacgaccattgtcaatcttttcaatgctgtttcgacagatgaaccaccaactgtttttgacagatcaccaaatcctatgtcattggctgatggggtgtcaaacgatggtcccattcaaacaaacaagttttatacaaatttgattgttggtagtcaggaatcacctgcctttgtgtatccttattcattgtggaagtacacctcgagttcatatggttttgctgttcaacatacaacagtagatcaatatagctacggtggttatgacagttccggtaatgcagaatatttggtcaatcctttgggaattgctcatgttgttttctcagcttcgaattttgattcaagtatgactatgcaagttgatgaaatgaccttgtcttcaacaagggtagtgctatcagaatccaatgattcttcgaactacctggaaatacctttggttcaaggtatgggatttgcaactggtatatatcatggatctttaaatgccaagattggttccagcgtcggattcaataccattgtttctgaatcatcaagcaatttagctcagggtattctcaaatatcgtatcacccttttgaatggagtcacttggttatgttacgtgataggaccagacgatttaacctcaacggacttttcattggaggtgagctcagaatatgaaattaaagcaagcgctagtgttgatggtcttatcattcaattggccgtcgcaccttctgaaactgattacgaggtcttttatgatcaagccgcaggtatgtacgttactaatttcaagctgcagggtgtctctgacggttctacagctacctatgaattttcttataccacccaaggtgagtcggcatcaggtagcacaatgatttttgccttgccccatcatgaatcttcatttagtgatataatgcaagactactataccggcattcaactcgcttctacaactaagggtgtaatgaacggttatctaacaacgagcctacaattttccacatctctaaacagacaaatatcttggttaccatggtcttctcaacttggctcaaaccttttagagtattctaaagaacaattgcaattattagctgaagttgccaattccgaattacaggttagtatttccgaaagtataagcgggttaaacacatattatttgggtaaagttatcgataagtattcttacattctattaacggtctccgaaatcatccaagatgaagccagtactaagagtactttggaaaacatcaaatcggcctttgatattctgctacaaaatgaacagacgtatccactaatttacgacacaaagttcaacggtttggtcagttcaggagattggggttccaccagcacgcaatacgattttggtaacacttattacaatgaccatcatttccattatggttacattattcatgcagctgctgtcatcggctatgttgactctaaactgaatggtacttgggctgccgacaataaagattgggtcaattcattggtaagagatgtcgcaaatccatctgaaaaagatgaatactttgcacaatcgagaatgtttgattggttcaacggtcattcatgggcagctggactttatgaaaacggtaacggtaagaacgaagaaagtagtagtgaagattacaattttgcctatgctatgaagtaa

SEQ ID NO: 81169 - DNA, 717 bp, Saccharomyces pastorianus
atgcaagctgctaatagtattccacatgacccaccggaaatcagtagtctggagacggaattgatttgcttaacaacgaacacaaaagattgcaaaccagtgaggttccacagtgatttacttttaaagaagcacaaatacaatgaaattaagaaaatatttaaggaaattttggaaaacattgaagcatatcgcgatgagttcactaaaaatcaaacaaaaataaacttacttcttgccgatgacgcaagagctagcctgcgtaatagatcgctcgatttttctgatttaatgccttcgagtataattaaggacgtacaggttttagccaatatggaagccaatgttgttgtcatgaaaaatgcgttgaaaacgaagttggttggagagaaaagtgtgcctgttacttcttctcctatatccagcataattcctcgaacttctaggaataaaaaaacctccccatcaaactatcaccattcggtactttcacatcggaaatcaaatgaatggaatcaggtcagttcaactgagtataagagaacactgttattgaatataaaatataatgatgattttaaagctaccatagtgccaagttttgaaagttgtttatgctcgaggtcatatttcctccgcgtaaaacttcattttgataaaggtgttggatctgctgaaattgatatcccagttcaagttaaaaactcttttatttga

SEQ ID NO: 81170 - DNA, 4143 bp, Saccharomyces pastorianus
atggatttctatactgttaaagacggcgatacggaattgaggtgtcctattcccgacacttttgatgcgtcagctataatcaaatcttatgttaaagaagcttctgaacaagggattcatcttcgtaaggcaggtgtagccatggaatgcgtttcagtagaaggtttggattcttcttttttggagggccaaacctttggcgatattttgtgtttaccacggacaattatcaagggtatccgtgagcggaagaatcgcaataagatgaagatcattttgaagaatgtcagtttgctggctaaaccaggagagatggtccttgtcctaggaagaccaggcgctggctgtacatcatttttaaagagcgctgctggtgagaccagtcagtttgcaggtggtgtaacaacaggacatatatcgtacgatggtatccctcagaaagaaatgatgcaacattacaagccagatgtaatctataatggtgagcaagatgttcatttcccacatttgacagtaaaacaaactctagattttgctatttcctgtaagatgcccgcaaaaagagtcaataatgtaacgaaagaagagtatattactgccaatagagaattctatgctaaaatttttggtttgacgcatactttcgataccaaagttggtaacgatttcatcagcggtgtatctggaggtgagcgtaaacgcgtttccattgctgaagcattagcagcgaaaggttcaatttactgctgggataatgctacaagaggtcttgactcttctaccgcgctagaatttgcacgagctattcgtactatgacaaatctgttaggtacaacggcccttgttacggtttaccaagccagtgaaaacatttatgaaacttttgataaagtcactgttctatacgctggaagacaaatattttgcggcaaaactactgaagcaaaagattattttgaaaacatgggttacttgtgtccaccgagacaatcgactgctgaatatttgaccgcaattactgatcctaatggtctgcacgaaataaagcctggctttgagtatcaagtacctcataccgctgatgaattcgaaaaatactggcttgattccccagaatatgcccgcctaaaaggtgaaattcagaagtacaaacatgaagtgaatactgaatggaccaaaaaaacatacaatgagtctatggcacaagaaaagtcgaaaggtacaagaaaaaaatcttattatacggtctcttattgggagcaaattagactttgcactattagaggttttctaaggatttacggtgataagtcatacaccgttatcaacacatgcgctgctatagcacaggcttttatcactgggtcattgttctaccaagcaccttcttcaactctaggggccttttctagaagtggcgttctgtttttttccctcttatattattctttgatgggtttagctaatattagtttcgagcacaggccaatattgcaaaaacacaaggtctattcactataccatccctcagctgaagcgttagcaagtacgatttcttcttttccattcagaatgattggtctaacatttttcataatcatcctgtacttcttagccggtttgcatagaagcgccggtgctttttttactatgtatttgtttttgacaatgtgttcagaagctattacaagtttgtttcagatggtttcatctttatgcgatacattgtcccaggccaactccattgccggtgttgtgatgttatctattgccatgtattcgacgtacatgatacaattaccttcaatgcatccatggtttaagtggatttcgtacattctacccattacatatgcatttgaatcgatgttaaatgcagaatttcatggaagacatatggattgtggtggcactttggttccttctggacctgggtttgaaaacatcttgccagaaaatcaagtgtgtgcttttgttggttcaaggcctggccaatcttgggtcctaggtgatgattatttgagggcccaatatcaatatgagtacaaaaatacttggagaaacttcggcatcatgtggtgtttcttaattggctacatcgtcttgagggcggttttcactgagtacaaaagtcctgtcaaaagtggtggtgatgctctggtcgtcaagaagggcacaaagaatgctatacaaagatcatggagcagcaaaaatgacgaagagaaccttaatgcctctatagcaacacaggatatgaaagagatagcttcaagtaacgacgatagcacaagtgcagactttgaaggtttggaatctaccggggtgtttatttggaaaaatgtttctttcacaattcctcattctagcggacaacgtaaacttctggacagcgtaagcggttactgtgttcctggtactttgacagcattaataggtgagtccggcgctggtaagaccacattattaaacactttggctcaaaggaacgtgggaacgattactggtgatatgttagttgatggtctcccaatggacgctagtttcaaaaggcgtaccggttatgttcaacagcaagatcttcatgttgctgaacttactgtcaaagaatcgctacaatttagtgctcgtatgcgtcggccacagtctattcctgacgctgaaaagatggaatatgttgaaaaaattatatctattcttgaaatgcaggagttctcagaagctcttgtcggcgaaattggttacggcttgaatgttgaacagagaaagaaactatcaattggcgttgagctagttggcaagccggatctgttattgtttttggacgaaccgacctctggcttggattcccaatccgcgtgggccgtcgtcaaaatgttaaaaagattagctctagcaggtcaatcaattttatgtactattcatcaaccatcagctactctttttgaacagtttgacagattattgcttttgggaaaaggcggtcaaacaatttattttggtgaaataggtaaaaattcaagttctgtcattaagtatttcgaaaagaacggagccaggaaatgtcaacaaaatgaaaatccggcagagtatattttagaagccataggagctggggccaccgcttctgttcaacagaactggcctgatatatggcaaaaatctcacgagtatgcaaacattaacaaaaaaataaatgacatgattaaggacttatcttctacaactttgcataaaacagctacaagggcctctaagtatgcaacatcgtattcctaccaattccatcatgtgctgaaaagatccagtttaacattttggagaaacttgaactacatcatggccaaaatgatgttattgatgatcagtggcttgttcattggttttacctttttccatgtgggtgtaaatgctattggattacaaaatagcttatttgcctgtttcatggctatcgttatatcagctcctgcaacaaaccaaatacaggagcgtgctaccgttgctaaggagctatatgaagttcgtgagtccaaatctaatatgtttcattggtctttacttttgattacccattatttaaatgaattgccttaccatttattgttttcaacaatttttttcgtttcattatatttccctctgggtgtctttaccgaagcctctaggtcaagtgttttttatctgaactatgccatactttttcaactttactatattggtcttgctttaatgattctgtacatgtctccaaatctacaatctgccaatgttattgtaggttttatactttcgtttttgctctctttctgcggtgctgtccaacctgcctctttaatgcctggtttctggacattcatgtggaaactatccccttacacgtattttttgcaaaatttagttggattattgatgcatgacaaacccgtaagatgttcaaagaaagagttgtctcttttcaaccccccggtaggccaaacatgtggtgaatttaccaaaccgttttttgaatttgggactgggtatattgcaaatccagatgcaacagcagattgcgcctattgtcagtacaaagtaggtgatgaatacttggcgcgcataaatgctagctttagttacttatggagaaacttcggtttcatttag

SEQ ID NO: 81171 - DNA, 336 bp, Saccharomyces pastorianus
attaacgctgaagacgaatccaaggaccccaactcggttttgaacttctggaagaaggccttgagatttagaaaggcacacaaggatattactgtatatggatatgattttgagtttattgatttggacaataagaaactgttcagcttcacaaagaaatacgacaacaaaacattgtttgctgctttgaacttcagctctgattcgatcgacttcacgattccaaacaatagctcatcgtttaagttggaattcggaaactacccaagaagtgaagttgatgcgtcttccagaacattgaagccatgggagggcagaatttacatatctgaatga

SEQ ID NO: 81172 - DNA, 564 bp, Saccharomyces pastorianus
atgttgaatgcagcttttaaggataccgctgaaatcaccgcttatggtaaagatagacttttgaactatggtgtcgatgacgtttactacaaaagatggtttggtaacggtagtattttcaccgtcatgggtgtctttgagcaattgatggaggcttccaagggtgccatgctcatgagatgtgatgatattgatggcttgtgtgcagctaatccaaactattacgctggtcatcaccgtcaatctgctccagctgaaactgttatttgtgattacttctacacttccaaaaagccactatcaacaatttgtttcgaaggtactattgtcgatgtcggtccaaaacattatgcaggtattgatatgttacatcgttacttgcacgtccctaccatgagtatggatggatatgttggcgagtacgcggaaactcttgaagaagttgtggactacgcccagaacaatgctacttacgcagttagaaacaccgacaactatctttactatctcgctgacgtttacagtgcttctgttatacctggtggctgtctaggtaaattgtaa

SEQ ID NO: 81173 - DNA, 117 bp, Saccharomyces pastorianus
atgaagttctcttccggcaaatctatcatctttgcaactattgcttctctagctttgagtgctcctgtcacttacgacaccaactctactgctgagttacaatctccttcatcttaa

SEQ ID NO: 81174 - DNA, 585 bp, Saccharomyces pastorianus
atggggtattatgacatcgatgatgtgctggcagacgcgacggactttccctgtaagtttcaatatgatatcccgggtttaggctacctggagaacaatccaggacgacctatgtctaaaaacacgaagctaaatctaccactgtggttggcaaggatcctggcaattgtaggtggtgacgacgctctggtagatgaagagcccatgccctttgttgaacttttgccgccagacatgttttctacgagggtgatgaacgcgatcaagacagatcctgtggctctggacttgcattctataaattcgcattttttcagtttggccataaaatggataacgttgtttagtgagaaggaactggccaatgtggtcagcgagttgcttctacaacgggcgcaggaactcaatcatcattctagtagtttggcagtagacattaatgctgattccgttgggaagaattcagcaaacactaatatatcaacgagtactttcttgttaaaactcgacgaaatggaaaaggacatatataagaaatctcacgagtcatataaggacaccaagaagtggatgtttcaaaaataa

SEQ ID NO: 81175 - DNA, 1761 bp, Saccharomyces pastorianus
atggaattcattaaaaaagaaattccgttggaagtgctcaataatttggcatgttaccacttcattaacggtgactttataaaggctgatgatctctttaagcaagcaaaggcaaaagtgagtgataaagatgaaagtgtcaatattacacttgaatataacatagctagaactaatgagaaaaacgactgtgaaaaatcagaatctatatattcccaggtgacgtctttacatccagcttacattgcggcaagaataagaaatctatatctcaagtttgcacagtctaagatagaagattcagatatgagtacagaaatgaataagctattagatttgaacaagtctgatctggagattcgttcattttatgcttggtacttgaaaaacagcaaggaaagaaaaaacaatgaaaagagtacgacccataacaaggaaactttggtaaagtataattctcacgatgcatatgccttaatttctctagctaatctatatgtgacaattgccagagacggtaaaaagtccaggaatccaaaggaacaggaaaaatcaaagcattcttatttgaaagccatccagttgtatcaaaaaattctacaagttgatccatttaatattttcgctgctcaaggtcttgccataatttttgcagaaagcaaaagattgggaccagccctagaaattttaaggaaggtaagagattctttagacaatgaagatgttcaactgaaccttgcccattgttatctggaaatgcgtgaatatggtaaggcgatcgaaaattatgaattagttctaaaaaaatttgacaatgaaaagacaagaccacatattttgaacctattaggtagagcttggtacgcacgtgccattaaggaaaggtctgtgaatttttatcaaaaagccttggaaaatgccaaaactgctttggatcttttcgtgaaggagtcttctaagagcaagttcattcatagtgttaagtttaatatagctttgttgcattttcaaatagcagagacattaagaagatcaaatcccaaatttaggacggttcagcaaatcaaggattccctggaaggcttaaaagagggtctagaactatttagagaattgaacgacctaaaagaattcaatatgattcctaaggaagaactagaacaacgtatacaattgggtgaaactactatgaaaagtgcattagaacgttccttgaatgagcaagaagaatttgagaaggaacaaagcgccaaaattgatgaagcacgtaaaattctggaagaaaatgaattaaaagagcaagaaaggatgaaacaggaggaggaagccaggcgtttgaagttagaaaaacaggcagaggagtataggaaactacaagatgaggcacaaaagttaatccaggagcgagaagccatggccataagtgaacataatgttaaagatgattcagatctgtctgataaagacaatgaatatgacgaagaaaagccaagacaaaaaagaaagaggtcaacaaaaactaaaaatagcggtgaatctaagagaaggaaagctgctaaaaaaactctttccgacagcgacgaggatgacgatgatgtggtgaaaaagccttctcacaataagggcaaaaaatctcaactatcgaatgaatttattgaagatagtgatgaggaagaagctcaaatgagcggttcggaacaaaataaaaacgatgacaacgacgaaaacaatgataatgatgataacgacggattgttctaa

SEQ ID NO: 81176 - DNA, 171 bp, Saccharomyces pastorianus
atgtcgaactatttctctttaaagttctctgccactggagaaagacatttagtagcaaccaacattgcacatattgaagcccatacgtctattgtgggtttcatcttctccctcttcacacctttaaaagaaactattatcactaaatacgaaatgttagttagaacttaa

SEQ ID NO: 81177 - DNA, 153 bp, Saccharomyces pastorianus
atggcctttggctggcattcaatgcatggttccattatatggttcctgcaaatagcacagttgtcaacagctatatcccatgaccaaaacgccactgcggtccatttcttaatttcaaatctcttctttttggtttccactggcgcactttga

SEQ ID NO: 81178 - DNA, 1203 bp, Saccharomyces pastorianus
atgaggacactaaaaaacaaacaaaaaaaaaaagaaaatactacatacattttgcttttagcactaacatacctaatgcttaaagtgaataacgttttcgggagcaaccccaatagaatgacaaaattggaggatgaacactactttatcgatgacatcgtatcgattaaaaacagacaaaagagcaaaatgtacgtcagggaagggaaacggataggccacggctcgtttggaactgtgacacagtcctatctgtccagcaatagtactgaatggttaggaccttatgccataaaaagagtagtgaaatctcccaaagtacaatctttggaattggagatcttacagaatatcaaacatccaaatctggttactttagagttcttcttcgagagtcactgtactaccaaggacggtgggcacttatatcagaaaaactttgttatggaatacattcctcaaaccttaagttctgaaattcatgaatattttgacaatggttctaagatgcctacaaaacatatcaagttgtacacattccaaatacttcgagcacttctgaccttacattccatgagtatatgccatggcgatctgaaaccgagcaatatattgattataccaagtagcggtattgctaaagtatgtgactttggctcggcacagcgactggatgataatacagaattgaagacctatttttgctcgaggttttatagagcacctgaacttctcctaaattcgaaggattatacaactcaaatagatatatggtcgcttggttgtataataggcgaaatgataaaaggccagccactttttaaaggcgatagcgctaactcacaactggaggagatagctaaactattaggccgctttcctaaaagttctataaaaaattctcaagagttacaggatagcttaaatgaccaaaaattcaagaagtttatgcattggtttccctctatagaattttttgatgtggaattcttgctaaaggtgttgacgtatgatgccactgaaaggtgcgatgctagacaattgatggctcacgaattttttgacgcgttaagaaatgaaacctattttttgccaagaggttcgagtatgccggttcacctaccagacctctttaattttagtgcatcggagaaaagggctcttggagagtattacaacttgattgtaccatctctggattag

SEQ ID NO: 81179 - DNA, 528 bp, Saccharomyces pastorianus
atgatgggcggttacaacccaatgatgaatccgcaagcaatgacagattactatcaaaagatgcaagaatattaccaacaaatgcaaaagcaaactggtatggattatactcaaatgtaccaacaacaaatgcagcaaatggcaatgatgatgccagggtttgccatgccacctaatgcaatgactttaaaccaaccacagcaagattcaaatgccactcaaggttccccagcaccttctgattccgataataataaatccaatgacgtccaaactattggtaatacatcaaacactgactctggttccccgccattgaatttacctaatggtccaaagggcccatcacaatacaatgatgaccacaatagcggttatggctacaactgtgatcgcggtgatcgtgatcgtaacgatcgtgaccgcgattacaatcaccgtagtggtggaaaccatagaagaaacggccgtggtggtcgcggtggatacaatagacgtaataatggctaccatccatataatagataa

SEQ ID NO: 81180 - DNA, 1080 bp, Saccharomyces pastorianus
atgagctctgacgaagaagatttcaacgacatctacggcgatgataagcctaccactactgaagaagtcaaaaaagaagaagaacaaaataaggctggcagtggtacctcgcaattagatcaactagccgcactacaagcattatcttctagcttgaacaaactaaataatccaaatagtaacaacagtagtagtaataatagtaaccaagacacatcttctagtaagcaagatggcactgcgaatgacaaggaaggttccaatgaagacactaagaatgaaaaaaaacaagaaagcgctacatcagcaaatgccaatgccaacgctagttctgcaggaccttctggcttaccttgggaacaacttcaacaaaccatgtcacaattccagcaaccatcttctcaatcaccacctcaacagcaagtaactcaaaccaaagaggaacgttcgaaagcagatttgtctaaagaaagttgcaagatgttcattggtggtctgaattgggacactacggaagataatcttcgcgaatattttggtaagtatggtaccgtcactgatttgaaaatcatgaaagaccctgcaacaggtagatctagagggttcggtttcttatcttttgaaaaaccttctagtgttgatgaagtggtaaagacacaacatatcctcgatggtaaagttatcgacccaaaaagagctatcccaagagacgagcaagataaaaccggtaaaatctttgttggtggtattggtcctgatatgagaccaaaggaatttgaagaatttttttctcagtggggtacgattatcgatgctcaactgatgttagataaggataccggtcaatcaagaggttttggttttgtgacgtatgactccgctgacgccgttgacagagtttgtcagaataaattcatcgatttcaaagatcgcaagatcgaaatcaagagagctgagccaagacatatgcaacaaaaatcatcaaacaatggtggtaacaatggtggaaacaacatgaatcgtcgtggcggtaacttcggtaatcaaggcgatttcaaccaaatgtatcaaaccctatga

SEQ ID NO: 81181 - DNA, 261 bp, Saccharomyces pastorianus
atgaaaaccgaaattaccgtcgaccatactgaagaagatagccataaccatcaaaataacaacgatagacctgcaggtagcgtaatccagcaagatggttctagtggcatggagatagaaaatggaaaagatgtcaaaatcgtttatatggcaaacaattggattatcactgttattgctataattgtgtggcttttcttatctttactgaacgtttatgccattgttcaattaggcatgtctcatggtgatatcagttaa

SEQ ID NO: 81182 - DNA, 1329 bp, Saccharomyces pastorianus
atggtgaacgttggtccttcccatgctgcagttgctgtggatgctagcgaagcccgcaaaagaaatatttcagaagaagtattcgaactgagggataagaaagattctacagtggtaattgggggtgaagccccggtaagaacttttaccagtagctctagtaaccatgaaagagaggatacgtatgtttctaaaaggcaggtaatgagagatatttttgctaaatacttgaagttcattggtcctggattgatggttagtgtggcttatatcgatcccggtaattactctactgccgtcgatgcaggtgcctctaatcaattttccctactttgtatcattttgttatcaaactttattgccatatttttgcaatgtctgtgtatcaagttgggttccgttacgggactagatctaagtcgagcttgcagagagtatttaccacggtggctcaactggacattgtatttctttgcagaatgtgccgttatagccaccgatatagctgaagtgattggtacagcgattgccttaaatatcctgatcaaagtgccccttccagcgggcgttgccattactgttgtggatgtgtttttgattatgtttacatataaaccgggtgcgtcatcaattaggtttattagaatatttgaatgttttgttgcagtattagttgttggcgtgtgcatttgtttcgcaatagaattggcttatatcccgaagagtacgtccgtcaaacaagtgttcagaggatttgttccatctgcccaaatgtttgaccacaatggtatttataccgctatttccatcttaggtgctactgttatgccacattcgttgtttttgggttccgcattagtgcagccaaggcttttagattatgacgttaaacatggtaattatactgtttcagatgaacaagataaagtgaaaaaatctaaatccactgaagaaattatggaagaaaaatattttaattatagacccacgaacgctgctatcaaatattgcatgaaatattctatggtcgaattaagcataactctcttcaccctagcgcttttcgtcaattgtgccatcctagttgttgcaggctccactctatacaactcaccagaagcagatggggcagatttgtttactattcatgaattattatcaagaaatctggcacccgcagcaggtacaattttcatgctcgcacttttattaagtggtcaatccgcaggtgtagtgtgtactatggcgggtcaaattgtaagtgagggcatattaattggaagttgcagccatggcaaagaagattggccactagatgtatttcgataa

SEQ ID NO: 81183 - DNA, 303 bp, Saccharomyces pastorianus
atgccaccacaagatgccgaaggttggttctacaagcgtgctgcctctgttgccagacacatttacatgagaaaacaagttggtgttggtaaattgaacaaattatacggtggtgccaagagcagaggtgttagaccatacaaacacattgacgcttccggttctatcaacagaaaggttttgcaagctttggaaaagattggtatcgtcgaaatctctccaaagggtggtagaagaatctctgaaaacggtcaaagagatttggatcgtattgccgctcaaactttggaagaagacgaataa

SEQ ID NO: 81184 - DNA, 99 bp, Saccharomyces pastorianus; identical to SEQ ID NO: 80986

SEQ ID NO: 81185 - DNA, 72 bp, Saccharomyces pastorianus
atggcggcaggtgcggcatgttatataatatcaaggcatatttgcgttggtgcgaagctttgtaagttttaa

SEQ ID NO: 81186 - DNA, 1407 bp, Saccharomyces pastorianus
atgttgaacattcccataattgctaactccaagaggttcctgttctcaaaggatcacgaagcgcaatctacgagagatcacgatgtggagctggagacaagggagggcccaagttcaggatataatccaaacttcaatgcagaggacgcgattttgaaaaagaacagcgatcaagtagatcttgacgttaataagttaacgaacgtcacctcaagagttttaaacaccccagaggcctctttgatttatgatgatgacagagagttcccagatggtgggttaaaagcatggctggtagtatttggtgcgtttatgggactggtcccggtttttggcttaatcaactccttaggggctattgaatcatatatctctaaacatcaattggcaaatatttcttcttcaacaatatcttggattttttccctatacttagctatcagctttttaagctgtatattatccggtggctattttgatagaaatggtagtattggtttgatgtgcacaggtacagtcatatatgctggaggactattcgcattggcaaattgtaagtccgtatggcagtttattttggcattttctgtgtgctctagacttgggacgggaattttaatgactcctctgataggaactgttgcaacctggtttttaaaaagaaggggtatagccacatctataagtaccatggggggttcaatagggggtatagttttccctattatgctgagaaagttatataaagaagtgggctttcaatgggccattagaatcctatcattcatttgtttaacatgcctcatttgtgcttcagttttggctagagaaagaactaaaccagtcgttcaaccattcaaatccaaggcggaagtagcaaagtggtacatttcctctgtgttcaattggagatattttttggaaggaaaattcttgttcgtcgcaataggcgcttcttttgcagaaagctccctaacttcatgcgctacatatttagcatcttattctatgacaagaggaaacacagaaaatgttgcttataccatgatcactgcttcgaatgctgttggtatacttggaaggtatataccaggctattttgcggataagttcatcgggagattcaatgtagaaattatcaccatttcaatggctgccttatttaattttgtcatgtggctgccatttggcggtaatacaaaggtactttgggcgtacgtttgtttgtgggggttttcgacgggttctatcctatcactgacacccgtttgcatcgggcagatatctaaaactactgattttggtaaacgttatgcaacggtatatctattgcaagcgttggtaacgattccggttttacctatcggcggtaccttaatcggtaaagggtacagttgcaaattataa

SEQ ID NO: 81187 - DNA, 531 bp, Saccharomyces pastorianus
atgttaccaattctgggtgtcccgttgcctactttgaagtataaatataagcagaatcgtgccaagaagttaaaactgcaccaagatcagcaaggtcaagacaacgccgccgtccacttaaccttaaagaaaattcaagctcccagttctccatcgagcatgatattcagcccatcagatactatcttacaaataaaacagtacttgatcagcgaggaaaaggcctcccacataagcgagataaaactgcttttgaagggcaaagtcctccacgataacctgttcttatcggatttgaaggtcacgcctgccaattccacaatcacagtcatgattaagccgaatccgactatatctaaggaacccgaagccgagaaatccactaactcccctgttcctgctcctccacaggacctcactgtgccctgggatgacatcgaggctcttctgaagaacaatttcgagaacgatcaggctgcggttaggcaagtcatggagcgtctacaaaaaggctggtctctggccaaataa

SEQ ID NO: 81188 - DNA, 153 bp, Saccharomyces pastorianus
atgagcacatccgccagcggtccagaacacgagttcgttagtaaattcttgaccttagccactttaactgaaccgaagctaccaaaaagctatactaaacctctgaaagatgttaccaattctgggtgtcccgttgcctactttgaagtataa

SEQ ID NO: 81189 - DNA, 171 bp, Saccharomyces pastorianus
atggaatctatatttctatgtaccaatattacgattattcctcattccatttcatatgtttcattatcctatcacattatcgatccttgcatttcagcttcctctaacttcggtgacagcttctataataacttatgtcactatctaacaccgtatatgataatatattga

SEQ ID NO: 81190 - DNA, 660 bp, Saccharomyces pastorianus
atgcctgcaggtcaattactaaagatgtgtattatacctagaatttgttcctttgacaaatccaactccaaaacctacaagctaattcaggaatatgttaatcgctttgaaaccgttttaacaaaatttggcccagaaaaagatttcaccaaagtttacgctaactggtcaaaactcattgaatcgtttaatgagcttattttacatgacctgttggtgaaatggcaacaatggtctgaattaactcagccaaatgccacggtccatcagaacattccgaatgttctcagggaactcgtaataaaattaacacaaaggtattttacattccaaccttcatacaattgttcgattgatgaattcacaacaattttacttaataaaaatgctttgagtctcttggacgttttcagaaaacccagaaaatataaactgaattttggtttatggctagattgtcaaaacggtattttaatttttacaaatggtattgtgcagatggcagatgaaatcacaagtgagagggtgaaatcctttgtcaggccagcacatctcttggtattggaagaccattcaaatgatgaagcagtcaagaaactaatgtttttcactttttcggcgatattacaatgctttacagatgagattctgaattgttaa

SEQ ID NO: 81191 - DNA, 594 bp, Saccharomyces pastorianus
atgactcaaacgttatacaccgctgaaagaactatgtctcataatagattgaaaactcataaatgtacggtggatgatatccatcgcattgttaaggaaaatgacaaacaacgctttcatataaaaacattaggagcggacgaagaatggatctgtgctactcagggacattcaatcaaatcgattcagccatcagatgaggttctcgtaccaattactgaagcgtcgcagttaccacaggaactaattcatggaacaaatcttcaatctgtcataaagattattgaatccggagcaatatcaccaatgagtagaaatcatgtccatttatcgccagggatgttgcacgcgaagggagttattagtggaatgcgttcttcaagtaacgtctatattttcatcgactgccattctccattattctttcatactttgaaaatgttcaggtcgctcaataatgtttacttaagcagcagtattcccgttgaattgatccaaaaagttgtagttaaaggaaacttgaaagatgaggagaagttagatactttaagaagaattttacacgaaagaaacataccgctcgaaaagatataa

SEQ ID NO: 81192 - DNA, 1236 bp, Saccharomyces pastorianus
atgagccaatacaatgtcgatacgcaagcaaccgctataatgagcgatatgcaaaagcaatacgactcgcaacagatgacatcaccatttgtaaacgaaggcttgcatttcgatccaaatggtgaagtttcacacgtaataaaagcaatttttaaagaaattggttataaatacgatgatttcagtgatattcctgtttttcaattaatgcaagaaatgtatcaactagtgaagaagaattccagcgctagaagaacaaagataactgactatgcctctaaacttaaagaaaaagaagcgcaattaaaaagtcaaaatgacaaaattttgaagttagaaacaacaaacaaggcctacaaaactaaatacaaggaggtctctctggaaaataagaaaataaaagaggctttcaaagaactagacaatgagtcatacaatcacgatgaggaattactaaaaaaatacaaatatactagggaaaccttagatagggtcaatagagaacagcaattaatcattgatcaaaacgagtttttgaagaaaagtgtcaatgaactacaaaatgaggttaatgctaccaacttcaagttctctttatttaaagaaaaatatgcaaaattagctgatagcattactgaattgaatacctctacgaaaaaaagagaggccctgggagaaaacttaacttttgaatgcaatgaattaaaagaaatatgtttgaaatacaaaaaaaacatcgaaaatatatcaaataccaataagaatttacaaaattcgttcaaaaatgaaaggaaaaaagttttagatttgagaaatgagagaaatttgttgaaaaaggaaatactgttgattgagtgtcatggttcatattctctactccttgtatctaatattctgacatgttatcggttcttactgccaagtgatactattattgaaactgaaagcttaattaaggagctactcaacatgaataattcactttcgaaccatgtgtcttcttctgacgagcctccagcggagtactcgaaaaggttagaattaaaatgtgtagagtttgaggaaaagttactttatttctatcaagaacttgtgacgaagaaaattatagacgtcatttacaagtactttattaattattacaagaaaagtaggcaaactgaccaaaaatccaatcagaattccagcactccgtataaacaaagccaaagacaagttccgcactccatcaagtga

SEQ ID NO: 81193 - DNA, 480 bp, Saccharomyces pastorianus
atggataatattttaaaggcatcaaatatggaagggacttcaacaatgacagttacctcgcgtagttctgaagactctagttgtatctcaaatcatgaacaagataccgatacacataaggacggcgacacaagtggtctggaaaacagtaaaatttcgaagagaaagtggatgaaagagtttttcaaactttccaaatctccagcttccaaaagcaaccggagtataggttccatgaaaagtaaccagagcctcgtttcaatgaaaagtagtgacgatggcaacaattataaaaatgattactcttctatctgtggtaacagccttccatctgcaggcttgagtcgttcgaatagtgtgaaagaattaaaattagattcaactggaagtcagagatcaaaaaataatgttgccatattagcacgttcttctacaacatctcagacaacgtgctcttcttcttcatcatcatcttcttag

SEQ ID NO: 81194 - DNA, 1476 bp, Saccharomyces pastorianus
atggcagagactatagcattagaagaacaaccattgttgcagtcagcttctgataaagcaatagatgactctttagaactcgtgcaaccattgcctgcatccaaaaagccatattttagaacgcagagctctggctccttgttaagtagaaagttcaaatcatttaggtctacttctggtcgtgccacaacagggttaaacactccagaggagcccaaaggaattctgccagatactccgcacgttattaatgacgactcggccttccctcaagctatcaatacaactcagcagtctaaggatgcaactccagaatctatgttatggaatcatcctttcaagctagagcaaaaactatccgctatttcatcacaagatttaccgagtaacaacactcataacaaactaagatcatctgaaaactcgagggcgaattccacgtcaaccttggaaggcaacgaaaagaagaagcctgagttcatgcccgatttactggagcaaattcaagagtcttacaagcaacaatatatgaatacttcttctctaaaatacctgacgaagaggcttccagtcaccaagataattaaggctagttcatgtccaattattagagtaaaatctgccacgttagttttggtccatctttggaaggaaggctcatgtggtggcagggtattattctccaccctattaccgccatctcgtgtcgataatgaaaccgtcagcggcggcaaagaaaattccaaaccgccagatgatgaagaattagaccttcaagctgtagatgatgacaaattaggaaaatatgatcttattgatggcgagttaggaagcagactcaacagaaggcaaatttttgagcaattggaggaaaatttgccctactggtttgcaaaagccttatttagagatattaagacggtggaagagcaaccaaagttgaacttcttaatcatgccatggtcttctgttggtgggagtgaggcagctggcaatgaaaacaagaagaagtttattagtgcatcagataccacagaatcttctggtaacgatagtagcgatagcagccttggaaatggtaatgaagccgtttccccatcaacacagcaacagttccataatatgctaaagtttggccgtccgaagaccagcgagcaggagttaaaccccacagatttaccgagaatctctgaggcgaatgtcaagctggttgcgcctggaatgattagggtgaaaaaaattaaactttacgtcgctgacagatttgaaacgaaaactcctgaaatgaaagcaaaaatggaacctagtctttggttggatctactatgtaggggccaagtgcttgataacgatatgactttaaataccgttagaacactttactggaaatctcagggtgacatagttctagaatacagaagaaaagtacataattcaccgctagttcatgaggttaacgggaatgaggggaaataa

SEQ ID NO: 81195 - DNA, 1584 bp, Saccharomyces pastorianus
atgaatcagttgacagtgagttatggcctaatttccccagattactgcacttcccaagatgcacacatcttaccgataacaaagattctgtacccggatatacctggtaaaaactattttcttacttcaggaagggatggttccataattttgcacaagaacacacagctctcgaacgagcctgggactgttgcaactaccataaaaaacgatgcgataagaatgcaagttcatagcgattgggcaagcgatctaatacatgttaatatgaaaaattcagacccatctgcaggggacacattcatatcagtaagtcacgatttttcgatagtattaattagtgtgaatgcgcagttaactacctgggataagaaaataatcggtgaccacgacgattacatcaagtgcatagtgcccatacattatgaaatgtcaaatgattatgaattggaagaacaagagggtggtcctgataatgtacacgatggaataaataatggcattgttgttgatgaacagaacaactttctttttgtgacaggtggtctagatagaaaaatcaagctttggtgcctgagcagcgggccagaaaaaatggctacgctactacacacatttgataatgcacaatcaaacgacacaggctcaatatactccatgagtcccatcatcccaaaatacagttttgatgacaatcaaacgtctcgtccctttgattttgttgccggagactgtaatggtgatttgattttttattcgtgtaaatatcgtaaggaggtgataagaattcaaaacgcccacagaacaaatataaaagtagtaagaactcttgatgactccacacgactaatcagtaccagctcagatggtgtaataaatgtatgggacttgaattgtaggcatgatcagactactggtgcccttcagcttcccaaaaaaattggatcttggtcctgggattcttccatatggtgtgtccaaggaacgagccttgataagttgtattttggtgactctcagggcaatgttatgagagcaaacttatccagttatgaagatgctaaacttacaagaattttcaagcctgatcatcaccaccatcatcatcatcaccatgaacacgaagagcaaaatatatcaactacagatgcgaaagtaaaaaaatatggtggtatccttgatattgcccttttacctaatgaaaaattgttgttttctttttgtactgactcaaatctaaatgtgctcgatttaactaataaccatttcagtgtcaacgaaggtgggttcgcactgaccagaagctcactgctaaccaacaggaggcatgtaataacggaaaacactaaaggccaaatgcagagatgggatatcgtttcatgtgagcttttgaatacttttgattcatcagaaggttcgtttgatgatatcgtaatgaaatacacctcaaaggaaattctatctcattggtgtactgtttccgttaaggtcggtatgctgttcgtaaaaataaacccaaaatttctgaaaactgaaatttatggatccgcgctaaaggattatcaggttgtgaacaaatattga

SEQ ID NO: 81196 - DNA, 2235 bp, Saccharomyces pastorianus
atgacccgaaacaagaccctaaagcaacttgacaagttgtacaataacggtaccaagccaaaggacgatttagagacatacgtgccacataaaaagcgccctaaacatcgtttgggaaaattgccgctttgtctaggcggcaaaaaagttaatacgctgtcttattctagtaaaaggattggggaattgaacgaagagattcatgaaaaacaagccgattgggccagtaatgataggcaacctgcctgctttatccagttcgagactcaattggaagcgcaaagatgctaccaatctgtggaagcaatcttgggtaagaaaaattttggtaagcgtcttattggctactcgccagaagacgttaactggggcagcatgcgtctcggttcaaaggagagacactccaggagagccgtggcaaatacaatcatggtgttattgattatcttttgggctttccccgttgctgtagttggtatcatctccaacgtcaatttccttaccgataaagttcccttcttacgtttcatcaacaacatgcccaccttcctgatgggtgtcattactggtttgttgcctactattgcgttggttgttttgatgtccctagtgccaccttttatcgtaatgttggggaaacttagtggttgcatcactaggcaagaaacggatctatactgccaagcatggtattacgctttcactgtgattcaaatctttttagttgtcaccgctacctcttctgcatcttccaccgttgactcgattattgacagaccaagatccgccatgacactattggcaaataacttgcctaaggcatccaacttttatatcatgtacttcctgttgaaaggtttaactggccccacatggacgatcttgcaggcagttaacttgctgctaagtaaagtcctaggtagagtgttggattctaccccaaggcaaaaatggaaccgctacaatactttggccacgccgcgcatgggcattgtttacccaggcattgaaattctggtttgcatttatatctgttactcgattatcgcccctatactgctatttttcagtaccgtaatgttgacgctactttatgtggcgtatttgtacaatttaaactacgtgtttggcttctccttcgatttaaaggggcgcaattatccaagagcacttttccagatttttgtaggaatttacttgagtgaagtatgtctgcttggactgtttatcatggcaaaaacctggggtcctttggtcctggaagtgttttggatcgtggtcactgccctagctcatatatatatgaagaggaaattcataccgctattcgacgcagttcctttaagcgccatcagacatgcaagaggtgagcccggctattcctatcctacatcagacttgggtctccaggaaatcaaggacattgcagatgaaatgaagggcaaatacgaacaagacaatacacacgggattttgacgcccgtgaccaaggatgatttgaaaaaggccaatctgataccagataacgatggcagttcagagaacggtactcctagtaacccctttgagtctggttctgaacgtgcttctctctctggatcgaacgcagagggtgactcgatcaagaaattaaatgatacagttatcaaaaaatcaagcactctctcctcctctaccaaggacaacaacgaatctacttttgttccagagggtgaaaagtttcgcaagtttcactacagcgatgttgaggcattgagaaataagcgcccttatgatgaggatgatcatagtaaacatggacctgaaggtgccgtgccagtaaacgctgacgcgggagtcatttacagtgatccggcagctgtcatgaaagagcctcaggcatttcctccggatgttgtggaaaccaatacttggacaagaagaattctgcaattcttcaacccaagaaggtcgtatccattcgacagtgtcaggatgagattcccacttgttttcaacaccagcatcgaatacgatgaagaatatttgagctctgcctataccgatccatgtgtcagagagaaagatcccattgtgtggtgctgtaaggatccgttaggagtttcaaaacagcaaattcaagaggctaggtctaacggcttagatgtaagagatgatttcacaaggtacgatgaaaaaggaaaagtcatattcacttacaaccctcctgattatgaacctgaggctaaaaaatga

SEQ ID NO: 81197 - DNA, 606 bp, Saccharomyces pastorianus
atggctgacagttcttcgacttcagcgttcatttcaaccctgattatctacggtcttaccgccctcgtgtttgtctggctctttttgctattgcggcccaagaatagaagagtatacgagccacggtctcttaaggacattcagactattccggaggaagagagaacggaaccagttcctgaaggctacttcgggtgggttgaatatctactctcgaaaccgcactcgtttctcatccagcacacaagcgtggacggctattttctgttaagatatatcggtatcgtgggttcactttcgtttgtgggctgtttgcttcttttaccgatattgcttcccgtgaacgctaccaacggtaacaaccttcaaggctttgaactgctatcattttcaaatgttaccaacaagaataggttttacgcgcacgttttcctctcgtggatcttttttggcctgttcatctatgtcatctacaaggagctgtattactacgtcgtgtttagacatgctatgcagacaacaccactctatgacggactgctgtcttctaggacggttatcgtcacagaattgcacaagaggggatcctctagagtcgacctgcag

SEQ ID NO: 81198 - DNA, 579 bp, Saccharomyces pastorianus
atgttcctattgtattttgttttaaactgtaatcaatttgaggaacttttaggtgacgttgattttgaaggagaaatggttaacattgaaaacaagaacaccattcctaaaattttgttggagtggttgagttcggataacgaaaatgcaaacattaccctctatcaaggtgcttttctgttcaaatgttcagttacggatgaaccaagtagatttaggtttgcgttgattattaggcatctattgacaaagaaacccatttgtgcattgcgtttttacagtgttattcgtaacgaaataagaaaaatatcagcatttgagcaaacttcggattgtgttccacttgctttcgatattttaaacttattagtgacgcattcagagtctaattccttagaaaaacttcacgaagaatccattgaacgtctgaccaaaagaggtttatcaattgtgacttcttctggtatatttgcgaagaattccgacatgatgataccgttagatgtaaaacctgaagatatctatgaacgtaagagaataatgacaatgattttatcaaggatgtcatgttctgcttag

SEQ ID NO: 81199 - DNA, 3288 bp, Saccharomyces pastorianus
atgaggataatgagggagaatgaaggccaaaaagggaaggctaaccagaatttaataggagcagagaagactgaaagagacgaggaagaaacacgaaatttgcaagataaaagtgcaaaaaatactctgatagttgaagaaaatggaacgcttcgttataatccgcttaattcatctgcgtcgaactctcttttaaatgatgacgaccataccagtggaaaacatcacaaaacttcctcaaaggaagactcatatttaaacagttcgatggaaatgcagaagaaatctagtaagagatcgtcgcttcctttcgtgaggatattcaaaagtcgaagggaccactcaaatacttctggaaataaaaatgtcatgaacacaactaatacaagagcaaaatcatctactttgcatccacctggtgctcgccataataagaaaggcagtaaatttgatatgaactttgatttcgatgaaaacttagaagaagaagatgatgacgacgacgatgacgaagaaggtgacgatatacactctcaattttttcagttagatgatgattttgatgctaagggttctggagcaagtccagcccacaaaggcatcaacggcatgtccaacaataaaaacaacacctacacaaataacagaaacagcatcagcattcttgatgatcgagagagttcaaatggcaatataggaagtgcttcaaggttaaaatctcatttccccacaagtcaaaaggggaaaatttttttaactgacaataaaaatgatggacaaaaatctgattcactgaatgccaataaaggtatacatggagatggaagcagcgccagcggtaacggatcggtgagtagggacggtttgacggaaacggaaagcaacaatatttccgatatggaatcttatatcaatgaaaaagatttagatgatttgaattttgatacagtgacctcaaacataaacaaaacagtatctgatttgggaggacatgaatctacaaatgatggaacggcggtcacgaacagggattcaaaagacagccgcagtaatagcaatgaattcaatgcacaaaatcgtgaccgaatcactcctggctcatcatatgggaagtcccttttaggatctgaatattccgaagaacgttattctaataacgactcgtcaaccatggagagcggtgaaatgtctcttgattcagacatgcaaactaatactataccctctcattccataccaatgtctatgcaaaaatatggcatctatcatggcgatgatgactctaccttaaacaatgtcttcgataaagccgtactgactatgaattcatcgcgacacccaaaagaaaggcgcgatactgttatatcaggaaaggagccaacatccttaaccagttctaatagaaaattttctgttagctcgaatttaacttcaacaaggtctcctcttttacgaggacatggaagaacttcatcgacggccagtagtgaacacatgaaagccccaaaggtttctgacagtgtattgcatagggcaaggaagagcacgttgacgttaaagcaggaccactctcaacctagtgttccatcaagtgtccataaaagctcgaaagaggggaacatccttattgagaaaacaaccgattatctagtgtcgaaaccgaaggcctcacagttatcgaatatgttcaacaaaaagaaaaagagaacaaatactaattctgtagatgtgttagaatatttttcatttgtttgcggagataaagtaccaaattatgaatcaatgggtctcgaaatatacattcaagcttccaaaaaatataaaagaaattccttcactaccaaagtccgaaaatcgtctaccatcttcgaagttattggatttgctttatttttgtattctactgagaaaaaaccggacaattttgaagaagatggattgacacttgaagacatttctaatcctaataacttctctttgaaaattgtcgatgaagacggtgaaccttttgaggataactttggtaaactagatagaaaaagcactattcaatcaatttcggacagcgaagttgttttatgtaaggttgatgatgccgagaagtctcaaaatgaaattgaaacacctttaccatttgaaactggtgggggcctaatggatgcttctactttggatgctaacagcagtcaccatacaactgacggaaccatcaaccaactaagtttctacaaacctattataggtaatgaagacgacatcgataagacaaacggttcgaaaatcattgatgtaacagtatatttgtatcctaacgtgaatcccaaatttaactatactaccataagtgttttagtgacctcacatatcaacgatattttggtaaaatattgcaaaatgaaaaatatggatcctaatgaatatgcattaaaagttctaggaaagaactatatactggacttgaatgatacggtattaaggctcgatggtattaataaggtggaactcatctctaaaaaagatgcaagggagttgcatttggaaaaaatgaaacctgacctaaagaagcccgttttgccaacgatccaaagtaatgatctaactccgttaactttggagcctctgaactcttatctcaaagcagatgctggaggggctgtggctgccattcctgaaaacacgaaagttacatccaaagctaagaagatatccacaaagtataagctgggcttggcaaagcagcattcgtcatcaagtgttgctagtggaagtgtttcaacggctggcggtctcgccaatggaaatgggtttttcaagaacaagaattcatccaaatcctctttgcatgggacactgcagtttcataatataaaccgttctcagagtacgatggagcacacgcctgacactccaaatggagttggagataacttccaagatctttttaccggagcgtatcataaatataaggtatggagaaggcagcaaatgtcatttataaacaagcatgaaagaacactagccattgatggcgactacatatacattgtacccccggagggacgtatacattggcatgataatgtaaagactaagtcgttacacattagtcaagtggttcttgtcgaaaaatccaaaagagtccctgagcatttcaaaattttcgtaagaagagaggggcaagatgatatcaaaaggtactactttgaagcagtttcaggtcaagagtgtactgagatcgtgacgcgattacaaaacttattaagcgcttatagaatgaatcataaataa

SEQ ID NO: 81200 - DNA, 354 bp, Saccharomyces pastorianus
atggacacggtgacggtattaaatgaactgcgggctcagtttctacgagtgtgtccggagaaagaccaaatgaaaagaataataaaaccgtacatacccgtagatgaattcaacacagagcagtgcttagattcttctatccgtgaattatatatgaactcagacggcgtaagcctgttgcctgaactagagtctccaccggtatctaaggattttatggaaaactatgcttcattagggaaaatgaggataatgagggagaatgaaggccaaaaagggaaggctaaccagaatttaataggagcagagaagactgaagagacgaggaagaaacgacgaaacattgcacgataa

SEQ ID NO: 81201 - DNA, 1470 bp, Saccharomyces pastorianus
atgtacaccgattcggtttcggaatcatctttgtcgtactatttatcaaagtaccataacaaaccttgttgttcaatcgatttgaatcattacagcggccacattaacatagatatgcttaagagcattatgtctaagtacgatccagaggataaggatttgattcatcattgtaatattctagaattgggacttattggaagcgactcaatcaataactataacaagtttaaggggaccctggaaaaaaaatcggtaacggattattcctcctgttctacattcttattagaaatagtcaaggacaagtgcaagaaaactaatcctgaattgaaagacgtgcttttgtgtataacgatattggaaaattaccaagtcaaggaccctcataacttcgatactatgtgctggctgattgttttatacatgtacctgggtttagttcccgatgcttatttccatttcataaacttaaagattaaaaacgttcaaacagattccctagattacatgatattctcgagattttctactttgttcccgaataaacagagcgatttttactccaagacattccatgaacataataatttatacgatacatcactggctaatttaccaagatatattcaggtggcattcgaaagaaattcatatagcaaaatactaggaatgctcgagatgagggataaactaatgaaatcctatacaagatggaccaaaactttagaaaacttacagttctcacgtttatgcaacgacaagcgcggccacctactacaaaaattacacgaagattggagatctttagaaatgacgcaaagtgtatcattttctgacaatagagacttttccatattagatgaaaattttgcccaatttcttaaccgtggtaaaattttggaatatgctaacttgaatgaagaatcaatttttctaactttgataagagaacttattattgaagctttgccaaatggggagaaaacggaacaaataagtgcgctcttaaaaaaacttccatcaactaaccttgaagagttgttgaataataatttaactgaagtggagtcagcgtcatttctgatttttttcgaaatttacgaaaataacggtaaaaatctacatgatttaatttctaggttgatgaaagtcccaataaatgcaaaacaaaactggatggtatcccatacttacctcactaaaatggcaaccttaaaaacactagacagtttgaagagaatcaaagataaagaaattcaaaaactaatcaaaaactccctgaaggagttgaggggttgttgcgatgatatatttaaaggttattctaaagctttagtacaagcatatgaagaattacaaaaagatgaatgtggcaacttgttaaaagaacttgatgttaaagctgaaaatgtcaagaacattaaaaattcattactaggcatccaaaaaagtgtaagaaatttatga

SEQ ID NO: 81202 - DNA, 612 bp, Saccharomyces pastorianus
atgtccgacaagatacaggaggagatattaggactagtaagcaggtccaacttcaaacaatgctatgcaaaactggggcaattgcaaaaacaatttcccaatgcgttgtacttcaagattttggaaacctatgttaaattcaagcagtcacctggcaagttcgactacaataagctgctagaagaaccatatgtgctgaaagggacaacgattacgggcgacacgcgttccttggagtttttgcacaacttcttcgtagagttagggaagtacgacgaagcattgcacgtgtatgaaagaggaaatttcaaattccctagctacgaattgtcttatcactggtttatgaaagcattggaagattccaattataaccaaatgagcaaagcatctctacagttagctaaatacagtgacagtggaaacctgcctaaaagagcatattatttttggaatgcaatctcgattttagccgtatcaaggtttcaggaaaacactctttcagatcccaagaaaattttgcttctccaggctagcgcgccagtctttgttagacttgaaaccattccaaaatgttcaagagattatagtttattgtttggtgttggatga

SEQ ID NO: 81203 - DNA, 384 bp, Saccharomyces pastorianus
atgacaaatacatttttcgaaaggccaggctttgtcgttaactgcatttccattattttatccattggtactcagatgtcagggttaatgtcactaggcatgtcgagagtattgaagggttttaactatttgaaccctgtagggtatacatctatgatcatcattaatttcgcattcccagataatttgaaattaacctgcgaagatggcgggaaaaatccagacggtacttgtgaatttgcgaatggccatgatgtgttggtttcttatggtttagtcagaaatacgcaaaagtacctgggaatcattgtgtgcgtagccataatttatcgccttattgctttttttattttaaaagcaaaattggagtggataaaatggtga

SEQ ID NO: 81204 - DNA, 150 bp, Saccharomyces pastorianus
actctagaggatccccgaagatgtcctctagacttcggtaacggtagaacgctagctacgaagggagttatagcgtcaagtggccctcgcgagttacatgacttggtggtgtctacatcatgcgatgtcattcagtcaagaaacgcctaa

SEQ ID NO: 81205 - DNA, 405 bp, Saccharomyces pastorianus
atgggatggggtaacaatgcctccgcagccattcaaaggctgggtttaggtgaaattatcaagttcggtagaatgtttttcccagaatccaaagtcgagacctactatcaagaatccgctggtgttgcagatctgatcaccacctgctcaggcggtagaaacgtcaaggttgccacatacatggccaagaccggtaagtcagccttggaagcagaaaaggaattgcttaacggtcaatccgcccaagggataatcacatgcagagaagttcacgagtggctacgaacatgtgagttgacccaagaattcccattattcgaggcagtctaccagatagtctacaacaacgtccgcatggaagacctaccggagatgattgaagagctagacatcgatgacgaatag

SEQ ID NO: 81206 - DNA, 243 bp, Saccharomyces pastorianus
atgatccaaccatcccaaaatagcgttaacggtactgtcagggttagactgtataagggtaacgtcatcattctgggcagatctacaaagactgaaaagttgtatgatccaacagaatcctctatggatgagttgaccggattcttacctaccgataccaccggtttcattgccatccaggccattagaattaaaaaatacggtgaatccaaaaaaaccaaaggtgaagagttgactttgtaa

SEQ ID NO: 81207 - DNA, 804 bp, Saccharomyces pastorianus
atgtctaagggaaaagtttgtttggcttattctggtggtttagatacctccgtcatcttggcttggctactagaccaaggctacgaagttgtagctttcatggctaatgtagggcaagaagaagatttcgatgccgccaaggaaaaggccttgaagatcggtgcctgcaagttcgtttgtgtggattgtcgtgaagattttgtcaaggatattctatttccagctgtacaggtcaacgctgtgtacgaagacgtttatctgttgggtacctctttggcaagacctgttattgccaaagcccaaattgacgtcgctaaacaggagggctgtttcgcggtctctcatggttgtaccggtaaaggtaatgatcaaatcagattcgaattgtcattttacgctctgaagccagacgttaagtgtattacaccatggagaatgcctgaatttttcgaaagatttgctggcagaaaggatttgttagactatgctgcacaaaagggtattcccgtcgcccaaaccaaggccaagccatggtctactgacgaaaaccaagcccacatttcttacgaggcaggtatcttggaagacccagataccaccccaccaaaggacatgtggaaactgatcgtcgatccaatggatgctccggaccaaccacaagatttgaccattgactttgaacgtggtcttccagtccagttgacctacaccgacacacaagacttccaaggaagtttccgttaccaagcctttggatgttttcttggccgcatccaacttagcaagggccaacggtgttggtag

SEQ ID NO: 81208 - DNA, 1626 bp, Saccharomyces pastorianus
atgaagttaaagcaaggtcaaaagctttttgttcaggtgagtaatttcgccccacaagtctacatcatcacaaagaatgaaaacttcttgaaggaagtttttcagttaagaatctttgtaaaagagatcctagaaaaatgtgccgagggtatatttgttgttaaattagacaccgttgacaggttaattattaagtatcaaaaatattgggaaagtatgagaattcaaattttaagaagacaagctattttaagacaacaacagcaaatggcaaacaacaatgggaacccaggcactacttctactggaaacaataataatattgcaactcaacaaaatatgcaacagtcactacagcaaatgcagcatttacagcaattgaaaatgcagcagcaacaacaacagcagcaacagcaacagcaacagcaacaacagcaacaacaacaacagcagcaacaacagcaacagcacatatatccctcctcgactcctggtgtggctaattattcggcaatggctaatgcacccggtaacaatatcccatatatgaaccataaaaatacctctagcatggattttttgaactctatggaaaatacaccaaaagttcccgtatccgctgcggcaaccccatcactgaacaagacgatcaacggtaaggtgaatggcaggacaaaatctaatacgatacctgttaccagcattccatcaacaaataagaaactatcaatttcaaatgccgctagtcaacaacccactcctaggtctgcatcaaataccgctaagtcaaccccaaatacaaatccttctccactgaaaacccaaactaaaaatggcacaccaaaccccaataatatgaagactgtacagtctcctatgggtgcacaaccatcatataatagtgccattatcgagaatgcattcagaaaggaagaactcttgttaaaagatttggaaatcaggaagttggagatatcttctcgttttaaacatcgccaagaaattttcaaagattctcctatggatttgtttatgagtacgctgggtgattgcttaggtatcaaagatgaagagatgcttacgtcatgcactatcccaaaggctgtggttgatcacatcaacggctctggcaaaaggaagcctacaaaagcggctcaaagggctcgcgatcaagattccattgacatttccataaaagacaacaaattgcttatgaagagtaaattcaataagagcaataggtcgtattcgatagcgttgtccaatgtagctgctatattcaagggtatcggtggtaacttcaaagacttgtccactttggttcattcatcatcgccgtccacatcttctaatatggatgtcggcaacccaagaaaaagaaaagccagcgtattagaaataagcccgcaagattcgatagcctcggtgctatcaccagattcaaatataatgagtgattctaaaaaaattaaagtagattctcctgatgacccattcatgacaaaatcaggagccacaactagtgaaaaacaagaagtaacaaatgaagctccatttttaacttctgggactagttcagaacaattcaatgtatgggattggaataattggacaagtgctacttga

SEQ ID NO: 81209 - DNA, 615 bp, Saccharomyces pastorianus
atggtgaagggtaccgatttcgttcttttcacacgtatttatggagtgacgttcgcaagaaagggattaacagagttgagtgaagcctgtgaaacgataattttcacgccctttgtctacagaaggtcacatcgtttgggtggcctcttttcgaaacggttttacctcgtctctttgccgcagtttttcatttttttcttctggtacatcttcatagcctttatgtttcttttattgttgctcgttccaatagtgggtccaattacaatcaatatgctaccatttagccccggaatgggattttactattttgagccctattttgttgacgtgctacatttggattcgcgcaaactttccaaagtttactacaagggctttgccaagtggctcctttactcgatatccagcggtttattagagtctattcccattctgggtgggttgttcattggaacaaacgcagtaggtgcttcgctttggatagttaaagagataaaagaccgggaccagccagccgtacccccttcccctcctgcggaaccagaagagcctactgtaggatcctatgcacctccaatccaacaatctatagcccacattaatccgccatga

SEQ ID NO: 81210 - DNA, 252 bp, Saccharomyces pastorianus
atgtcgactagaccccaacctgattggtattaccatagacatccatatgcctctacgccactggcagaaggggaggaaccacaattactccccatccaagaccaagggaaccataagaaatcaaaaatttggatggcatacaaggctccgatagttcgatggtacaagaatgctatgcttgttaaagacaatttttggaaagacctagagtcgtcgcaccagatcatctggtatccgtataaagtatgttga

SEQ ID NO: 81211 - DNA, 654 bp, Saccharomyces pastorianus
atgagtgatttcattttcgtatacataacgaaaatgaggacaactatagatgtagttggcttacaagaattaatcgagatattcatctttcaggtgaaggtaaaactgcatcataaaaaaccctcaccgaatatgtattgggcgctttgcaaaacattacctaagttatctccaaccctaaagggcctttacttatctaaagatgtttccatagaggatgctattctgaactcaatagataataaaatacaaaaagataaggcgaagtctaaaggtaaacaaagaggagtgaaacagaaaatacaccattttcacgagcctatgttacacaatagtagtgaagaacaggttaaggttgaggatgcgtttaatcaacgcacctctactgatagtagactccagagtactggaacggcgccccgtaaaaaaaacaatgatattactgttctggctggttcattttgggctgtcctgaagcatcatttcacaagaagtgtgctgaacaaaaacggacttctgctcacaggtctgctgctactcttatgtttgaaaaaatataagtcattgatggcaattttcaaacatgttccagcggcctttcacactgtatacccccagattgtagggttgctaaaacttctagcgagcatatga

SEQ ID NO: 81212 - DNA, 384 bp, Saccharomyces pastorianus
atggctgcaagtgagataatgaacaatctgcctatgcattccctcgattcttctctaagggatttacttaacgatgacttattcattgaaagtgatgaatcgaccaagtcggtaaatgatcagaggagtgaagtatttcaagaatgtgtgaaccttttcataaaaagagatatcaaggattgcctagaaaaaatgtctgaggttggatttattgatattaccgttttcaagtccaaccctatgatattagatttatttgtcagcgcctgtgatattatgcccagctttaccaaattaggtttaacactgcagagtgagattttgaatattttcacgttagatacccctcaatgtattgagacaagaaaaattatttctcggtga

SEQ ID NO: 81213 - DNA, 1566 bp, Saccharomyces pastorianus
atgaaaatgctttgtcaaactagcaagattcatactataccggtatcaagaagggaactgacgcctgctcagataaagaagttgattacaccaagaccgaatgggaaaattctttttaaaaggattattcatgggaataggttagtcgatatcaagcaatcagcatatggtagtaagcaggtctttcctactgacgttagtattaaacaaactaatttttatcagggatcaatcatgtcaaatgagcagaaaattagaattgaaaatgaaattatcaacttaaagaatgaatacaacgatcgaaaatctacgttagatgcattgtcaaaccagaaaagtggttataggcacgaattatctgagttggcgtcaaaaaacgacgatattaatagggaagctcatcaattaaatgagattcgcaagaagtacactatgagaaaaagtacaatagagactttaagagagaaattagatcaactgaaacgtgaagctagaaaggacgtatctcaaaagattaaagatattgatgatcagatccaacaactattactcaagcaaagacatttgctgtctaaaatggcctcttcaatgaagagtttaaagaattgtcagaaggagttaataagtactcaaatccttcaatttgaagcccaaaatatggatgtttctatgaatgacgtaattggttttttcaatgagagggaagctgatttgaagagccaatatgaagacaagaaaaagttcgtaaaagaaatgagagacactcctgaatttcaatcatggatgagagaaatcaggtcttatgaccaagacactaaggaaaaattgaataaagtggcagaaaaatacgaggaggaagggaatttcaatctgtcattcgttcaggatgttctcgataaattagaatcggagatagctatggtaaaccacgacgagtcagccgtaacaattttggatcaagtcacagccgaactgagagagttggagcacacggttcctcagcagtcgaaagacttggagaccattaaagctaaattaaaagaagatcacgcagttttggagcccaaattagatgatattgtatcaaaaatctctgcaagatttgcgcgcttattcaacaatgttgggagtgctggtgcggttcgtctagaaaagccgaaggactatgctgaatggaagatagaaatcatggtaaaattcagagataatgcacctttaaaaaagttagattcccacacgcaatcaggtggtgaaagagctgtttctacagttctttacatgattgctttgcaagagtttacctctgcaccatttagagtggttgatgaaatcaatcaaggtatggactctagaaatgaaaggatcgttcataaagctatggtggagaacgcgtgtgccgaaaacacttctcaatattttttaatcactccaaaattattgactggcttgcattatcatgaaaagatgagaatacactgtgtcatggctggttcttggattccaaacccttctgaggatccgaagatgatacatttcggtgaaacttctaactactcattcgattaa

SEQ ID NO: 81214 - DNA, 1608 bp, Saccharomyces pastorianus
atgaccagtctaatagatttgggcagatatgttgaaagaacgcaccatggagaagatacagagccaagatcgaaaagggtaaaaatcgcaaaacccgacttgtcttccttccaaccaggcagcattattaagatccgtttacaggattttgttacttacactttaaccgaattcaatctttcaccgtctttaaatatgatcattgggccaaacgggtctggaaaatctaccttcgtatgcgcagtgtgtttaggattggctggtaaacccgagtatattggtaggagtaaaaaagtggaagatttcatcaaaaatggtcaagatgtttcaaaaattgaaatcaccttgaaaaattcaccaaacgttactgatattgaatacatagacgcacgtgatgaaacaataaagattaccagggttattacgagatccaagaggagatcagattatctaataaatgactaccaggtatctgaaagtgtagttaaaactttagttgctcagctgaacattcagttggataatctttgtcaatttttatctcaagagcgtgttgaggagtttgctcgcttgaagtcagttaaattattagtagagactataaggtcaatcgatgcaagcttattggatgtgttggatgaactaagggaattgcaagaaaatgagcaaagcttgcaaaaagatctcgatgttaaaaaagctaaaattgttcatttgagacaagaaagtgataaactacgtaaatcagttgaatctttacgagattttcaaaataagaagggtgaaatcgagttacactcccaactattaccttatgtgaaagtaaaggaccataaggaaaagctaaacatatataaagaagaatacgaacgagcgaaagcgaacttaagggctatactgaaggataaaaaaccgtttgcaaatactaagaagactttggagaatcaggtggaagagttaacagagaagtgttccctaaaaaccgatgagttcctgaaagcaaaagaaaagatcaacgaaatcttcgaaaaattaaatactattagggatgaggtcatcaaaaagaaaaaccagaacgaatattatagaggaagaaccaaaaaactacaggccaccattattagtacaaaggaagattttctaaggagtcaggaaatattagcacaaacacatcttcctgagaaaagcgtatttgaagatatagacattaaaagaaaggaaattattaataaagaaggcgaaattagggatcttatttccgaaattgatgcgaaggcgaacgctattaatcatgagatgagaagcatacagagacaagctgaaagcaagaccaaatcccttacaacaactgataaaatcggtatcttaaatcaggaccaggatttaaaggaggtccgtgatgctgtgttgatggttagagagcatccagaaatgaaagataaaattctagaaccgccaataatgaccgtgtctgccattaacgctcaatttgctgcatatttagcacaatgtgtggattataatacgagtaaagccttgactgttgtagattctgattcttacaagctatttgctaatccaattcgtgacaaattcaagataatttga

SEQ ID NO: 81215 - DNA, 426 bp, Saccharomyces pastorianus
atggatgtagatgatggttcgggggccgctgatccgtttactgacaccaatggaagtagcagtaataacatatcagaattgattattggtatttccattgagcctcgagaacaaggaatgatgaaattagaagagtggaaggccagcatgaatgccgaagcacaaaagaacaactcattgatcttgtcaagacctaacttaggaataattcgaaatattaccacggcagggcagttggcacaagtttacccttcattgacacaagaattggccgccaaaatcgttcagcatgcatataactatttatcagggttcctagatgctcagggaaacgtgcccatcaagaggtttgatacatggtgggacaaatttagaaatagactggctaacgacgggacgtttttggatgaagtgactaaaaattag

SEQ ID NO: 81216 - DNA, 120 bp, Saccharomyces pastorianus
atgtttgctgcaattgcctcaggaaatccattgcaactatcggtagaagtccccaattcaaatgggttacagcatacaattgtcctttctcgaacgaaaccgaactatgggatcctctag

SEQ ID NO: 81217 - DNA, 237 bp, Saccharomyces pastorianus
atgaatgcggcttccgatgcaaagaggtatctgccgatcagttacacatatcaaaaaatccgtcaacatacgcaaaaaaataaaagtatccaagaacaactaaatcctgaagattcaacttcgatctcatcagcgttagagaacattgcatctggattgcacgttcgtggacagaaagtagaattgcaaagcatcaaggatgcattacataagatggacaaaaacgtcttggaatga

SEQ ID NO: 81218 - DNA, 369 bp, Saccharomyces pastorianus
atgaaaccagtaacatgttgcaaccaaaagaataacataatgccatccttagtccccgtttgctgttcagaaaagaaaatagaatccgatgctaagaaatcaatatcgaaatgctgtggagacaaagaaatctacgataacgagaatagaccgatcactaaagaggatgggtcatggatacctggaagctgcaagcaatgtagatcagacccccatagtaggaatttttgtcaatcactttcgaataaatgtagttcaagctctttctcttccaacagtgcgttgtcaccggatctaaatgaacaacaaactgacgcgaattacaattcaatcaagctacccgaaatatgctcctgcaagaatgcataa

SEQ ID NO: 81219 - DNA, 1251 bp, Saccharomyces pastorianus
atgaagtacaatactttagcagcagtttctcgaatatggtacaaatttggccccatagtcgataaattatttactaaccggctattaccggttctattccccccgcaaatgggagaagaatgtaacgtcgaagatgttctcgaaatagttcataacttccatccatatttttctattcgtaggctaaaggataataggcctctattgtcagattcgactattagccagctaagagagggtttgtttggtatgctcagcatattaaacgactcgctgacaaggacgcaaaatgaaaacgaccatggtagcgacaatctgatcgacagtgacgatggatttggctcagacaacgatcctgaacaacaagcgtacctcgatgaactcgtatcagaaggttatgacgaaaacatgtatgacggtgatacggatgacgaagacgcagatgatataaacgttgaaaaaaacgatgaagccaccaaagacattacagaaacgaacaaaatccttttaatcttttctgagttacattatcctcaggaggagcgcttctctgaactgttggttgagttgcagactaagatcgctataaacacatccttaattgataaaattctttcaaaagagacaacagaattacccactcacaatggggaaatcgcagatttgaacgaaattctaaatgaagtgaaaggcaataaaccaattagaaaaaacgttattttttgtacgttagcgcatactttgtcgttgcaatccggttccgaattgtctgttctacagctgtcaatagaggttattgatcatctgctggttaaaaatcattcaaataacatcactcgtggcgagcaatttcaattgattaagttgatattaccccatctaaaaacaaataaatcttttattgatacattaaaagcaggaaattttacccaaaaaattgatgaaggagtgaccttaagaacaatgattctttctctactactacaactattcccactggattactctatgctaggtgagattttacccactattgcgcgatattctgtaagggataaggatcttggggtgagagatctgtccttccaattgctggaccaaattctacgcacatactataattacctaattggtatcgattgggaatggtataaagatgacttctatcaagttttgcaagaaacttgtattaaaaaagacataaataccaacctcttgctacaatttcctccttatctccctcatgactag

SEQ ID NO: 81220 - DNA, 243 bp, Saccharomyces pastorianus
  modified_base (230)..(230): a, c, g, t, unknown, or other
atgagtttgcacattagtaaactgattgagcaatatcgttccactaaggacaatgaccttaaatatatgcttttaaggcaaaactttaaaattaacgacatagaggatgagctggcccctcttgttaacgaattgctgctcccggtattggtcgaagaacaagacatggaaattctcaacctagtatcgtttcaagtgctccccgatttagttctttctatgatcagcgnacctgcagctgct

SEQ ID NO: 81221 - DNA, 1554 bp, Saccharomyces pastorianus
atgttggagcatgatgttgaatttaggcctttttccaagaaagttctagaatgtttgcccgcagaaggccacgattggaaggccccaacaaaactggacgatcctgaggctatttcaaaggatccattattgacaaaaagaaaggatctcagagataaacttatatgtagtatcgatcctccaggatgtgttgatattgacgatgccctacatgcgaaaaagcttccaaacggtaattgggaagttggtgttcatattgctgatgttactcacttcgttaaaccgggcactgccctggatgcggaaggtgctgcaagaggtacttctgtatatttggtagacaaacgtattgacatgctgcccatgcttctaggtaccgacctgtgttctctaaaaccatacgttgatagattcgcattctctgtcatttgggaattggatgatagtgctaatattgtaaatgtcaattttatgaaatccgtcatcagatctagagaagctttctcatacgaacaagcacaactgagaattgatgacaaaacccaaaatgatgaattaacgatgggtatgagggctctcttgaaattgtctgtaaaactgaagcaaaagagactagaggcaggtgccttgaacttagcttctcctgaggttaaggtccacatggatagtgagacttcagatccaaatgaagtggaaatcaaaaaattactggcgacaaattctttagttgaagaatttatgttgttggctaatatatcagtggcaaggaagatatacgatgccttccctcaaacggcgatgctaagaagacacgcagctccgccatctaccaattttgaaatcttaaatgaaatgttaaacacaagaaagaatatgtcaatttcgttggaatcgtccaaggccttggccgattctttagataggtgtgtggatcccgaagatccatattttaatacattggttcgtatcatgtcgactcgctgtatgatggcagcccagtatttttattctggagcttattcttatcctgactttagacactatggtttagccgttgatatctacacacatttcacatcacctattagacgttactgtgatgttgtggcccatagacaattagcaggtgccattgggtatgaacccctaagtttgactcatcgtgataagaataaaatggacatgatttgcagaaatatcaacagaaagcacagaaacgcccaattcgccggtagggcaagcatagaatactatgtcgggcaagtaatgaggaataacgagtccacagaaactggatatgttattaaggtatttaataatggtatagtcgtactggttcccaagtttggcgtggaaggcttgataagactggataatttgactgaggatcctaactcagccgcttttgatgaggtggaatacaaattaacctttgtgcctacaaattcagataaaccgagggatgtttacgttttcgataaggtcgaagttcaagttaggtcggtgatggatccaattactagcaagcgtaaggcagaattattgttaaaatag

SEQ ID NO: 81222 - DNA, 819 bp, Saccharomyces pastorianus
atgatagctcaaagatcgaaaaaaattcagcccacggcaaaagttgtatatatacaaagaagatcctggagacagtacgtcggtcaactagcaccaagttctgttgatccacaaagcagtagtacacagaatgtcttcgttattttgatggacaaatgtcttccaaaagtcagaatcagaacaaggcgtgctgctgaattattggataagaggattgtcatttccattgattcgtggcccaccactcataaatacccattaggtcactttgtgagagacctcggtacaattgaatctgctcaagctgaaacagaggccttattgttggagcatgatgttgaatataggcctttttccaagaaagttctagaatgtttgcccgcagaaggccacgattggaaggccccaacaaaactggacgatcctgaggctgtttcaaaggatccattattgacaaaaagaaaggatctcagagataaacttatatgtagtatcgatcctccaggatgtgttgatattgacgatgccctacatgcgaaaaagctttcaaatggtaattgggaagttggtgttcatattgctgatgttactcacttcgttaaaccgggcactgccctggatgcggaaggtgctgcaagaggtacttctgtatatttggtagacaaacgtattgacatgctgcccatgcttctaggtaccgacctgtgttctctaaaaccatacgttgatagattcgcattctctgtcatttgggaattggatgatagtgctaatattgtaaatgttaattttatgaaatccgtcatcagatccctttag

SEQ ID NO: 81223 - DNA, 603 bp, Saccharomyces pastorianus
atgaacgattatgacagaaacgacagggctataaggaaaacctgtcaatggtatagtgagcacttgaaaccttatgacataaacgtcgttcttgttaccaacgatcgtttgaatagagaagctgccactaaggaagtggagtccaatataataaccaagagcttggtacagtatatcgagttactaccaaatgcagacgacatcagagactctattcctcaaatggattcttttgataaagatcttgaaagggacacattttcagatttcacgttcccggagtactattctacagcaagagtaatgggtggtttgaaaaatggcgttttgtaccagggcaatattcaaatatcagagtacaactttctagaaggttcagtgagtttaccaagattttctaaaccagtgttaattgtagggcaaaaaaacctaaatagagcattcaacggtgaccaggttatcgtggaactgctactcaatcagaatggaaggcaccctcatccattgtcttggattctgaacatttcgacgttaacgataaccccgatattgaggctggcgatgacgatgacaataatgagtcctcttccaataccaccgtga

SEQ ID NO: 81224 - DNA, 429 bp, Saccharomyces pastorianus
atgtctgattcaacaacttcccccacaaccacattttctacttcattatcaccaaatgcgaccacatcacttttttgtggtaacatgggagttatgtatatgaccatgtctgaatacggatcacatttcgcagaaaactgctgggcatgcggtacagaatatgaatcagattttgcaacgttgactaaaaaggttccagggaccacattctcagctaatatgccaacatctacttggtatagtgtcctggattgcggctattcctcttcaattaacgtggcagaaaataaaaattcacccatcgattattggaattgtggtagaacatatgccaggagttatgctctgtccgatgcgctttcactaaagccaacgaatatgttacagtactttctattagtattattttttatctgtattatactatga

SEQ ID NO: 81225 - DNA, 1425 bp, Saccharomyces pastorianus
atgagtttacttgatattttacacaggagcagatatcaaaagctaaagcggtctaatgatgaagatggcaaagttccccagctctctgaaccacccgaagaagaacctaataccattgaggaggaagagctcatcgatgaagaagctaaaaatccgtggctaactgggaatttagtggaggaagcaaactctcagggtattatccaaaatcgcagtatttttaatctattcgctaatacgaatatttacatatttttccgtcattggacaacgatttatgagcggcttttggaaattaagcaaatgaatgaaaaggtcacaaaggaaatcaacacaaggtcgacagttacttttgccaaagatctagatttattatcgagtcaactttccgaaatgggactagattttgttggtgaagacgcgtacaaacaggttttaagactgagtagaaggttgattaatggggatcttgaacatcagtggtttgaagagagtttgcggcaagcttacaataacaaagcgtttaaactctatacaattgataaagtcacccaatcgttggtaaagcatgctcataccttgatgactgacgctaaaactgcagaaataatggctttgttcgttaaagatagaaatgcctccaccacgagtgcgaaggaccaaattatctatcgcttgcaggtgcgctcacatatgtccaacacagaaaatatgtttagaatagagtttgataaaagaactctgcatgtttccattcaatatattgcacttgatgatttgacactaaaggaaccaaaggcagacgaagataaatggaaatattatgtaacatcgtatgctctgccacatccaacagaaggcattccgcacgagaaactgaagataccatttttggaaaggctcatcgaatttggacaagatattgatggaacagaggtagatgaggagttttcccccgaaggcatctctgtatcgacattgaaaattaagatccagcctataacctaccaactgcatattgaaaacgggtcttacgatgtttttacccgtaaggctactaacaaatatcctactattgctaatgataatactcaaaaaggaatggtttctcagaagaaggagttgatatcaaaatttctagactgtgcagttggtttgagaaataatttagatgaggctcaaaaattaagtatgcaaaaaaaatgggagaacctaaaagacagcatagtaaagacgagtgctggcaaccagggaatagagagtgaaaccgaaaaaggtaaaattacgaaacaggagcagtcggataatttggacagctctactgcaagtgtactgcctgcatccattactactgtaccacaagatgataatatagaaacgactgggaatactgaatcttcagacaagggggctaagattcaataa

SEQ ID NO: 81226 - DNA, 306 bp, Saccharomyces pastorianus
atggttatgccatatggtgttcctaagggagatgggaacaattttccaaaaaacgatatttcaaaatatgaggctaactcctcattggaagaccacatcctttcacttccctggccaccagatggaggtaaaacaaacaccgtcttcaatcatggcagctcaacaatagagatgcgtaatgaaagtggcgagcagctaataaggaccagacttcctcaaaatggcagacatgcttctcgtgagaagtggtacaacgactggggtgaatcactagacgattttggagtggatgttgatatggaatag

SEQ ID NO: 81227 - DNA, 855 bp, Saccharomyces pastorianus
atgccagtaaagttaaggtggccttggttaggaattgctataccaacgtttctgatttcatttataggctatggtgcacactactttattttatccaatttcttgtcagttccgaaacaaataacatttgagttctgtttgtcaatgatatggctctcctattacttggccatctacacaaatccaggaaggcctttgcccaactacaaaccaccccctgatatctggcggaatttctgtaagaagtgccaaaattataagccagaacgttcacatcattgtaaaacctgcaatcaatgcgttttaatgatggatcatcattgtccgtggacgatgaattgcgtcggctttgcaaactatccgcatttccttagattcttattttggatcatagtgacgactagtgttttattttgcatacaagctaagcggatatattttatttggcaacaaaggcacttgcctggctacttcttcaaaaaatcagaactgattttcttaacaatatcgagtcctttaaattcttttgtcctactaacgataacaattcttttcctacgatgtttattcaatcaaatcttgaatggaagatctcaaattgagtcgtgggatatggatcggctagaatctttgttcaactccggaagattaacccagaaattaattgataatacttggagaatatatccagagtcgaggtcgtttcaaaataaaaaggatgctgaggaacatttgacaaaaaaaaggccacgttttgatgaacttgtaatttcccttacgattttgatttgtacactaatgcattactgtaccttggtcccattcatttatggttatgccatatggtgttcctaa

SEQ ID NO: 81228 - DNA, 828 bp, Saccharomyces pastorianus
atgaaattccggaatggcaaagagacaaatgattttattttacatggatacgtgaaagaaactagtagcttcattgaaacttttaaaagtttgttttatttgcataatgaaagtgtcaatatttattcacatttaattcctgctctcgggttcttcactgtactgttgctagataaatctactatcaaagtgtttgcaacaactacatggctagatcatatggtaatcgacctcttttattcgggggcgtttgcatgtttaatactgagtagctcctttcattgtctaaagagtcactccttaagaattgctaccttaggaaataagttggactaccttggtatttgtatattgattgttacgtcaatggtcagtattttgtactacggctattttgagaaattttccctattttgcctatttgcgcttattaccgttagctttgggatcgggtgtagtattgtgtcactaaaagataagtttcggaaaagagagtggagaccttacagagctgggctatttgtttgttttggtttatcctcaattattccaatattcagcggcctttactgctatagtttttcagaaatttggacccaaattcagctcttttgggtattacttgggggtgtcctatatataattggcgctgttctttatggaatgcggtttcctgaaaagatttgccccggtaaatttgatatttggggtcattctcaccaacttttccattttctagttgttattgcggcattgtgccacttgagaggtttattaaatagttatgagttagtccatataaagatggagaacgggattgtctcctag

SEQ ID NO: 81229 - DNA, 189 bp, Saccharomyces pastorianus
atgctgcatgttggagaagaatcattccaaatgtcaactttattagaaaggactaagagtgtgcaagagctgaagaagagagctgcagggaacacatccgcaaatcccgcagaggtcgctaaagctaaaaaagtactaagaaggctatatagttgggatgaaattccggaatggcaaagagacaaatga

SEQ ID NO: 81230 - DNA, 573 bp, Saccharomyces pastorianus
atgttatggaaagggttttcggtgttgtgcaacagcaatatttccaagagccgagccaagcctgtcactaattcttctattctgttgggtaagattttaccacgtgaggagcatgatattgcatatagcaaagacggcttgccaaataaagtgaagacggaagatatcaggatccgagcacaaaatttcaagtctgccttagcaaacttggaggatatcatattcgaaatagagaaacctctcgttgttcctgtcaagctagaggagattaagacagtagaccctgtgagcgcacctaatcactcgcctgagattgataatcttgatgatattgttgttttaaagaagaaaaacattcaaaagaaacaaccagcaaaggaaaaaggtgtaacggaaaaagatgctgtggattattcaaaaattccgaatatcttatctaataagcctggccaaaataatagacaacaaaagaaaaggagattcgacccatcatctagcgatagtaatggaccaagggcagctaaaaagaggaggcctgccgccaaaggtaagaatctgtcatttaaaaggtga

SEQ ID NO: 81231 - DNA, 1689 bp, Saccharomyces pastorianus
atgacttctgaaaatccggatgtacttttatctagggtgataaatgtagtgagagcagcatcatcgttagccagtcaagatgtggagttttacaagaatttagacaggggatttagtaaagatctgaaatcaaaagcagacaaacttgcggatatggcgaatgaaataattctctctattgatgagcaccatgaatcatttgaacttaaagaagaggacatttctgacttgtggaacaactttggaaacatcatggataatttgttagaaatgtcagaccattcgctggataagctgaattgtgcaataaactcaaagtcaagaggttccgatcttcagtatttaggcgaattttcaggaaagaatttttctcccaccaaaagagtcgaaaaacctcagttgaaatttaaaagtccaattgataacagcgaaagtcatccgttcatacctttattgaaggaaaaaccaaatgctttgaagcccctctctgagagtttgaggttggttgatgatgatgaaaataaccccagtcactacccccatccttatgaatatgagattgatcatcaagagtatagtccagaaattctccaaattagagaggagattccctcaaaatcctgggatgattcggtaccaatttgggtagatacaagtacagaactcgaatcaatgttggaggacttgaaaaatacgaaagagattgccgttgatcttgagcatcacgattataggtcatactatggtattgtttgcctcatgcaaattagtacaagggaaagggattatttagttgatactctaaaacttcgcgaaaatttacatattctgaacgaagtgtttacgaacccttcaattgtgaaagtttttcacggtgcattcatggatattatttggcttcagcgagatttaggtttgtatgtcgttggtctcttcgatacttaccatgcgtctaaagcaatcggtcttcctagacatagtttggcctatcttttggagaattttgccaattttaaaacttcaaagaaatatcagttggctgactggcgtataagaccgctttcaaaacccatgacggcatatgccagagcagatactcactttttactaaatatatatgaccagttgagaaacaaacttatcgagtctaataagttagcaggtgttctttatgaatcaagaaatgtcgcaaaaagacggtttgaatattcaaagtatagaccactgacaccttcttcagaagtttattctccaatcgaaaaagagagtccttggaaaatattgatgtatcagtacaacataccacctgagagggaagtattagtaagagagctataccaatggagagatcttattgcaagaagagacgatgaatcgccacgatttgttatgccaaaccagttattggctgcacttgtcgcatatacacctactgatgtcataggtgttgtttctttgaccaatggcgtaactgaacatgtccgccagaatgcaaaactattagctaatttgataagagatgcattacgaaacatcaagaataccaatgaggaagctactcccattccatcttccgagaccaaagcagacggaatattgttggagactataagtgttcctcaaattcgtgatattatggaaaggttttcggtgtgtgcaacagcaatatttccagagggggatcctcta

SEQ ID NO: 81232 - DNA, 474 bp, Saccharomyces pastorianus
atggaaatggctgtaaatgcagctgtagatagcggtgtccattttgctattgcggcaggaaatgaggatgaagatgcttgtctcagttcaccagcaggagctgaaaaaagtattacggtcggtgcttcgacatttagtgatgatagagcattcttttcgaactggggcacatgtgttgatgtgtttgctcccggtataaatattatgtccacctatattggttcaaggaatgcaactttaagtttatcaggtacttccatggcgtccccgcacgttgctggtattttaagttactttttatcattacagcctgcaccagacagtgaatttttcaacgacgctccctcacctcaagaattgaaagaaaaagtcctaaaatttagtacacagggagtactgggtgatatcggtgatgatactcctaacaaattaatatataatgggggaggtaagaaattggatggtttttggtag

SEQ ID NO: 81233 - DNA, 360 bp, Saccharomyces pastorianus
atgaaattctctaccatcttacctatactttgggcaaattgctgtctttgtatgatcatccctgaattcgacgggatagttcgttttattgagaatattgatggtactcgcagtgtaagagcaggagaaggtttgggacagcatgatcctggaaattttcacactgaacatcaacatgtcgctcataaaacagagtttctaccttatcggtatgtcatagtctttaatgaagatatttccctccagcagattcaatcgcatatgcaagtggtacagaaggatcatagtacctcagtaggtaagcttacagaagatgaacgctttttggagggtaatttcttcttcagggggatcctctag

SEQ ID NO: 81234 - DNA, 588 bp, Saccharomyces pastorianus
atgatcacacagtgttgcatacaagcgttatatgaaactagaaatgatggtgcaattaatttagcgaaacaatttgagagacgtcgttgtaaccactcttttaaagatccaaagtcacctgcggagtgcatcgaaagcgtcgttaatattagcggtgcaaataaacacaggtatgtggttgcttctcaggacatagatttgaggaggaagctgaggacggttccgggtgttccattaatccatttaaccaggtctgttatggttatggaacctctcagtacggcgagtgccaaggcaagcaagattactgaagaacaaaaattgtataagggtctcaatgatcctaatattgaaaaacttcaagaaagtggtgatggatcaggaaaggaatctatcactaagaaaagaaagcttggtccaaaggctcctaatcctttgagcgtaaagaagaagaagaaagtcaactcgcccagcgatgaggtgaaagacaaagaagatacttctaaagaaaagaaaaaaagaagaagaaggaaacacaaaagcaacactaacgtccccgtttcaaatgggaccacagccgcgcagtaa

SEQ ID NO: 81235 - DNA, 156 bp, Saccharomyces pastorianus
atgctgcaggtcgactctagaggatcccccgctcccgatatacctaacatgcttcaaaagagggctaagtcatataggaaacaacttcttgtttacagtcacacatttaagttccgtgagccatatcaagtttggttgataatcagcttgttttag

SEQ ID NO: 81236 - DNA, 252 bp, Saccharomyces pastorianus
atgaaaattaagttgtttggtggaaaaataacagatcagcagtcactttgtaacttaataatcataccatatactgatcctattttgaggaaagactgcatgaatgaggtacacgaaaaaataaaagaacaagtaaaggcttctgatactataccgaaaatagccagggtcgttgcccctgaatgggtggatcattctattaatgaaaactgtcaagtgcctgaagaagacttccccgtagtcaactactga

SEQ ID NO: 81237 - DNA, 1062 bp, Saccharomyces pastorianus
atgatatcagcactagattctatacccgagccccaaaactttgcgcccagtccagatttcaaatggctttgtgaagagctatttgtgaagatacatgaagttcaaattaatggaacggccggcactggcaaatcaaggtctttcaagtactatgaaataatatcgaatttcgtcgaaatgtggagaaaaaccgtgggaaataatatatatcctgcactggttcttgctcttccctaccgcgatagacgaatctataatattaaggattatgtattaataagaactatatgctcttacttgaagttgccaaaaaattctgcaacagagcagcggttaaaagattggaaacagcgtgtcggtaaaggtgggaatctttcttctcttcttgtggaagaaattgctaaaagaagggctgaacctagctcaaaagcgattacaattgataacgtcaatcactatctggatagtttgagtggagacaggttcgcttccggacgaggatttaagagtcttgtcaagtccgaacctttcctgcactgtgtggagaatatgagtttcgtcgaattaaaatacttctttgatatcgtgcttaaaaatagagtaataggaggtcaagagcacaaattgctaaactgctggcatcctgatgctcaggattatcttagcgtgatatctgatttgaaggtggtaacttcaaaactttatgatccaaaaattcgtctaaaggatgatgatttgagtataaaagttggctttgcattcgcgccccaattagccaaaaaagtgaatctttcttatgagaaaatatgccgtacactacatgatgattttttggtagaagaaaaaatggatggagaacgaattcaagttcattatatgaattatggtgaatccataaaattttttagtagacggggcatcgactatacctatttgtacggagcgagcttatcatcaggaactatatctcaacatttgaggtttacagatagtgttaaagaatgtgttttagatggagaaatggtgacagtagatgcacaaagacgggtgattcttccattc

SEQ ID NO: 81238 - DNA, 1224 bp, Saccharomyces pastorianus
atggtgtttgatcttttatacctgaatgggacttcgttgacaccattaccccttcatcaaaggaagcaatatctgaacagcattttaagtcccttgaaaaatattgtagaaatagtacgatcttctagatgttatggtgtggagtcaatcaaaaagtctttagaagttgcaatctcactgggttcagaaggagttgttttgaaatattataattcaagttataatgtcgccagtcgaaacaacaactggatcaaggtaaaacctgaatatttggaggaatttggagagaatttagacttaatagtaataggcagagattctgggaaaaaagattcttttatgctagggttacttgtgctagatgaagaagagtataaaaagcaccaaggagactcctctgaaattgtagaccactcaagccaagaaaaacacatacaaaattcaagaagaagggtgaaaaaaatactttcattctgttctatcgcaaacggtatatctcaagaagaattcaaagaaatcgaccgcaaaacgagaggacattggaaaagaacctccgaagttgctccccctgcttcaattttagaatttggctcaaaaatacctgccgaatggattgaccccagtgaatcaattgttctagaaataaaatcacggtctttggataacacagaaacgaatatgcagaagtacgctaccaattgtactttgtacggcggctattgtaaaagaatacggtacgataaagaatggacagattgttacacacttaacgacttatacgaaagtaggacggctaaatctaaccccagctatcaagcggaaaggtcacagcttggattgatacggaaaaagagaaagagagtacttatttcagacagctttcaccaaaacaggaaacaactgccaatttcaaacatctttgccggattacttttttatgttctctctgactatgtcacggaggacactggaatacggattacacgggctgaacttgaaaaaactattgtggaacatggtggtaaactgatatataatgtaattttaaaacgtcattcaattggggacgttcggttaatcagctgtaaaactaccacggaatgcaaggctttaatagatcgaggatatgatatattgcacccaaattgggtactcgattgtatagcatataagaggctcatcctgatcgagcccaattattgctttaactctctcaaaaaatga

SEQ ID NO: 81239 - DNA, 222 bp, Saccharomyces pastorianus
atgagagccgtcgctgaaaaaagggtagattgtttgggtgatagttttgaaaatgacatttcggaaaccaaactgtcatcattgtataaatcacaactaagtctaccaccgatgggcgaactcgagatagattctgagttcggcggtttccattatttttattctccaacaggattgcatacgtaccacgtcgcaaaattagcacagaagatgacattatag

SEQ ID NO: 81240 - DNA, 108 bp, Saccharomyces pastorianus
atgaaaagcagggaaacgcaatctgaggaatcagaagacgaggaaagtggttcaaaagaaaatgaagagcctttaagttatgaccccttaggcaatttaattcgatag

SEQ ID NO: 81241 - DNA, 825 bp, Saccharomyces pastorianus
atgtgtggtggtgaagatgcctattctgtgtaccaacttgactctgacacaaatagcaatagcataagcagctcagattcaagtacggagtctacttctgcgtcgtcttccacaacttcttcaacaacgtcctccacaacatcaactacatcatcaatggcgtcttcctctacagtacagaattcccccgagtcaactcaagcagctgcctctatttcaacgtcacagagttcgagcactgtaacgtcagaaagctcgctaacttcggatactttggcaactagcagtactagctctcaatcacaggacgccacttcgataatctattccactacttttcacactgagggcggttccacaatttttgtcacgaacaccatcacggcaagtgcacagaattcaggatcggccacaggtacagctggatctgactctacgagtggaagtaaaactcataaaaagaaagccaatgtaggggcaattgtaggcggcgttgtaggtggtgtagtgggagccgtagccattgctctttgtatcttgttgattgtcagacacattaatatgaagcgggaacaagacaggatggaaaaggaataccaagaggcgataaaaccagttgagtaccctgataaactatacgcctcttcattttcatctaatcacgggccctcttcaggtagcttcgaggaggagcacaccaaagggcaaactgatattaaccctttcgacgactcaaggagaataagtaacggaacattcataaatggcggaccaggagggaaaaacaacgttttaacagtggtcaatccagacgaagctgattga

SEQ ID NO: 81242 - DNA, 132 bp, Saccharomyces pastorianus
atgagaccgaacaaaacaagtctgcttctggcgttattatccattttatcgcaagcgaacgcctatgaatacgtgaattgttttagctcactaccctctgacttttcaaaggccgattcatataactggtag

SEQ ID NO: 81243 - DNA, 297 bp, Saccharomyces pastorianus
atggtgtgtaatttttttacatacttctggaagcagatatcatcggcccccaaagtcgccttctgcaaaataatgtggagatcttatcttgtttttctcttctttatgacaccaaggatacaaacatattgtcctgtaccggtactaaggtcaatggcagtattaaatattatctctccgcttataatttttgtcagtcctattaaaaagcaagacagtttacacagcagcgcttgttacgcaaatttgacgttagtggaaaagctgcaactttggcattctatgtcaaacgattag

SEQ ID NO: 81244 - DNA, 162 bp, Saccharomyces pastorianus
atgtgtcttcattttattatttctatacttttctccaaatatatcttcgtttttcttttcgctttcctttttccttctgcctttcctctatttattttgcactccactcttttccgtaaaccttgcctatctattattggatttttgaaaactaaagtataa

SEQ ID NO: 81245 - DNA, 159 bp, Saccharomyces pastorianus
atgccacatttcaaaagagcagcagtatatgaagagcaaaaaagaactggtaaatggggtcaacttgttgaagaaaccaaagatagaatccccgaatattcgaacaaaactatagcaaagataagccacttggacaatggttgttgtggcctgagataa

SEQ ID NO: 81246 - DNA, 1635 bp, Saccharomyces pastorianus
atggtggctaaattaaaactaaaagatcccctgaagcacgttgcccaaataaagaagaagaggagcctaaatgaagctgccgacgaaggggttgatacggacacaggggaatttcaagataaatgggaagttcgagctttattaaacatacctgcaagcctgactaaatgctcccaagactgtcgcattttatctaatatcaaagtccgtcataagatcaagttcactataagtttactcaatccggacggtcatatttcagaattgcgtgcggcactgcctgtccaattattcatttcaccgtttgttccaatcaatgtaaagacctccgatgttattgaaagaacgctcaaaacgtttggaccctcatatcaagtaacaggtcagcacgataattcattcagcagcaaaaactttgtagacgatagtgaagaagatgtgatttttcaaagatctgcttctgcgttacaattgtcttcaatgccaaccatagtatctggctctactttaaatatcaatagtactgatgcagaggctaccgcagccgctgacacaactatggtaactagtttgatggtacctcccaactacggcaatcacgtttacgatcgagtgtatggcgaggtaactaatgaagacgaaacttcagcatcagcttcttcaagtgccatcgaatcacaggcaattcacaatattcaaaacctatatatatcggatagtaacaatagcaataatcctattttggcaccaaatcctcaaatcaagattgaagatgatagcctaaataattgtgactctcgaggggacagcgttaacaatagtaacctgaatctggttaatagtaatctaacaattagtgaaaattggaacaataactctccttctgcaaatagatataataacatcattaatgctggattgaatagtccttcactgacgccaagctttgcacatttatctaggcgtaactcatatagtcgccaaacatcttctacatcgctgaagaacgatttggaactgacagatttaagcagagttccctcgtatgataaagcaatgaaatctgatatgattggtgaggatcttccaccggcttatcccgaggaagaacttggagttcaagaaaataaaaaaattgaactagaaaggccacaaattcttcatcacaagtctacatcctctttgttgccacttccaggctcgagcaagagttccaataatctgaaaagatcgtctagtaggacacacttatcccactctccattaccaaggaataatagcggatcctcagtatcattgcagcagttggcgagaaacaacacagatagttcatttaatctaaatctctctttcacttcagcaaaaagcagtacaggaagcggacattttccgtttaatatgacaacatctttcactagtaattcaagttccaagaacaattcacattttgataaaactgattctacatctgacgctaataagccaagagaagaggaaaactatacgagcgcaacccacaatcgaaggtcacgttcatcgtcagttcggagcaacaatagcaactcaccattaagacaaggaacaggttcatttgctaatttaatggagatgttcacaaaacgggatcgctcatag

SEQ ID NO: 81247 - DNA, 741 bp, Saccharomyces pastorianus
  modified_base (720)..(720): a, c, g, t, unknown, or other
atgttttcatcatcatctcgaccttcaaaagagccattactatttgacatcagacttagaaatttggacaatgatgttttactgataaaaggcccccctgatgaggcatcttctgtcctactatctggaactatagtattatcaattactgagccaattcaaatcaagtctttggctttgagactttttggtaggttgagactaaatattccaacggatttacaaactgttcatgggccgcataagcgatactcaaagtttgagagaaacatatattctcatttttgggatgattttaatataaaaagttatttccaaaacttgtacgataatcataataatggtaaaataacaatttctagtaaatcctcaacaaatttagcagcattgccaaagagaaaaaaagccctttctactgcatcattgatatcaagtaatgggcagacaagcgcaagcaaaaactatcacaccttagtaaaaggtaattacgaattccctttcagcgcgattattcctgggtcattagtggaaagtgtagaaggcctaccaaatgctgccgtcacttatgctctggaagctactatcgagagacttaagcagcccgacttgatctgtaaaaaacatctaagagttattcgaacgttagctatagatgcagtcgagttatctgaaacagtatcagtggataactcatggcctgaaaaagtcgagtatacgatncctttagtgagggttaagtgc

SEQ ID NO: 81248 - DNA, 1011 bp, Saccharomyces pastorianus
atgaaaaaaatatacaataattctgagaaactacaatcattaaacacagcatctgattataaaagcaactgtaacgttcaagtgctacccatcacctggaggcactcaataagtttccaaaccgatgctaaggaggaaaatatagaaaatcctgacctaccgactttgtcacaagtcacagtaaatggagtgttacccttgaggaagctactggctgacggtctactagatattttgttatatgtcgaaccatactaccaagatatgattctacaacaggtaacctctcaattgaacaaaacatatcggatttttaaagaatttaatccagagtttgatgggaaagttcatttagtgggccattcgttgggtagtatgatattatttgatattctatccaaacaaaaaaaatatgaattagaatttcaagtagacaacctgttctttattggctcaccaattggattgttaaagttaattcaaagaacaaaaattggtgaccgtcccgaatttcccaatgacttggagagaaaattaaccgtacagagaccgcaatgtaaggacatttataatgtttaccacgtctgtgatcccatttcttataggatggaacctcttgttagtaaagaaatggctcattacgaacaaacttatttaccacattgtagtgaagcttatggactaacttctaaagttttggaatttggcgaaaacatatggaaagatttgccaggtactgatgaaaataatttgcagtccaaaaaaacttctccagaaaaaaaagaggtcaagttatcagaaaatcttacgagaatgcttacaggtttgaattacgccggacgtctagattatgctatgtctccaagtctgctagaagtggattttatatcagctataaaatcacatgtttcttatttcgaagaaccggatattgcagcgtttatcctaaaagaaattttaagtaaacatgaaaatgcatcagaaatatatgtaaaaagaaagactggttga

SEQ ID NO: 81249 - DNA, 1047 bp, Saccharomyces pastorianus
atgctacggtttactcatcgaggccttccctccagcactcgttttagaaacattttcgtaaggttaaatcacatttatgtaccatggttctatgccatagacgtacccaactccaaaccctatttacccacatatcaaactttacactcacccaaaaagtttaagccgttctccgttaatgattctaatcgtttggaaaaggccagtaaacgtcaagaacgcaggcctgttttagtcaacgaagattacctgtttaaagtcgacctctctcacatggaattgtcccctacctattgggaaggccctacttatcaagtacgaagaggtgtgtggttcgactcttcaaatcaacctttgtccagtgatcttacctccgaaattgaagggttgtataagcagctcaaattcgacgacagtaatgatgatccgaccacgacgcctcctgcagaatcgcaagatatatttaggctcaaaggtaaatacccagtcgataaagaaaacgaaggagagcaaaaaaatggatccagcaataaagatgagaatgaatctactttcaagtttattttgtttgccaataaacaaactacatttttactatcggatttagatggaggaaaactgcaattagcctatctaaggtctaatctggctcaatccttaccgattaatgctacaatgattacaagatcatacaaatatccatcctccgcaactactaaacagacatccacatcttttaaggcagcaaaaacgcctcaaacggaagtagcagatggtagtaacagttccaaatcgaggagcattgaaacaaagttagaaaagaaagtttcaaacctcttcaatttatcggactttttacagttgttcaatggtaatgctagtaaagatcaagatgatgcacagagcttggaaaagcaaatggaaacagactataacaatgcagataacagtcaaggcgctaatactagtagcaaattaaagatggcaaaaattcgggcgcaagcgatagacaaattagaagtaacagaagagatgtggataacttga

SEQ ID NO: 81250 - DNA, 1968 bp, Saccharomyces pastorianus
atgggaaaaccaactgataagtacctgcagtttttcataaaaagatttagtttattgaaaacctttaaagttgaaccgtatttggtcttcgatggtgatgccattccagttaaaaagtctactgaatctaaaagaagggataagagaaaagaaaacaaagccatagctgaaagactgtgggcctgtggcgaaaagaaaaatgctatggactattttcaaaaatgtgtcgacataacgcctgaaatggcaaaatgtatcatatgctactgtaagctaaacggtattcggtacatcgtggctccgtttgaggctgactctcaaatggtatatttagaacagaaaaacattgtgcaaggaataatatccgaagattctgaccttctcgtcttcggatgtcgacgtctcattacgaagctgaatgattatggagaatgtttagaaatatgtcgcgataattttattaaactgcctaaaaagtttccgttgggatccttaactaatgaagaaatcataacaatggtttgtttatccggttgtgactatacaaatggaattcccaaggttggcctgattaccgcaatgaaattagttagaagattcaatactattgaaaggataattctgagtatacagcgggagggaaaactgatgataccagacacatacattaatgaatatgaagctgcagttttagcatttcaattccaaagggtattttgccctattcggaagaaaatagtgagcttgaatgaaattccgctgtacttgaaagataccgaaagtaaaagaaaaagactctacgcgtgcattggttttgtcatacacagagaaactcagaaaaagcaaattgttcatttcgacgacgatatagatcaccatttgcatttaaaaattgctcaaggtgacttgaatccatatgattttcaccaacctctagccaacagagagcacaagttacagctggcatccaagtcaaatatagagttcgggaaaactaatagtactaattctgaagccaaagtcaaaccaatagaatcgttcttccaaaaaatgacaaaattggatcataacccgaaagttgcaaataacattcatagtctaagacaagcggaagacaaactgacaatggcaattaagcgtaggaaattaagtaatgccaatgtagttcaagaaacgttgaaggatacaagaagcaagttttttaataaaccctccatgactattgtggaaaacttcaaagaaaaaggcgacagcacacaggattttaaagaggacacaaactcacaatctttggaagagcctgtttcagagtctcaactatctacacaaatacctagttcttttattacaaccaatttagaggatgacgacaacctgagtgaagaggtttctgaagttgtcagtgacattgaagaggaccaaaagaattctgaaggaaagactatcggtaacgaaatctataatacagatgatgacggtgatggcgatactagcgaggattatagcgaaactacggaatcaagagttcccacgagcagcaccacctcatttcccgggtcatcccagaggagtatatcggggtgcacaaaagttttacaaaagtttagatattcatcatcattcagcggagttaatgcaaatagacaaccactatttcctcggcacgttaatcaaaaaagtagaggaatggtatacgttaatcaaaatagagatgatgattgcgacgataacgatggtaagaatcaaatcacgcaaaggccatcactgcgaaaaagccttattggtgccaggtcacagagaattgtgattgacatgaaaagcgtagatgaacgaaaatcattcaattcatcaccaattttgcatgaggaaagtaagaaaagggacatcgaaactactaagtcaagccaagctcggccggcagtcagatctatctccttgctttcccaatttgtttataaaggtaaataa

SEQ ID NO: 81251 - DNA, 1323 bp, Saccharomyces pastorianus
atggtttacatatacttaatttctctcgttctttctccagtgctagccattatgctttccctactggtcactgttgtcatggtcaacacgttaaagaagtttgtattaccatgccttcccagaaaaaacacttacaaagtttctttgactagaactccctttttcagtggcctctttctgtccactttctgttttttaatatatatatggacgaagaaactctatccatatagtgtatctgactataccatgaaaaacgtccagtttttggttacttcctttctcacagttgtactatttctgagattagtacggtcagatcctggttgtctgaaaacggatgatagtttgacttcgatacaagaaacaataaaacaactgattgacttagggaagtttgatagggaaaacttttgtgttgagaccttagaaaggaagcctttgaggagtaaatattctttctttagcggcgccctggtggccagatatgaccattattgtccatggatttataatgatgttggcttaaaaaatcacaaactttttgtcttctttgctgtgacggtccaatatcacatgtttttgttcatgtggttatgtctggcatattttaagaaaacgaactatatttacgaacaagttgaagaatatgcaaaatgtgccctgctcaagaatgagactttgtgtaagggttctaattacgatccctctaccttttttttattcatttggattagcgtaaacttcatctggctgggggctatgttgattgtccagttcttccagatattaaaaggaatcacgactcctgaattgttcatcttaatcaaggaggagcgcaaggcaaaatttatcaatctgatacccttcgaaaactctacatataccagtaaaagtaaaggtgttgaagatagtgatatgattcctgaaggtccaagtgcgaccaccattactcacacaatttctattgatggtttggaaccaagaaataggcgccgcgccattcttagcgcttgcttttcaatgatgggtattaatcaatggctcgttactattaaggaaatagtaggtataacccacattttgcatggacaggttccacaacaacatcacagttcattgcttcgaagtttcttagtgacaaatcactggaagacgaatttgacggatttttggcttaatagtgatgtaacagcgcccttgtggcaacgatttttctattcttcggatacttcaaaagctatgttgggtggaactgaggttgactactacgagctatacgaatatccggcccgagaaggagaagtattacgtccaaactaa

SEQ ID NO: 81252 - DNA, 936 bp, Saccharomyces pastorianus
atgtcaattattgatgatgagaacgtgaaaaaaacttctaatggggcagctgttgtcactgatgcggctcaacacgctgtaagtgattcggacaataacaaagcgcaacttctaggcgatggatccaacactgaatatgtggttgatattttcattgaagccgctaaggatggggatttaaaagtggtgaaggacgtggtcgaaagtggagcagtggatattaataacgaccgcattggtgaattatccggcttacactgggcctgtataaataataggttttccgtagcaaagttcctattacttaggggagcaaatcctaaccaggcggcaggccccggaggggctactgctttgcactgggccgcaaggtacggtaatatctacattgttgacctgcttctcaaacatggcgctgatccgacgctcaaagatgagcagggtcttaacatcatgcattttagcgtttacagttctaacattttacttgttgtttatgttctttattttgtcgtaaacaacaatgacaacgtcgatatcgattcaaaagataacaataacagaacacccctactttgggctgcttatcaaggagattttctcactgtagaacttttattgaaatttggcgccacagttacatggacggacaacagagggttcaatgctctccattgtgctctagttggaggtgatcaaagggtcatatgtgacttaatacttagcggtgcaaatttctacgaaaggaataaccagaagcaagactgttttgatctagccgaaggaatgggaaccaaatcactttttgaacaagcgttgcaacatcatggatatgacaggcttggaaatcagaaagacaaactgttcaagaaaagctcgcatgcacaattcacaatttttttgtcaccattttactcatggtttacatatacttaa

SEQ ID NO: 81253 - DNA, 672 bp, Saccharomyces pastorianus
atgctattgtcaatacacatcaccattatgaccattcggggggggaacctagcgctttatagtatcttgtgccaagaaaactcaggtcacgatattaaaataattggtggatcgaagtcctccccgggtgtcactgaagtacccgataatttgcagcagtatcacttgggtaacttaagagtaacatgtattaggactccatgccatacaaaagattccatatgctattatatcaaagatttagaaacaggtgagcagtgcatcttcacaggcgacactttattcattgccggttgtgggaggtttttcgagggcacaggaagagatatggacatggccttaaaccagataatgttaagggctgttggtgagacaaactggaataaggttaaaatataccctggtcatgagtacaccaaaggcaatgttagctttattagagcaaaaatctattccgatatagggcagaacaaggagtttgatgcgttggaacagtattgcaaatctaacgagtgcaccactggtcacttcaccctgagagatgaactaggttataacccattcatgagattggatgatcgtgccgttagactagcagtcggcgatactgctgggacttatcccagatccgtagtgatgcaagagttaagaaagcttaaaaacgctatgtaa

SEQ ID NO: 81254 - DNA, 249 bp, Saccharomyces pastorianus
atgaagtttttactgcagcaaataagaaatatgcatgttaagcctataaaaatgcgatggttgacaggtggtgtcaattatagttatttactaagcactgaagacaggagaaactcatggctgattgaccctgcagaaccacttgaggtgtcgccaaaattaagcgccgaagagaaaaaaagtattgatgctattgtcaatacacatcaccattatgaccattcggggggggaacctagcgctttatag

SEQ ID NO: 81255 - DNA, 1671 bp, Saccharomyces pastorianus
atggtaaggttgaaaaaggaactgatgcttgcgaacgaggggaacgaagaagcaatcgccaaagttaagcaacagagtgataagaacaatgaactgatgaaagatatcagcaaggaagaaattgatgatgctgttagtaaggctaacaaaactaattttaaccttgcagaagttatgaaacagaaactaataaataagaaacaccgtcttgaaaaggataatgaagaggaagaaattgctaaggatagcaaaaaagttaagacagagaaagcggaatcagagtgcgatctcgatgcagagatcaaagatgagattgtggctgacgtaaacgacagggaaaactctgaaactacagaagtatcaagagattcatcagtccacagcacagtgaatgtcagcgaaggtcccaaaaatggggtctttgatacagatgaatttgtcaaactattcgaacctggttaccacgaaagatattacacagctaaatttcacgttactcctcaagatattgaacagttaagaaaagatatggtaaaatgctatatcgaaggggtcgcctgggtactaatgtattactatcaaggttgtgcctcttggaattggttctatccgtaccattatgctcctctggcaacagatttccatgggttttctcacttggagataaagttcgaagaaggtactccatttttaccttacgaacaattgatgagtgttttaccagctgcatctggccatgctttgccaaaaattttccggtctttgatgtctgaacctgactctgaaatcattgatttttatcctgaagaatttcccatagatatgaatggtaagaagatgtcctggcaaggcatagcgttgctaccattcatcgatcaggatagactgttaacagctgttcgtgcacaatatcctttactttctgatgctgagagggcaagaaatattcgcggagaacctgttttattaataagtaacaagaatgctaattatgagaggttttcgaagaaattatactcaaaggaaaacaacaacaacaatgttgttgtgaagtttcaacacttcaagagtggtttaagtggtattgtatcaaaggacgttgaaggtttcgaattaaatgggaaaattgtatgtccgattcaaggtgggtcactgccaaatttatctaccaccttgattttaaagatgtcctatagattaattccgttgccatcgagaaataagtctattatactgaacgggttcattccgtcagaaccggtactaacagcatatgaccttgattccataatgtacaagtataataaccaaaattactcccgtcgctggaactttggtaatgatttgaagcaaaatattgttccagtaggaccaaagggtattactcagtacaaaccaagaactggtggctatcgagcattcttttattttgctgagctcagtagaaataatgtccaacccgcccacaactatggtaggaatagctacaacagtcaacccggcttcaacaatagcaggtatgatggtggaaacaataattacagacaaaattcaaattacaggaacaataactattccggaaatagaaatagtggacagtacagcggcaacagctactctcggaataacaagcaaagtcggtatgacaattcaagagcaaataggcgttag

SEQ ID NO: 81256 - DNA, 1212 bp, Saccharomyces pastorianus
  modified_base (1176)..(1176): a, c, g, t, unknown, or other
atgggtgttccgtcatttttcagatggctatctcgaaaatatccaaagatcatatccccagtattggaagagcaacctcagatagtcgacggtgtcatattgccgttggattattccgccccaaatccaaacggtgagttagacaacttgtatttggatatgaatggtattgttcatccatgttcgcacccagaaaacaaaccgcctccagagactgaagatgaaatgcttttggcagtttttgaatataccaatcgtgtgttaaatatggctagaccacgcaaggtacttgttatggctgttgatggtgttgctcctcgtgccaaaatgaaccagcagagagcgcgtagatttaggagtgctagggatgctcagattgaaaacgaagccagggaagaaattatgagacagcgagaagaagttggtgagataatcgatgatgccgtcaggaacaagaaaacttgggattcaaatgcgatcactccaggcaccccatttatggataagcttgccgcggccctccgttattggacagcatttaaactggccactgaccctggttggaaaaacctgcaggtgattatcagtgacgccaccgtcccaggtgaaggtgagcacaaaataatgaatttcattaggtctcaaagagctgatcctgaatataatcccaacacaacgcactgtatatacggtttggatgctgatttaatttttttgggccttgccactcatgaaccacattttaaaattctaagagaagatgtttttgctcaagacaatcggaaaagaaataacttaaaagatactataaatatgactgaagaagaaaaacaatttctccaaaaacaaaattccgaacaacctttcttgtggctgcacataaatgttttgagggaatacttgtccgctgagttatgggttccgggtcttccatttacatttgatttagaaagggctatcgacgattgggttttcatgtgctttttctgtggtaatgactttttaccacatttaccatgcttagatgtcagagaaaatagtattgatattctcttggatatttggaaggtagtactaccgaaattgaaaacgtacatgacctgcgacggtgtcttgaacctcccttctgttgaaacgctattgcaacaccttggctcccgtgagggggatatcttncaaactagacatattcaagaagccagaaagaaagag

SEQ ID NO: 81257 - DNA, 1149 bp, Saccharomyces pastorianus
atgtccaacgcgacaaataatacgttaggcagtcttttgccacagttagaagcagcagctaacagtaattccctttatggtggtatggtaccgaaccttcgttttaatatcacgatgattgtcatttggggtatactactgacaatacatgtcgtacagttactgatgcgccaatactggttttcaatcgcttttatatgcacaggtattttggaagtgcttggattcatagggaggacgtggtcgcattctaatgtcgccgatatggacgcttttcttttgaacatgatttgtttgactattgcaccagttttcacaatgggtggtatttattatcaacttgcaaagcttatagaagtatacggccacaggttctctttattgccctctccaatggcgtattcttttattttcatatgttccgatatcgtatcgcttgtggtgcaggctgtaggtggtggcctgtgtggtgtggcggtcacagatggaacgtccacaacaaccggcaatcatgttttcattgctggtttggccattcaagttgcatcgatggccatctttcttatgttatggtttcacttccttttccgtatatatatatcggtaagatgggaacacataaattctagacctatctcattgagcctcttaaagatatcgcaaacagaagttgattatttatacagggaaaagttccattttttgagactcgaacctaaacgttgggtttttcattattttaatctggcaataaccgttgcggtactaaccatttttacccgttgttgttaccgtttggctgaattagttgtcggttgggatggctatctgatcacacacgagtggtattttattatcttagatgcattaatgatggccatcgctacggtcactttgaccatcttccaccctggatttgcgtttaaaggtagaagcacctcgattccaatcacaccgggccatgttgatcctgaaactttaccacatactgacgatgttgaagatatcttagatacttcggattcaaaacaatttgatattgaaaaggaggaattccaagcaagcatgaaatacccgattagcaccttcaaacaattcatgtccaaaatagctaacttgttttcctctaaaaagaaggctaaactttag

SEQ ID NO: 81258 - DNA, 432 bp, Saccharomyces pastorianus
atgggtagcggtacgttcaattccataatgactaaaaaacattttcgaattattcaagaagagatgccttgggtaactgtatttaaaccgtcagaaaaagtcatgggcataaacggtgacatcgggttaagtgggatgatggatgcaaatgagattgttggcaagatagtcgtcaaactaggtggttatcccgatgtttctgcgggaaaggaagaagaagaggatgaagataacgatgaggaggatgataataagaagaacgatactggtggtaaagatgaagataatgacgacgacgacgacgacgacgacgacgatgatgatgatgacgacgacgacgacgacgatgatgatgatgatgacgacgacgacgacgacgacgacgatgaaggaaaaaagaaagaagataaaggagggctacagcgatcttaa

SEQ ID NO: 81259 - DNA, 1506 bp, Saccharomyces pastorianus
atgacaaacaaatctagcctgaaaaacaataggaaaggggttgcttcgaatactctctctggagctgagcaggccaatataggttcatcggcaatgcctgacacaaattctacgggaccattttcttccgtttctagtctggacactcctgtagtaaggaaatcaactagtcccactggttcacaaactaagtcaatcatgaatgctagcggaacttctggggcagttgtaagtaatacaccagagccagggttaaaaaggataccaactgttacattcagcgatccaaagttgggtagtctcagatcagatgtggagcaaactccacctaaccaggtggccagacagtccagcgaaaagaaagcaacgtctgtacacatcgcagcggagggtgcaaatcaaggaagaaacttgaaagacataaatacaaaagtaccaaaagatggcgaggcttctgcttcttctttttcgactccaacctctattctctccaatgctgatatggggaataacatatccagcctgctggctaaaaagctaagtttcaccggtggaacagattctattttaaactctgacaatagttccgatagccccagaaaggagcacccacatttctacgtggaagatcctttgcataccccatcggttagatcaaggtctaacagtactagtcctcgcccctctgtggtagtgaatacgtttaaccccatcaacattgaacgagagggctccatatcaaagactggagagcccacattgttggagtctgtcttggaagaagcaatgtctcccaatgcagtctcaaatcccttgaagagagaaaatattatgaccaatatggatccaaggcttccccaagatgacggcaagctacacgttctttttggggcaacaggttctttgtctgttttcaaactcaagcacatgatcagaaaattagaagaaatttacggaagggacaaaatatgcatacaagttatactaactaactcagcaaccaaattttttgcaatgaagtatatgaggaaaaataagaaacaacacaatagtatcgatacttctttcaacagcaccaattctaatgctggcaatataactggtaacaagaaaaaagtagcctctcttgaaaaatttagcattcagaagacgtcttcaaactcagcggcttctcagacaaataataaacaggaggaagaaaaacaaatggcctctactactggatttccttcgacacttggtggtagtcgtacgtacagcaactcttcaaacgttgtatcgcaacatcctcaaattgaactgccagcacatatacaattttggacagaccaagacgagtgggatgtatggcgacaacgaactgatcctgtattacacatagaactacatcgttgggcagatatattagttgtcgcaccattaaccgcaaacacgttggccaagattgcccttggtttatgtgacaaccttttgacagtgtataaggctggatccgggatcctctag

SEQ ID NO: 81260 - DNA, 756 bp, Saccharomyces pastorianus
atgttgaaattaccgtacgtccacacttttgctacaaagtttattaaacctcctctgatccctcagaatatcaaggaaattaatgaaaggctcgcggcaaacaacaatggaagtaaaggtctagttcaagacgtattttttgttattctccctcaaattcctccaaaattaacgtttattttgacgatattttatcaggtcttagcagtacttccacttttgtttgatccatcgttcaaaagatttgttggctcgttgactctctgtgggttggcatcgtttttgttcgggtggcatgtgcatgagaaagctataatgctagtcatcattccgttcacatttcttgttggatttgatcgtcgtcttttggtaccgtttatgttagttgcctcagctggttatgtttccttgtatcctcttctgtacaaaggccaagattttttcattaaaacattatacacttatgtttggtgtataatttattttgccgcttttagaaaaactacgaagatttcttcaagtgtagaaagaagaatctttttcttggataggttggcattaacgtacatcttttcattgttaccaatcgtcaccgtattacaaatattggatgaagtcaagtggagatattcatttttgcaaaaatttgaattcttaggattaatgatatatagtgtctattgttcattaggtataatcagctcgtggtttgccttatcgtggttatataattttgacgaattactatggcagtga

SEQ ID NO: 81261 - DNA, 159 bp, Saccharomyces pastorianus
atgccgcaagtgttgagcaggttattcccattctcaagaggactgacgcatgcatattgggcaccaatttctgggcgttgtattcttttatggataaatactcactacggtaatgttgaaattaccgtacgtccacacttttgctacaaagtttattaa

SEQ ID NO: 81262 - DNA, 147 bp, Saccharomyces pastorianus
atgaaaggtgatcgttcgaggcaaaatatggctgtgacaaagaagccaaagttaaaaaaaaatgacgagccaaaaaaggttttgaagactgccgcgaccgaaaaaggtgagggatccaagcgctactccttatggaattctggataa

SEQ ID NO: 81263 - DNA, 2028 bp, Saccharomyces pastorianus
atggactacgaggataatctagaagcacctgtttgggacgaactaaatcatgagggagataaaactcagagcctcgtttcaaattcaattgaatcaattggtcaaatatctacaaatgaagaaagaaaagacaatgagcttttagagaccacagcttcatttgcggacaagatagacttggatagtgcgccagaatggaaagaccctggtttgtcggtggctggtaatccgcaactagaggagcatgacaattccaaagctgacgatcttattaattctttagcccctgaacaggatccgattgctgatctcaagaatagcactacacaatttattgcaacaagagaatccggtggcgcattgttcactggaaacgccaactctcccttagtttttgacgatacgatatacgatgctaacacttcaccaaatacttcaaaaagcatctctggaagaagatccggcaaaccacgaattctgtttgattccgccagagctcaaagaaactccaaacgcaaccattctctgaaagcgaagagaacaactgcttccgatgataccatcaaaacaccctttactgatcccttaaagaaagctgaaaaagagaatgaatttgttgaagagccattggacgataggaatgaaaggagagaaaacaatgagggcaagttcacagcttctgttgaaaaaaatatccttgagcaagtggacaggcctttatacaatcttcctcagacaggtgctaatatttcaagtcctgctgaggtcgaggaaaactcagaaaagtttgggaaaaccaagattggctcaaaggtgccaccaaccgaaaaggctgtggcttttaaagttgaagttaaagacccggtcaaagtaggagagctaacatccattcatgtggagtatactgtaatcagtgaatcatcattacttgagctaaaatatgcacaggtaagcaggcgttacagagatttcaggtggctatatcgtcaattgcagaacaaccattggggtaaagtaataccaccaccaccagagaagcaatcagtgggcagttttaaggaaaatttcattgaaaatagaagatttcaaatggaaagcatgttaaaaaaaatatgtcaagatccggttctacaaaaggacaaagattttctactctttttgacaagtgatgactttggttcagagtctaaaaaaagggcatttttgactggatctggcgctattaatgatagcaacgatctgtcagaagtccggataagtgagatacaactactaggtgcagaggatgctgccgaggtcttaaaaaatgggggtatcgacgcggaatcgcacaagggattcatgagtatatcgttttcatcactgcccaagtacaacgaggcagatgaattctttatcgaaaagaaacaaaagatcgatggactggaagataatttaaaaaaattgagcaaatctttggaaatggtcgacacctcaagaaacaccctggctgcatcaacagaagaattctctagtatgatagaaaccctagcgtctttgaacgtgagtgaacctaattcggaactgctgaataactttgctgatgttcataaaagcataaaaagctctcttgagagaagctctttgcaagagactttgacgatgggtgtgatgctggacgactatattaggtcattggcaagcgtaaaagcaattttcaatcagagatccaaattggggtatttcttggtagtaatagaaaatgacatgaataagaaacactcacaattgggcaaattgggtcaaaatattcattcagaaaaattcagagaaatgagaaaggaatttcaaacattggagagaaggtatgaccttacaaaaaaacaatggcaagcggtaggagataaaataaaagatgaattccaaggtttctctactgataaaattcgggaattccgaaacggcatggaaatatcactagaagcggccattgaatctcaaaaagaatgcatcgagctttgggagacattctaccaaaccaatctttag

SEQ ID NO: 81264 - DNA, 138 bp, Saccharomyces pastorianus
atgagtagaagatacagagatgacttgacagtaacagtggcgttctttggtgattccggaacaccctcaaccgtctccaatgctacttcaatagttatgaacccggaggcaacaacaaagccaaaacctagattatga

SEQ ID NO: 81265 - DNA, 252 bp, Saccharomyces pastorianus
atggcttccgatggtttattcgaactactaactaatgaagaaattgcttccttggttatcaggtggatggatacaaatatgcatctggcacctgtgaaagcagaaccggggaattaccaaaagttatcgatgtatctgaagacaaggaagcgcaaagaccggcattcaggtacaaggataataattcgagctcaccatcaggatcaaacccagagtatcttattgaagacaaaaacgtcgccactcatttaa

SEQ ID NO: 81266 - DNA, 1134 bp, Saccharomyces pastorianus
atgtctcccttaactagaaccgtagctataaagaaaacggttaaggttctatctaaatgtcaatctggtagagaatacacacagaagtttctacaacgtgcatattcaacatcacatgccaatagcacatactattcaaggacaaagctattcatatcatcacattctaaagctctaaacattgctctactaagcgggtccctactgttgacctactcctactattcccctaaaaagatcctctcccttgatacaattaacggaataaaagattattctacaaatactagtggtaatattaacatgccgtcacctaatccaaaaggaacagagacacaaaagagtcaacggtctcagaatgaccaatctgttcttatcttgaacgattctaaaatagaggctaaactacatgatagagaggaaagccattttgttaaccgtggcactggtatattcaggtatgatgtggcacagttgccctctaaccatccaatagaagacgatcacgtagaacaaatcattaccattccgatagaaagtgaggatggcaagtccatagagaaggatttgtatttttttggaatttttgatggacatggtggtcctttcacttcggaaaaattatctaaagatctagtccgttatgtagcctatcaattaggtcaggtatatgaccagaacaaaacggttttccattccgaccccaaccaattaatcgattctgcaatttcgaaaggttttttgaaactagataatgatcttgtaatcgaatcgttcaggaagctgtttcaagatccaaacaacacaaatattgcaaacactttaccagcgatttctggttcttgtgcactattaagtttatacaactccactaactcaattttgaaagtggctgtcactggagactcaagggctttaatttgtggtttggacaacgagggcaattggacggtaaagtcgctatccaccgaccagaccggtgataatttggatgaagtacggagaattaggaaagaacatccaggagaaccgaacgttataagaaacggaagagtattgggttcattacaaccatccagggcatttggagactatcgctacaagatcaaagaagtcgatggaaaaccattatcg

SEQ ID NO: 81267 - DNA, 1506 bp, Saccharomyces pastorianus
atgtttcccaatatcagcgatctacccatcgcctatttgcaatccatggaccaagggtttatctttacagaagcagaaggtgagaaaggtgttgccaacgttatcatctttctggccatgtttttgatatgtgttttcaatttaggtggtttcagactaattgaaaacgatttccattacaaaggtgatgacgatgaagaaaatacgttgaccaatgatgattctgcccaacagccaacgcaaccaattgaaggcaattcttcttcttcatccaaccaagatatcctgaaagagcccaacgagtctaccgttcctaacagttcacaagcaagctacatttctgagaaaaataaaaaagaaaaaactgaactctctgtccccaagcctacacatactgctcctccagcaatagatgacaggagctcgaactcatccgcggtggtctctatcgatagcattacacactcactacgcacaaaccatgtggatgcccaatctgtaagcgagcttaacgatcctacttacagaactagaagtcaaccaatagcatacactaccgagtcaagaacatcacatgttcataataaccgcaggaattccatcactggctccttacgttccatcgatatgcgtgaactacccgcggaaggcatgtcggatttaattcgtgaatactccaatgttgatcaatacagtagaagaaggaaaagttctatcagctcccaaggagcaccctctgttttgcaggcagacggtactatttctccaaatttgactagaacctccactttacaaagagtcaaaacttccaacctaacaagaataatcacctcagatgccactgttagtaagaaagatattgagacttccggttcctctttaccaaaatggctacagaaatttcccttaacaaaatttttcgtcttttttttaaaaaattgtctaaggccttgttccatggctgttatcctggctttgattatcgcttttattccctgggtaaaagcccttttcgttacaaccagtaatacaccaaaaatcaaacaagccccagataatgcacctgctctaactttcattatggattttacatcttatgttggagccgcttcagttcccttcggtttgattcttttaggcgctactcttggtagattgaaaattggaaaattataccctggtttctggaaatccgcagtggtattagtctttctcagacaatgtatcatgccaatctttggtgtcttgtggtgtgaccgtctagtgaaggcaggatggctaaattgggaaaacgacaagatgttattgtttgttaccgctattacttggaacttaccaacaatgaccaccttaatctacttcactgcaagttatacccctgaggacgaaactgaacccgttcaaatggaatgtacctctttctttttgatgcttcaatatcctttgatggtcgttagtttaccatttttggtgtcttatttcatcaaagttcaaatgaaattataa

SEQ ID NO: 81268 - DNA, 102 bp, Saccharomyces pastorianus
atggaatgtacctctttctttttgatgcttcaatatcctttgatggtcgttagtttaccatttttggtgtcttatttcatcaaagttcaaatgaaattataa

SEQ ID NO: 81269 - DNA, 2430 bp, Saccharomyces pastorianus
atgaatgatttaactgaccaaattttcagaattctttggatttttcataaaatccaaccaatgtgcattttagttgtgccgagagatactttacctaggagatattgttctctggaattggccaatagcacggtagagaagaagtttttaaacaatgatctcagtgcacagtttgtaaagtttcaattcgataatgtcatattggattttttgccccattcagcgtactataatgagagtatattatccgagcatttatcaaaattgagaaagatggctttacaagaaaaatacgctatgatcgaaccagcatatcgtaatggcggtcccgttaaaccaaaacttgccctacaatgcagtggtgttgattacagagaggagtctgttgacactcgaagccatacaaaactcacagacttcaaatcgattttagagattctggaatggagaatttctaattatgggaacgaaacggcgttcagtgatggtacaaacacaaatctagtcaactcttcagctagtaacgataataacgttcacaaaaaggtatcatgggcaagttttggtaaaattgtcgcaggctttttgaaaaaaatcgtaggttctaaaatcccattgaagcatggtgaccctattattattatgtgtgaaaattcggttgaatacgtagcgatgatcatggcctgtctgtactgtaacttattggtaattcccctaccaagcgttaaggagtctgtcatagaagaggacctaaaaggcttggttaatattattcaaagttacaaagtgaaaagattatttgttgatgctaaattgcactcattgttgaatgataataatttcgtaaacaaatgttttaagaaatacaaaagtttaatacctaagattacagttttctcaaaagtcaagacaaagaatgcgttaacagtatctatgtttaaaaatgtgttaaagcagaaatttggggccaaaccaggtactaggattggtatgacaccgtgtgttgtatgggtaaatacagagtatgatgtgacatctaatattcacgtaacaatgacacattcgtctttacttaatgcaagcaaaatagtcaaagaaactttgcagttaagaaataatagtccacttttctctatatgttctcatacgtctggattgggctttatgttcagctgtttgttaggaatttatacgggtgcttcaacttgcttattcagccttactgatgttcttactgaccctaaggagtttttaattggccttcaaaatttaaacgtaaaagatttatatttgaagcttgaaacgttatatgctttactggatagagcctctagtttgattgagggattcaaaaataagaaggagaatataaactctaccaaaaacaatacatctggctcgcttagagaagatgttttcaagggtgttcgaaatatcatgataccttttcctagtaggccaaggatttatacaattgaaaatattttaaaacggtactcaaccatatccctatcatgtacacaaataagttatgtctatcaacatcacttcaatccgcttatatcattaaggtcgtatctggatattcctccggttgacctatatttagacccattttcactgagggaaggtataattaaagaagtcaaccccaatgatgtaagtgctggaaactatatcaagattcaagattctggtgttgttcctgtatgtactgacgtttcagtagttaacccagagacactcctaccatgtgttgatggagaattcggtgagatttggtgctgttcggaagctaatgcattcgactactttgtgtgtaacagttcaaaaaacaagttgtacaaagatccctttatcacagaacaattcaaaagtaagatgaagagcgaagtgaataacactttaagctatttgagaactggtgacctgggctttatcaaaaacgtaagttgcacgaattcacagggagaggtcgtcaatttgaacttgttgtttgttttgggaagtattcatgaatccattgaaattttaggattgacacattttgttagtgatttggagagaaccgttaaagatgttcacagtgacattggtagttgtttgattgccaaagcaggtggattattagtgtgcttaattaggtgtaaggaacgacataatcccatcttgggtaacctaacgactttaattgtttcagagttgttaaataagcatggtgtcattttagatttatgcacatttgtgagaactaaaggtataagcccaaaaaattctagtatgataatggaagtttgggcgaaaaatagagcatcgataatgcaagcctggtttgatcagaaaattcaaatagaagcacaatttggcataaactatggtgaaaatatttccatttatttattatcagattatgaaaaggacaatatttaa

SEQ ID NO: 81270 - DNA, 1029 bp, Saccharomyces pastorianus
atgaagtcgacagcaagtacagcggcagcaaatacggagaagctatcgaatggcttttcctttacaaagttcaatcacaataaagaaaagtcaaactctccaacttctttcttcgatggttctgcttcctcaacgccgattcctgtcttgggtaagccaacagacgctactggtaatacaacatctaaatctgcattttcattcggtactgctaacaccaatggtaccaatgcctcagcaaactccacatcattctcgtttaacgcccctgctacaggtaacggcacaactactacttccaatacctcaggaaccaatatagcgggtacatttaacgtaggaaaaccggatcaaagtatcgctagtggcaatacgaatggagcgggctcggcatttggcttttcgagctcaggaacagcggcaactggtgcagcttctaatcaatcttcatttaattttggaaacaatggtgcagggggtctcaatccttttacatcagcaacttcgtcaactaatgctaatgctggtttattcaataaacctccttccacgaatgcacaaaatatcaatgtgccctctgcttttaattttacgggaaataattcaacgcctggtggcggctctgtatttaatatgaacggcaacactaatgctaatacggtgtttgccggctctaataaccaaccacatcaatcgcaaaccccatctttcaatacaaacagctcattcacgccatcaacagttcctaatattaattttagcggattgaatggcggaattactaataccgcgaccaatacattaaggccaagtgatatatttggtgcgaatgctgcctctggttctaattcaaacgtaacaaatccatcatccatttttgggggggcaggtggtgtgccgacaacttcttttgggcagccgcagtcagcccctaatcagatggggatgggaacaaataatggcatgagcatgggcggtggtgttatggcgaacagaaagattgcaagaatgaggcactctaaaaggtaa

SEQ ID NO: 81271 - DNA, 1932 bp, Saccharomyces pastorianus
atgtcttcaaacacttcttctgtgatgtcttctccacgtgtcgaaaagagatcgttttcttccactttaaaatcattcttcacaaaccccaataaaaaacggccatcgagcaagaaagttttcagttcaaacctctcatacgcgaatcatttggaggaatcagatgttgaagacacactgcatgttaataagagaaagagggtgtccggtacatcacagcatagcgacagcttaactcagaacaacaataatgcgccaattataatatatggaaccgaaaacactgagagaccgccgcttttgccaattttgcccattcaaagactgaggttattaagggagaagcagagggtgagaaatatgcgtgagcttggattaattcaatcaactgaatttccatctattacatcgtcggttatattgggctctcaaagtaaaagcgatgagggaggatcgtacctatgcacatcatctactccttctcctattaaaaatggttcttgcactaggcagttggccggaaaaagcggtgaagacaccaatgttggactacccattctcaaatcattgaaaaatagatccaatagaaaaaagtttcatagtcagtcaaaggggaccgtgtggtcagcaaattttgaatatgatttgtcagaatatgacgctatacaaaaaaaggataacaaggataaggaaggtaacgctggcggtgatcagaagacaagcgagaatagaaataatattaagagtagtatttcaaatggcaatctggctacaggccctaacctgacaagcgaaattgaagacctacgtgcagacatcaactctaataggttatcgaatcctcaaaaaaatctacttttaaaaggaccagcttccacaattgcaaaaactgcccctattcaggagagctttgttcccaattcagagcgctctcgtacgcctacgttaaagaaaaatattgagcccaaaaaggacaaagaaagtattgttttgcccaccgtaggttttgactttatcaaggacaatgagactccatctaagaaaacttctcctaaggcagcttcttctgcaggtgcagtctttaaatcgagtgtagaaatgggaaaaaccgataagtcaacgaaaactgccgaggcgcctaccttatcattcaattttagccaaaaggctaataaaactaaggctgtcgacaatactgtcccttccacagctttattcaattttggtggtaaatcagataccgttacttctgccagtcaaccttttaaatttggaaagacatccgaaaaaagtgaaaatcatacagaatcagacgcgcctccaaaatcaactgctccaatattttcttttggtaaacaagaagagaatggtgataagggtgatgatgaaaatgagcccaaaagaaaaaggcgtttacctgttagcgaggatacaaacaccaagcctttattcgatttcggcaagaccggtgatcaaaaggagaccaaaaagggagagtcagaaaaggacgcatcagggaaaccaagctttgtctttggtgcaagtgataagcaagctggaggtacaccattatttacattcggaaaaaaagctgatgtaacaagcaatattgactcctctgcacaatttacctttggtaaagccgccaccgcgaaagaaacacacaccaaaccatctgagacacctgccacaatagtcaagaagcctactttacttttgggcagtcaacaagtgaaaataagatctctgagggaagtgcgaaacctacattctctttctctaagtcagaggaggaacgtaagagtagtccaatttcaaacgaagcagctaaaccctcgttttcgtttccgggcaagcctgttgatgttcaagcaccgacggatgataagactctcaagccaactttttcttttactgaacctgctcaaatag

SEQ ID NO: 81272 - DNA, 711 bp, Saccharomyces pastorianus
atgggtgagaagagaatcatctacggtgattctatctcttacagacacatgtgtcgttttgaatcaggcttcttttacagacatcctttgatggatgactacgattggtattggcgtgtggaacctgatatcaagttgcactgtgatatcgactacgatgtcttcaaattcatgaaagacaataagaaaaagtatgcctttgccatttccattaaggagtatgaagctactatccccactttatgggagactactcgtaaattcatggaatcccatcctgagcttatccatgaaaataatatgttagactttgttagcgacgatcagggactttcatacaatttgtgccatttttggtctaattttgaaattgctgctttggatttgtggagatctccagcatactccgcatattttgattatttagatcatgaaggtggattcttttatgaaagatggggtgatgctccagttcattctattggtgctgcgctgtttttggaccgctctgaaatccatcactttggtgatattggttattaccatgttccatttcactcctgtccaatagacacaagtatcagactggctaacaaatgtgactgtgatccaagcaaagatttcacatggcacagttattcatgtactactaaattctacaatataaacaagttgccaaagcctgctggttggcaaaaccatatcggttga

SEQ ID NO: 81273 - DNA, 1572 bp, Saccharomyces pastorianus
atgcctgcaggtcaattccacaagttgatcaacatcggtttcaaagaaatcgaagtgtctttcccctctgcatctcaaacagatttcgacttcaccaggtatgctgtagaaaacgctccagatgatgttggtattcaatgtcttgtccaatctagagaacacttgattaacagaaccgtggaagcattgactggtgctaaaagggctaccatacatacttacttggccacaagtgatatgttccgagaaattgtctttaatatgtctagagaggaagctatttctaaagctgtagaagccaccaaactggttaggaaactaaccaaggatgacccttcccagcaagctactcgttggtcctatgagttttctcccgaatgtttcagtgatacgccaggtgaatttgctgtagaaatttgtgaagctgttaaaaaggcttgggaacctaccgaggaaaatccgatcattttcaacttaccagctactgtagaagttgcctctccaaatgtttacgctgatcaaattgagtacttctctacccacattactgagcgtgagaaggtctgtatttctacgcattgtcacaatgaccgtggttgcggtgtcgccgccacagaattaggtatgcttgcaggtgctgatcgtgtagaaggttgtctatttggtaatggtgaacgtacaggtaatgttgatttggttacagttgccatgaatatgtatacccaaggtgtttctcctaatttagatttctcagatttaacttcaatttctgaaattgtccatcgctgtaacaagattccaattcccccaagagccccatatggcggtgaattggttgtttctgccttttctggctctcatcaggatgcaattaagaagggatttgcaatccaaaacaagaaacaggctcaaggagaaactcggtggagaattccatacttaccattggatccaaaggatattggacgtgattacgaagctgtcatcagagtcaactctcaatccggtaagggtggtgctgcttgggttattatgagatctctaggattagacgtaccaagaccaatgcaagttgatttctccaatactctacagaaaaatgcagatgccttaggaagagagttaaaatccgaagagattacaaaattgttcaaagaaacttacaactacaacaacaatgaacatatatacgtcaccttgttgaattacgaagttaagaaattgaacccagagcgtagagctttagtgggccaggtagaaatcaacgataaagttgtcaacatcgaaggctacggaaatggtcctatctcttctttgatggatgcgctatccaatttactgaatgttaagttgagcgttcaaaactactctgaacattccttgggttctggttccgcaacccaagcggcatctttcataaatctttcctacataaaggacaacaataatcatgctaccagtaatatgtggggtgttggtgtctccgaagacactggggatgcatctattaaggcggtatttgctactgtcaataatattattcattctggggatgttctactggcagagtaa

SEQ ID NO: 81274 - DNA, 264 bp, Saccharomyces pastorianus
atggtaaaacattcgttcatagagctagctgagcatgctagtaaactaagaaggtctatcccacccgtcaaactgacttataaaaatatgctacgggacccatcggtaaaatatagggcgtttgctccaccaaaaatggtcaagaggatttggcctgacaaaactattcaaaaggctccacgttggctgtctactgacttgagggacggtaatcaatctttaccggacccaatgtctgtggctcaaaagaaagaatatttccac

SEQ ID NO: 81275 - DNA, 588 bp, Saccharomyces pastorianus
atgggaatcaccgatttaaaaacaatggtttctacttttgaagagaatcttgataaaatgaattattctaccgatccgattggatatgtgtgcgatactagctggcataaagcgcagaatataatcgagattttgacagattacgaagatgaaaacccaaatgaaattgataaacctaagcttatcatatgtgcagacacaattattatagataagaatgggagaatctacgagaagcctaaaacaaaagaggtccaaaagaagtttttaatgaagttttgctatgaagatgatgaaccagttaacgttgtcaccgctgtgactttaattaaatggtacggcagagaaaactttgaattggtaccattccgagatgaaaccaaggtatactttgataacaaaatacctttgagaatattggaagaatatgtagaaagcggagatgggctagaggttggcggtggatttaaaatacaagggcaaggtgctattctaattgaaaaaattgaaggtgattactataacgtagttggtttaccgctcaataaaacgttcaaaggactctatgctgaggctaattccatataa

SEQ ID NO: 81276 - DNA, 1377 bp, Saccharomyces pastorianus
atgacacaaagcatcagtagtgctgccagccctataggcatgaacttcaacgcatcacataaactagtaccattcttagcgattgttttagacctaacttctgaaacgaacacctttccagttggtttcaacgaccttatcacccaaagttttaaactgccagataggcaagtaagatttcttttactaatatacctacccaaattaataggtccattgagcaaatcagagatctccagtaggatatatccacattttatccaaggtctgaccgactctgatgtcactcttagattacaaacactgaagacaattccatgcattgtgtcatgtttaacagagagacaactgaataatgagctactgaggtttctcgcaaaaacacaggttgattctgacgttgaaatccgaatatggacagtcatcataataagtaaaatctcaaccatattatcaacgtcagttggtaatcgctcgaatattttagctacggcattcacaaaatctttgaaagatcctcaagtaaaaccaagattggctgctctttatgggcttgagaagtcgattgagctgtttgatgtgaacacaatcgccaacaaaattttaacagtcattgcccctggtttattagataaaagtcccatagtaagaggcagagccaaaatcctgttcgaagaatatctggaaaaattggaaaaagaagcccaacttattcaaacaaacgatagtactgcagattcggaagatgtgaaagatattgattttgagaattacggttgtgatgaagaggatatgaataaagaagacaatttgttagccgcacaatttttaaataatttacgtttaaattctccctcagcaacgacaccaagtaacattaccgagagcgaaattgattccgcccaggacggaagtggatgggacgacctcagcgataccgatggctttattacaaatggtaccacagaatccttcgatgaaccaacaaaccctgtaacaaccgcaaacaccccaaaattattcggaaaacctattaaaattaataaaagttggaatgatgagttgaatgatgatggctggattcaagatgaaagcggcccatcgaaggtgcctcaaaaacacacaaggccacaaaattcaacgttggcaaaatccatcgctcctagctcaaggctttctatcaagaagaagaaaacaacgatcctagcgccaagaaacattgctagtaactctactgttaccaccaaatcgtcgctgtccaataaaactgcaagaagtaagcctataagtagtatccgcggctcggtaaccaagaaaggaaatgttgacggctgggatgatgatggggattcagactcctgggatacgaattggtga

SEQ ID NO: 81277 - DNA, 912 bp, Saccharomyces pastorianus
atgaatttttccagcattttcaaatctatttcgaatttccagttcccatacaccatagaggaaactgcaatcactgaaaccgccctttggcaatgttccgatggtataaggaaggcagattccttgccagtaacagtttttaaggcaaaaagatctccagaaaatgaatctttaattttaaatgctgtacacaagagcaaaattttgaagattccaggactttgtacggtgctggagacatttgattccgacccccaatccacatttattgttaccgaacgagtagttccatttccttgggataatctaggctctttatctcaaaacaaatttggtgttgaattaggaatatcacaattattggcaactttaggatttttaaaaaactttgtccttggtacgctttctaaagattctgtttttatcaatattaagggagagtgggtactatttgggctagaactttgttcaagcaaagaaggattaagtgcgtttgaatttgccagtagagcgaggtcatattacaacataattggctcacagttgccctgtgaagatccgaatacaattgattcaatggggttaggattgttgataaagagtcttatggctccttcttgtctgcccaaagattggattgtcaatgtaaatatgatttcagatggaaagataacaatcgaaaacttcagaaaaaggctagaaaatacagaaacttggcgttctaatcctttgataaacctttatcaagaattgagggagttgcatataaaggacctacagggaaaattggttgtgatgtcaaacttggaaaatttgtatctagagtcaagagagatttccgtaaatttaacgcctggaatgatagacaattttattattccagagcttcgtgacattatcacacattcttaa

SEQ ID NO: 81278 - DNA, 2118 bp, Saccharomyces pastorianus
atgcagcagtcacagcaaccgcagttccagcctagcagtagaagagaatcaaactctatgagacctccactgttaatacctgcagcaactactaaaagccagtccaatggcaccaataatagtgggaatatgaacataaatacagattatgaatcattttttaatactggtacaaacaacagtaattctaatcagaacccgtactttttgagttcaagaaataattctttgaagtttaatcctgaagatttcgattttcaattcaaaaggcggaattcttttgttagaggtactttggactatagcagccaaaatgcgtttatacctgaatcaagattaaactcactatccgttaacaacaaagctaatggtgatcctgtcgcggataatgttaccaacaacatgaaaggaaaaagtaatgaagttgacaatgatgatggcaatgacagtagcaataacaataacaacaacaacaacaacaacaacaacaatgaaaacaacaatgataacaataatgataataacgacaatagtattaattccgccaccagtactaatatcccaaaccaagaggaccatagccttgcttctaccgataccacgagcaatagtaggaaagatctaaaagaaatagaacaaagacttcgaaaacatttgaatgatgaggataattactctagtgctatatcaagaccattggataaaaacgacgtaattgaaggcagtgagggattgaacaaacatatagacgagtctggtatgcaatctaatattatcaagaaaaggaaaaaggatgattctactgtgtacgtcaagaatgagatgccccgtactgatcccccgatgagtaaagacaattctacttctgctgaaggggcagcaatggcaaacttttctggtaaagaacctcctatacctgacataagttcagtaagtgatgatgctactaacctgataggtgcaacaaaggtcgaccaactaatgttgattattcaagcaagaaagaaaggtttcacggagaaagtaaataccactcaagatggagacttactgtttaaccaaacgatggacattttaccagctaaaagcgagctagtaggtggtgtggagaaaccaaaaggcacacaaaatacacgagcagttaaaaaacatgaatgtccctattgtcatcggcttttttcgcaagcgactcatctggaggttcacgttcgttctcatatagggtacaaaccattcgtttgcgattattgtggcaaacgttttactcagggtgggaacttaagaactcatgaacgactacacacaggtgaaaaaccgtattcatgtgatatttgtgataaaaaattttctaggaaagggaacttagctgctcacttggttactcaccaaaaattgaaaccatttgtttgcaagcttgaaaactgcaacaagaccttcactcaattaggaaatatgaaggcccatcaaaatagatttcataaggaaacattgaatgccttaacggcaaaattagctgagatgaatccatctgagaacattccacttgaagagcggcaacttttggagtactttgcgtccatttataaaaattcaaacaggggaattaaaggtagaggaaaaggtgtaggaaccaaaaaatcaacaatttcctcaccagaaaaccatcctgcgagcacaattttaaatccaaatacaaatgcaaataatgttattgctaatgattctgaaaataacggcaaccctgaaggtaacattgacagcagtagtaacagcaatccgggctcacatagtatgatttcgccgacgcaaaaagacatgggtacgttgcaatcacaatttatccaaaataattttaataattctgtgaacagttcgaatccgtccaaccaaccaatcataaactacaattacaccacacttcctcattctagattaggaagtagtagttccagcaataccaacaataataacagcaacttttcggtaggtgcagctccgggtgtattaatggcgccaaccaccaataatgacttcagtttcaacttggatcaatctaatgataatgaaagatctcaacaagaacaagtgagatttaagaacattaattacaaaagctag

SEQ ID NO: 81279 - DNA, 675 bp, Saccharomyces pastorianus
atgcctcctccaactgcacagttcatgggccctacgcaggcgggacaaaatgaaagccaaaatcaatcatcaggcgaagctggggagcaaaaccaggagcatgggcaaggccctactcctattcttaatcaaagtcaaccggcctcttctcaaccgcaacatcaacaacaaaggaatgagtcgatttcatattatacaaatttcaaccagccacgatattccacggacgcctctatcaactcattcttgaacatatctgataacgtaccagtaacaagtacaggaggacctagttctggcggcgcctattccaatcttccacgattatccacttcaagtacacatcaaccgccagacctgtcgcaaatcggacgcggcttttccattgtaaacaacctcttcccacaacaacagcagcttcaaaatcagcatcggcaacagcagcagtcgcatcagcagcctcccttcaagaccccttcattttcgacgggattaacgggaagttcttctcaatatcaatttttaccaagaaatgataatacttcgcagccaccttcaaaaagaaactctgtttatcttggacctaatgatgggcctgatttgaatttttcagtatgcagcagtcacagcaaccgcagttccagcctagcagtagaagagaatcaaactctatga

SEQ ID NO: 81280 - DNA, 669 bp, Saccharomyces pastorianus
atgctgttgaacgagatggttcctctagctatgggcattgagaggcgaatatcaggcgatgttatcagttctgatagcaatgtaacttccgaaaatggtaacatcaacaatatgataaagagactgaagatagaggaacatcatacagtagatatcatacgttctcataacttgatacatgagctgtataaggcagatgaagaggaaaaagaaaaggttttagcaagactgaggaatattgggtttcaaatcggattgaagctgtcagagttattgatattttctaacaacccaaatttaaaattcaaggaaatggaccttctattaataatgaagttcatttgtagggatgtctggaaacaaatatttggtaaacagatcgataatttaaaaacaaaccacagaggaacgttttaccttcttgattatgactatcgacctattcaatcattttctttggaagaagatgcaaaaaacgaggagttaaaaatgatagaaccgtttttggagatacctgtgggaattattagaggtgtgttgtcttccttaggttattcatctgaagaggttatttgcttggcgtcttttatcgacaggccaacagataggcctaaaacagcttttcccaagggagttagcttccatgttcaagtcacaataccgcagtaa

SEQ ID NO: 81281 - DNA, 120 bp, Saccharomyces pastorianus
atgtcctctacacatagtaataatgtaggacatccccaatcttctccacaaggtccactaacggaacaacaagagcacaacagcaatatcaaatttttgagaattcattaccaaaagtaa

SEQ ID NO: 81282 - DNA, 1302 bp, Saccharomyces pastorianus
atgttaggcctattagaacctcctgcaaaagaattacaaggtattgatccagatgaaaccgttcctaataatgttaaaacatctgtaagccaactttatagaatcagtgaaaaatcggtgagaaagtttttagagattgctcttttcaaatatcgtaaggcaagactggagccaggtactgctattggtgccattggtgctcaatccattggtgaaccaggtacacaaatgacattgaagacctttcattttgcaggtgtggcttccatgaatgttacattaggtgttcctcgtatcaaagaaattatcaatgcttccaaggtcatttctacacctattataaatgctgtattagtaaatgataacgatgaaagggctgctagggttgttaaaggtagagtagaaaagacactgctatctgacgtagctttctatgtccaagatgtttacaaagacaacttgtctttcattcaagtgcgtattgatttaggtacgattgataaactacaattggagttgaccatagaagatatcgcggttgctataaccagggcttctaaattgaaaatacaagcctctgatgtcaatattattggtaaagatcgaattgcaatcaacgtattcccagaagggtacaaagcaaaatcgatatctacatctgcgaaagaaccaagtgagaatgatgttttttaccgaatgcaacagttacgtcgtgcgcttcctgatgttgttgttaaaggtttacctgatatttctcgtgcggttattaatattcgcgatgacggcaagagggaattattggttgaaggttacggcctgcgagatgtgatgtgtacagatggtgtcattggttctagaactacaactaaccatgttttagaagtcttttccgttttgggtatcgaagctgcaagatatagcattattagagaaattaactataccatgagtaatcacggtatgagtgtcgatccacgtcatatccaactattaggtgatgtgatgacatataagggtgaagtgttgggtattacaagatttggtttgagtaaaatgagggactctgttttgcagctagcctccttcgaaaagacaactgaccatttattcgatgcggccttttatatgaaaaaggacgctgttgaaggtgtttctgaatgtattattttgggtcaaacgatgtcgatcggtaccggttcctttaaagttgttaaaggtactaatatatctgaaaaggatctggttcctaagcgatgtctatttgaaagtctctcaaatgaggcagctttaaaagcgaactaa

SEQ ID NO: 81283 - DNA, 3066 bp, Saccharomyces pastorianus
atgaaggaagtcgttgtaagtgaaaccccgaaaaggattaaagggctggaatttagcgctttaagcgctgccgatattgtcgcccagtctgaagtggaagtgtctacaagagatctcttcgatttagaaaaagatcgtgctcctaaggcgaacggtgctttagaccccaagatgggtgtctcttcctccagtcttgaatgtgcaacctgtcacggcaacttggcatcgtgtcatggccattttggtcacttaaaattagctttgcctgttttccacattgggtacttcaaagccaccattcaaatactgcaaggtatctgtaaaaactgttctgccatattgttatcagaaacagataaaagacaatttttgcatgaacttcgtcgtccaggcgtagataatttaagacgtatgggtatattgaagaagattttggaccaatgtaaaaagcaaagaaggtgtctgcattgtggtgctcttaatggtgtcgtgaaaaaagccgctgctggtgctggttcagccgcgttgaagattatccatgatacatttcgttgggtaggtaaaaagtccgctcctgaaaaggatatttgggtgggagaatggaaggaagttcttgctcataatccagaactagagcgttatgtgaaacgttgtatggatgatttaaatccactgaaaactttaaatcttttcaagcaaattaagtctgcagattgtgagctgcttggtatagatgcaacagttccctctggtagaccagagacttacatatggagatatttacccgcacctccggtttgtataaggccttccgttatgatgcaagactctccagcatctaacgaagatgacttgacagtaaaacttacggaaatagtttggacttcgtctttaatcaaagccggtcttgacaagggtatttccattaacaatatgatggaacattgggattacttacaactgactgttgcaatgtacatcaactcagactcagtcaatcctgcgatgctaccaggttcatccaatggcggcggaaaagtgaaaccaattagagggttctgccaaagactaaagggtaaacaaggtcgattcaggggtaatttgtctggtaagcgtgtcgatttttctggtagaactgttatttctccggacccaaacttgtccattgacgaggttgctgtcccagatcgtgtcgcaaaagtcttgacgtatcccgaaaaggtaacaaggtataatagacataaattacaagaattgattgtaaatggacccaatgtccatcctggggcgaactatttactgaagagaaacgaagatgcaagaagaaacctaagatatggtgatcgtatgaagttagccaaaaatttacaaattggtgatgtcgtcgaaagacatttagaagacggtgatgtggtcctattcaaccgtcaaccatctttgcatagactatcaattttatcgcattatgctaagattcgtccttggagaacctttagattaaatgaatgtgtttgcacaccttataacgctgacttcgacggtgacgaaatgaatttgcatgttccacaaaccgaagaggctcgtgcagaagctatcaatttaatgggtgtgaaaaataacttattaacacctaagtcaggtgaacctattattgcggctactcaagatttcatcactggttcatatttaatatcacataaggattctttctatgatcgtgctacattaactcaactattgtctatgatgtctgacggtatcgagcactttgacataccacctcctgctatcatgaaaccgtattacttatggaccggtaaacaagttttttcacttttgataaaaccaaatcacaattccccagttgtgataaacttagacgcgaagaacaaagtctttgtccctccaaaatcaaaatccctaccaaatgaaatgtcacaaaacgacgggtttgtaattattagaggctctcaaattttaagtggggtgatggacaagtctgttctaggtgatggtaagaagcattctgtgttttatacgatattaagagattacggcccacaagaagccgctaatgctatgaatagaatggcaaaactatgtgctaggttcttaggtaatagagggttttctattggtattaatgatgtcacacctgctgatgatttgaagcaaaagaaggaagaactagtcgaaattgcataccgtaagtgtgacgaattgatcacattattcaataaaggtgaattagaaacacaacctggttgcaatgaagaacaaacattggaagctaagattggtgggcttctatctaaagtcagagaagaagttggtgatgtttgtattaatgaattagataattggaatgcaccattaattatggctacttgtggttctaaaggttccacattaaatgtttcacagatggtggctgtcgttggtcaacaaattatttctggtaatcgtgttccagatggttttcaagatcgttcgttaccgcatttccccaagaattcgaaaacaccccaatccaaaggttttgtaagaaattctttcttttcaggcttatctcccccagaatttctgttccatgctatttcgggtcgtgaaggtttagttgacacagctgttaaaaccgcagagactggttacatgtctcgtagattaatgaagtctttagaagatctttcttgtcagtatgacaatacggtcagaacttcagccaacggtatcgtccaattcacatatggtggtgacgggttggatcccctggaaatggaaggtaatgcacaaccggtcaatttcaatagaagttgggaccatgcatacaatattacttttaataaccaagataagggcttactaccctatgcaattatggaaactgcaaacgaaatattaggaccattggaggaaaggttggtcagatatgataatagtggatgtttagtgaaaagggaagatttgaataaagcggaatatgtggatcagtatgatgccgagagagatttttaccattccttgagagaatatattaatggcaaagcaactgcttggctaatttaa

SEQ ID NO: 81284 - DNA, 366 bp, Saccharomyces pastorianus
atggctagctccgatgatcgtgtcaaagtcttggcggctaccaatagagttgatgttttagatcctgctttgttaagatcaggaagattggatagaaaaattgaattcccactcccatccgaagactcgagagctcaaattttacaaatccattcaagaaaaatgaccactgatgatgatattaactggcaagaacttgccaggtctactgatgagtttaatggtgcccagttaaaggcggtaactgtggaggcaggtatgattgccttaaggaatgggcaatcttccgttaaacacgaagatttcgttgagggtataagtgaagttcaagcaagaaaatcgaaatcggtatccttttatgcataa

SEQ ID NO: 81285 - DNA, 738 bp, Saccharomyces pastorianus
atggccaccttggaagaattggatgctcaaactttaccaggagacgatgaattagatcaagagattttgaatctttcgacgcaggagcttcaaacaagagccaagctcttggacaatgaaattcgtatttttagatctgaattgcaaagactgtcccatgaaaacaacgttatgctcgagaagattaaggacaataaggaaaaaatcaagaataatagacagttaccgtaccttgtggctaacgttgtcgaggtcatggatatgaatgagattgaagacaaagaaaatagtgaatctactacacaaggtggcaatgtcaacttagataacaccgctgttggcaaagctgctgtagtcaagacttcttctagacagactgttttcttgcccatggtcggtttagtagatcctgataaacttaagccaaatgacctggtaggtgtgaataaagactcgtatttgattttggatactttaccctctgaatttgattctcgtgtaaaagctatggaggtagatgaaaaacccacagaaacttactcggacgtgggtgggttggataaacagattgaagagctggtggaggccattgtgttacctatgaaacgtgcagataaattcaaagatatgggaattagagcgcccaagggtgccctaatgtacgggcctccgggtacaggtaaaactttattagctcgtgcttgcgcggctcagacgaatgctacttttttgaagctg

SEQ ID NO: 81286 - DNA, 177 bp, Saccharomyces pastorianus
atgttgttgagagctgacgatagaagtatctacggtagacatgatgctgagggagttgtttgtgtaagaactaagcaaaccgttattattgctcattatccaccaaccgtacaagccggtgaggccaccaagattgtcgagcaattggctgactacttgattggtgttcaatactaa

SEQ ID NO: 81287 - DNA, 1095 bp, Saccharomyces pastorianus
atgagcgttttgagaaggctgaatgttcttcagttggaaaaccttctggacgctttgaaaagacgagaaattccacctaatatagcactaaaagatgaatatatcatgttttataaagattttttcattttcccggagttctttgattattttacactgcatagtattgaactattgtctaacttggataattgtttatttagcttaggaaacacatgccagttattttccacagagcaaatatattcccaattaagccaaatattggacattgttaaagagctgtttcgcatggtatcggtaagcaggacaaacattgagaagtttttaaacgcttgtttgaactattctccgttcaaaatattacccacagctcagttacacggtgataatatttctaggtggagttttgaaagcgaagtgcgtcagggtttcgataattttaacagctatatgggcatcgaaaaagatccccacggtgttatagtatcagcaatagatctttttactcaaatttacagttttgatatcttggcgtttttcctcacatttattacaaaagaaagtgggcaggatttgcccttcacaaaatctctgtccaggaaaagaacgtatttgaccagaattgctcaatcttcttcattgagacagtttttacaactgagtacacgccctaatataaggattctgggaggcaatgggcaaggtattggaaattccaattatcccgaatttacaaacgcatcatcagtcatctcacccaagctaagggcttctcctctactagaaagaagggcgtcaaaaatctgctatgctattacgaaattactctataggttagaatgtcatcccataggtatggcccttttaaagaagtatctccacagtcaattgcgagaagcctatctagaatcaaaacgacactttatttccaaaaagggagattcgaccaacacttcctctaccattgcatcatcatctttcgctggcgcatctgttcctctatcttcaaacgaatcaggaatgctaaacggcttgaagcaaattaacgaacaacaagaatctacattagaaaccactcaaaaggaagactag

SEQ ID NO: 81288 - DNA, 1356 bp, Saccharomyces pastorianus
atgttgcgaagagaactaaataactctatcagcaacaggtcgatggaaaatgaatcctttccttttgaaaggccgaatgtcagctatataatatccgcagaatttgataataaattaggtcctattttgaagcaccaatacccgaaagatattccaggtttcaatcagttctcacatgagcaacgcaacggcaatacgtcggtgtctatgaacttggcaagtttaatgataccgagtagcatagagagaaatcccggcaaacaagatattacagtgtttaccctttattacaataagttcactcaaaactatcaactctttcctgtgccaaaagaccctcgtttcagtttcaatctgcatcatcgtgaacagtcagatggtagtgttaccaatagcatatattacgatgccgaaaatcatcaagatgcaaaaaataatagatacactattgtcttggaagatgatgagctcgaatgccaggaagttcagaataatcagaatgccatcgacaacgaacctttatttttcataaatgtcgccaacacagtattagacaccacgaacgatagaggggcagtaatcaagtcgattgccatcggaacaccattaaaaaccttctttgcattcaaaaatattattgtattagtgttagacttgtatatgaaagctcccactcaagctgctgctacagacatactgcttgattgctttaatatgctaaacagtattgaccttacattgattaatgacatacattccaaaagtagtatacaagaagtgctacactctatccatgacgaatctatcattaccaaagtatttttagacccggattccactttaaagaaacttttttgcatcaatggatttgacactaaggacaagtatggtaacattgtgacttttcatgaccaactcattcaatatcattttacaagatttcagccaaagacgctcccgccatttttgttaaaaatcccattgcaatttaatatgattagaagagagcctatttatattgaaaatgattataatgaactagttttaaaatttttggataaatttgtcccttaccttcttaaagccggacaaaaagttaatgcatggaagttagtcatcaattcaactaaactgagtaaagaagacctatgcgcttttattttgtcattagccaacataacggcaacttatgctagcgatccacaatcatacttcaaaggaaatgctgcgttgatttttccctatatggacatttctcttgttgacggtttgcgggcgtatgtagcatcgaatagtgattttgtcggatgctttgcaattatcggaactgccaatccattttccgataccagttag

SEQ ID NO: 81289 - DNA, 1194 bp, Saccharomyces pastorianus
atgtcgagggcccaccgtacaatagattctctttgtgctgtaaatgctgccgctaccgctgcctctgtcgcccctgcacccgcgcccacatccacatctgcatatgcacccaaatctcagtatgagatgatggttcctccagggaaccagtatgtcccgcagaaatcttcctcgaccacgaacatcccttcgagattcaatacggcttcagtgccgccctcgcaactttttgtacaataccaaccgcagtcgcaacaacatgtgacttatgcgaagcaaccggcacatgtaccaaactttatcaatcagccgatacccatccaacaactacctccacaatatgcagacacttttagcactccacaaatgatgcacaatccttttgcctcgaaaaataacaacaaaccgggcaacacgaagaggaccaatagtgttctcatggacccgccgactcccacagcgagtgttggagttcagggtccactaaactatcctatcatgaatattaatccttctgtccgtgactacaacaagcctgtccctcaaaatatggctccgagtccaatatatcctattaatgaaccaacaacgagattgtattctcaaccaaaaatgagaagtctcaggtctacaagctctttgcccaacggtagaagaaacagtcctctaaagctgacaccgagatcatcgttgaatgaagatagtctgtatcccaaacctagaaactctctcaaatccagtatttcgggcacgtctttatcctcctcttttacactagttgccaacaatccagccccaattcggtactctcagcagggattgcttcgctcattaaacaaagctgcaaattgtgctccagattcggtaactccattagactcgtctgtcttgacgggccctcctccaaaaaacatggacaatcttcctgttgtttcttcaaatttaataaactcccccatgaacgtcgagcacagctcaagcctatcacaggcagaacctgcaccacaaatagaactaccgcagccatctttgcccacaacgagcaccactaagaataccggcgaggctgacaatagtaagagaaaagggagcggtgcttattctttactgaatcaagaggatagcagcacgtctagtgctgatcctaaaactgaagataaagccgctccggcactcaaaaaggtcaagatgtga

SEQ ID NO: 81290 - DNA, 1062 bp, Saccharomyces pastorianus
atgagtgaagaggaaacggtctcagccccagctccagcttctacaccggccccggctggaaccgatgtaggtagtggtggagcagcagctggaatagctaatgctggtgctgaaggcggcgacggtgccgaggatgttaagaaacatgggtcgaagatgctggtggggcccaggccgccacaaaatgcgatattcatccataagctataccagattctggaggacgaatcgctacacgacttgatatggtggaccccttcgggcttatccttcatgattaagcccgtggaacggtttagtaaggctttggctacatatttcaagcatactaatattacgagctttgtaagacagttgaacatttacggctttcacaaggtgtcgcatgatcatagcagcaacgacgctaatagtggcgatgacgccaatactaatgatgacagcaatactcacgatgataatagtggcaacaaaaacagcagtggcgacgaaaataccggtggcggtgtgcaagaaaaggagaaaagtaaccccactaaaatctgggaatttaagcatagttctggtattttcaagaaaggtgatattgagggactcaaacacattaagagaagagcttcttcccgtaataactcctcaattaacagtcgaaagaattctagtaatcaaaactacgatatagattccggtgcaagagtaagaccctcttcaattcaagacccgtccaccagttccaattcctttggtaatttcgttccgcaaattccgggcgccaataactctatccccgagtactttaataactctcatgtaacttacgaaaacgcaaaccatgttccgctggaatccaataacccggaaatgcaagagcaaaacagacctccgaactttcaagatgaaacactgaaacatttgaaagaaataaattttgatatggttaagattatagagtctatgcagcatttcatatctttgcaacacagtttttgttcacagagtttcaccttcaagaatgtaagcaagaaaaaatcggaaaatatcgtgaaggatcgacctgcaggc

SEQ ID NO: 81291 - DNA, 426 bp, Saccharomyces pastorianus
atgacagaatctacattaaattttttggcgtcaagaataccgaagtatgaccatcttcagtcggcaagaaggacgagaaattcgaagaaaatttctaatattttgaaccaattcaaaggaatttataatgatgaaactctgaacgaaaatgccgagattgatctgctgagcgccacaactcaacaaattaaagcggaaatcaatcccttcgtttttgaaatcgctaaaagtgacgccaatgtcaagaatgaaaataaacaaatatttgagttgcatagtgaaaatgtatcagaaagacgatacaaagatttggtctatcagttgtcacaagagggtgtcttgaaaaacgtatggttcaacgctgatccgagcatagtcgtgagaaaatgggagcatttgcactcaggcttttcaaagaacaaataa

SEQ ID NO: 81292 - DNA, 1842 bp, Saccharomyces pastorianus
atgaaaaggcacgtgtctttatctgatatattgacaggaagtaagagaaaagtgagaagacaagatgctctacagattaccatcgatgacgaaaatgatactgaatcaggcacttttgacgccagaacagccaaacatgacgattcttcagtaatatttttaaaccactctgttgtgaagccaattgaagctgtttctactaatcacaaatctgcaaaggagtttttgatgacgaaacgcacaaaagaaaaatgcgatgacgacgatgatgatcttattgtaatcagtgataagagtcccaaaagtgagactaattgtagcaaaattgcactttcacaggagcatgaagatgatatttctataatttccacatcgagaatcaaatcatcgcttcttaatgaaagagcatcaaagattaaaaacttccttaaacatgagacaaccgacacgttcaaaagattaaatagcatctctaaactaaatgaaatagagccaccattaccattacatcaatcgatttacccagtaggtgacaaagagctgtcagatcggagtgttgatatcccgcttcgtttccgcacaataccgccattaaatcataattttcttcctagtgactatgaatcgttgaaagacaagaattcagcatcttgtattcctgttcgctatcaagcacccgcattacttggcacaaatattaaaagaaatacaactctcacatggccgcagctattcaagcctgtcactttaaaacaagtattaattgaacccaaattgaaacttcgaatcaaaaattggattgaaacatcctttcatacgctagaaaagcctaccttgaggaaccgtctattgaacagaatgaatcccaataaacaacagggatctggtgatgagcttgccaacttcattgtacctgatctcgaagaagacgaaaacttgcgtccagatttctacagaaatggcgaagcaaatagcagcttgagcgaatttgttccactaatgatattacacggaaattcaataggcaagaaaacgctgatacagacaatcatgagagagattgctggcgacgataattcttaccaaatatatgaagttaactcaaacatgaacaggagcaaaaaagatttgcttgatatcctattagattttaccaccacacactatgtcaaagattcctcaaaaaggaaaagtgactacgggcttgttttatttaatgatgttgatgttttatttaaagaacatgataggggatattgggcaatgatcagcaagctttgtgaattttcacgaaggcccctcgtattgacttgtaaggatttgtcactagttcctagtgaacttattgccttagcaagtgaacaaaactctttgtttcatactaagaaaattagtacacccacagtctatgcgtttctaacaaaatatttaaagtcccttgaaatcgaagtttgtgacgactggcttcgcgatgttgtaaaacaaaataatgcggatattaggaagtgcttgatgcacttgcagttttggtgcgttgatactggggctgatttgatttcatccaagaacagactaccggtcctaacatcaactcttggttcaagcgttaaagatatatcgcaatcaactgatctactctccataaatgatgttattggtcaagcaacgctcaatcgttccatggttagacaagaaatagattctaccacaatgaccccagaaaaagttaatactttccaggatcaaaatctggatgatgaaatgaaattaaaatttgattacgtgatagattataaattgcatttaaatgaccccaatgcaaccattataccctttggggat

SEQ ID NO: 81293 - DNA, 1869 bp, Saccharomyces pastorianus
atgctaatcacacgtttacgggtccctacaataaagcggccactgcttccaattacaagtcatctcgtaagacactgtattcgaacttacgtcgcaactaatcatggaaatgtcagaccttttataacaccttacaagagttcgttacctgttagatgtttgatcgcccaaaggcacatccgaacatttccaagcaatgacaagttcactaccaaggcttccaatattgagactattttgcttagaaaaaataatgagcgagagttcaagcaatcgcttttagcagatgcaaagaattttcaagaaaggttcaaaatcaatctaaagtggattcttattaaaaacaacaggccgttctctctgaatgaaataagtattatagcgtcttggctgatattgtcacaaattctatggctcattctgagcaccaccactttcatttcgttctatctattcgtcattaactctgttttcagtcaggaatacatccatgagaagaaaatctatgaaaggcttctaaaatggttgttgaaagatcataagtgctccaatcaagatttggaaatcacattttctccggaagataaagcatcaatgcttgtgctctctccagactgggagtcaaattcaatacttataaaaaggctaaatgtcagggatgagattttggacttagacttaaaatttcaccacattaacctgaatgtttccctaaaaaattggttacttggcaggggactaattacaaatgtttcaatatacggtattagaggatgtttgaacttatccaatttcatcaatttagtaaactcttttcaaggagatcaaaagacggagaattttttgaaaactttaaataacgttgaaattactgactcagaaattcttttgaaacaatctctgagtgcccaggaaactccgagtctaaaattttccatttacaatctatctttaccacgactaagactgaaccattttatttctgatattctgagtgccaaaacattttccggttcaattaataattctcttttcaacttatttaagaggcaacaaaagttaacagcagttattgaaaataataacaaaaataggatggcaagctcgaagtttgatttcacggacaacaatcaggaaaattaccgcacagtgactcatcaggatgatccgaattatgtaacgacgttaagattgaactttatcaacattaatgatttaaaatttaatggcgatggtaagttcaactggttgaaagacggccaagttgaaatacttgctgacataatgctaacaaattctacttctcatctatcatcggagtcgaaatatgcagtggtggatttgaaggtaacttgtagggacttgaagacaactttccctcaggaacctccagtattatcgacaggtgacagtattgtttcattggatgaattgaaacctataataacatttattaactcatatgaagggatggctaatcctatattgaaagatttctcggaaaacgagagattgaccaattccataatctggaactcgccaaatgtatcgattaataggcaaaggaaatcttatcctttaactacaaaagtcacttccaattccacgaaggaaatcatcaagtttcataatcaaccaaatactaatgcaaacgaaattgttttacgctgtaagatggtcaaaaacttgtcagatttacagcttattaacattaatcaaatactagaccaaattaccatggagctatatgttgatttaaccaaaatagtagaagattgggagtttaaaaacaaaaatgattggatgaaacaatggggtactacctttgcatcccaattattgttgtttgggtttggtgccatggtttga

SEQ ID NO: 81294 - DNA, 99 bp, Saccharomyces pastorianus
atgcatattaaagttgacagtagatttgcgtcaagaagtattaaaacaaaaggcacatacagattatcaggtggtgggaggtttataaattcatgctaa

SEQ ID NO: 81295 - DNA, 180 bp, Saccharomyces pastorianus
aattttgaaaaagtagtagcggtatgttgcctaaaaataattgagaagcaacggttagaccgcttaaaagttttcgatggaagtgaaaacccttataaacaaaatattactgcctttgcccatgagcaatcatcaataccagagcctcttaaagaatcaatttttaaccaattgaaatag

SEQ ID NO: 81296 - DNA, 276 bp, Saccharomyces pastorianus
atgtcgcagaagattggacacagtggcttggcttttgcgcgtctttggcaccatgtcgacgttgcccgtgataagaggacattgggtagattggcttcagcaattgcaattaccttaattggtaaacataagccggtctatcatccgtcacaagactgtggagactacgtagtagtgactaattgccaaaaaatccgtgtaacaggtaagaaatttgagcagaagacttactggtctcattcaggtagacctggtcagctaaagttacagacatga

SEQ ID NO: 81297 - DNA, 1344 bp, Saccharomyces pastorianus
atgggtgtgtttttaacaaactataatgtgcgtatggatactatggccaatattctatattatcctcaaaaaccattgggtactacacgtgcgatggaatatttgaagtttagagaattacccgctggtcaaaatgcaattgttgctattgcatgttactccggttataatcaagaagattctatgattatgaatcagtcttcaattgatcgtggtctattcagatctctgtttttcagatcttatatggatcaggaaaagaagtacggtatgtctataacggagacttttgagaaaccacaacgtacaaacaccttaagaatgaaacatggtacatacgataagttggacgatgatggtctaattgcgcctggtgttagagtttcaggagaagatgtgattatcggtaaaaccacaccaatctcaccagatgaagaggaactcggtcaaagaacagcataccattccaaacgtgatgcttccacaccattgagaagtactgaaaacggtattgttgatcaagttttagtcacaacaaaccaagatgggttaaagtttgtcaaagttcgtgtaagaactacaaagattcctcaaattggtgacaaatttgcttctcgtcacggtcaaaagggtactattggtatcacatatcgtagagaagatatgccatttaccgcagaaggtattgttccagatttgattattaaccctcatgctattccatctcgtatgactgttgcccatttaattgaatgtttgttgagtaaagtcgcggcactatctggtaatgaaggtgacgcctctcctttcacggacattactgtagaaggtatatccaaactactgcgtgaacatggttatcaatctcgtgggtttgaagttatgtataatggtcacacaggtaaaaaactaatggctcaaattttctttggtcctacatattatcaacgactaagacacatggtggatgacaagatacatgccagagcacgtggtccaatgcaagtattgacgagacagcctgtagagggtagatcgagagacggtggtttaagattcggtgagatggaacgtgactgtatgattgctcatggtgctgcctcattcttgaaggagagattaatggaagcatccgatgcctttagagtccatatttgtggtatttgcgggctgatgacagttatcgcgaaattaaatcataaccaatttgaatgtaagggatgtgataataagattgatatttaccaaattcatattccatacgccgcgaagttattattccaagaacttatggctatgaacattacaccacgtttatataccgatcgttcgagagatttttaa

SEQ ID NO: 81298 - DNA, 2106 bp, Saccharomyces pastorianus
atgtctgaccttgcaaactcagaaaagtattatgatgaggacccatatggattcgaggatgaaagtgcaccaattactgcagaagattcgtgggctgttatatccgctttttttcgcgagaaggggctagtttcacaacaacttgactctttcaatcaattcgttgattatactttacaagacattatttgcgaggattccaccttgattttagagcagttggctcaacatactaccgaatcagacaacatcagtagaaagtatgagattagttttggtaaaatctatgttacaaagccaatggtaaatgaatctgatggtgttacccatgcgttgtatccacaagaagcacgtttacgtaatttgacatattcgtctggtttatttgttgatgttaagaagagaacatatgaagctattgatgttccaggtagggaactgaaatatgaattaattgccgaagaatctgaagatgacagcgaaagcggaaaagttttcattggccgtttaccgattatgttaagatcaaagaattgttacctaagtgaggctacagaatcagatttatataagctgaaagaatgtccctttgatatgggtggttatttcatcattaatggttctgaaaaagttttgattgcacaggagcgttctgcaggtaatattgttcaagtgtttaaaaaagccgccccatctccaatttctcatgtagcagaaattagatctgcccttgaaaaaggttctaggtttatcagtacccttcaagtcaagctttatggtcgtgagggtagttcagctcgtactattaaagccacattaccatatatcaaacaggatattcctattgtaatcatattcagagctttaggtattattccagacggtgaaattttagaacatatctgctacgacgtaaatgattggcaaatgctggaaatgcttaagccttgtgttgaagacgggtttgttattcaagatcgtgaaactgcattagactttattggtcgtcgtggtactgcccttggtatcaagaaagaaaaaagaatccaatatgcaaaagacattttacaaaaagaattcctacctcatattactcaattagaaggttttgaaagtagaaaggcatttttcttaggttatatgataaacagattattactgtgtgctttagatcgtaaagaccaagatgatcgtgatcatttcgggaaaaaaagattagatttggcaggtccattattggcccaacttttcaagacattgttcaaaaaattaactaaagatattttccgttatatgcaaagaactgtagaggaagcccatgactttaacatgaaattagcgattaacgcaaaaaccataacatcaggtcttaagtacgctttggctactggtaactggggtgaacaaaaaaaagccatgtcttctagggcaggtgtttctcaggttttgaaccgttacacttattcatccactttatcacatttaagaagaacaaacactcctattggtcgtgatggtaaattagccaaaccacgtcaattgcataatacacattgggggttggtctgtcctgcagaaactcctgaaggccaagcgtgtggtttagttaagaatctgtcactgatgtcttgtatttctgttggtacagatccaatgcctatcatcacttttttaagtgaatggggtatggaaccactggaagattacgtaccacatcaatcacctgacgcgacaagggtcttcgtcaatggtgtgtggcacggtgttcacagaaacccagcaagattaatggaaacccttagaacattgagaagaaagggtgatatcaatccggaagtttctatgattagagatattcgtgaaaaggagctaaaaatctttacagatgccggtagagtttatagaccattatttattgttgaagacgatgaatcactaggccataaggaattaaaggtaagaaagggtcatattgccaaactgatggctaccgaataccaagatattgaaggtggatttgaagatgtagaagaatatacatggtcatcattattgaatgagggtttagtggaataccttgatgctgaagaagaggacttatattga

SEQ ID NO: 81299 - DNA, 2202 bp, Saccharomyces pastorianus
atggcttatgtcgtcttctttttctttgtctatctattcttatgtgaatacaacgagggtgctaaacaaaaaggtgaaatattagttttcccacgcactatagttaaaagaatgaagaaaagaggtgtattaactgaaaagaatgcaaatgaccccgaaaacgttggggaacgtagtgacttatccagcgataggaaaatgctacaagaaagctctgaagaggaagccgatacttacggggaaattggtttatccaagtcagaggctatatttcactggagaaacctttgttacgaagttcagattaaggccgaaacaagacgtattttgaacaatgttgatggttgggttaaaccaggtactttaacagctttaatgggtgcttcaggtgctggtaaaaccacacttctggattgtttggccgaaagggttaccatgggtgttataactggtgatatcttggtcaatggtattccccgtgataaatctttcccaagatccattggttattgtcagcaacaagatttgcatttgaaaactgccactgtgagggagtcattgagattttctgcttacctacgtcaaccagctgaagtttccattgaagaaaagaacagatatgttgaagaagttattaaaattcttgaaatggaaaaatatgctgatgctgttgttggtgttgctggtgaaggtttaaacgttgaacaaagaaaaagattaaccattggtgttgaattaactgccaaaccaaaactgttggtctttttagatgaacctacttctggtttggattctcaaactgcttggtctatttgtcagctaatgaaaaagttggcaaatcatggtcaagcaattctatgtactattcaccaaccctctgctattttgatgcaagaattcgatcgtttactatttatgcaacgtggtggtaagactgtctactttggcgacttgggcgaaggttgtaaaactatgatcgattattttgaaagccatggtgctcataaatgccctgctgacgccaacccagctgaatggatgctagaagttgttggtgcagctccaggctctcatgcaaatcaagattattacgaagtttggaggaattctgaagagtacagggccgttcaatctgaattagattggatggaaagagaattaccaaagaaaggttccataactgcagctgaggacaaacacgaattttcacaatcaattatttatcaaacaaaattggtcagtattcgtttattccagcaatattggagatctccagattatttatggtcgaagtttattttaactattttcaatcaattgttcatcggtttcactttcttcaaagcaggaacctcgctacagggtttacaaaatcaaatgttggctgtattcatgtttacggttattttcaatcctattctacaacaatatctaccatcttttgtccagcaaagagatttgtatgaggccagggaacgcccctcaaggactttttcttggatttcatttatcttcgctcaaatattcgtggaagttccatggaatatattggcaggtactattgcttattttatctactattatccaattggattttactccaacgcgtctgcagctggccagttgcatgaaaggggtgctttattttggttgttctcttgtgctttctacgtttatgttggttctatgggtctgcttgtcatttctttcaaccaagttgcagaaagtgcagctaacttagcctctttgttgtttactatgtctttgtctttttgtggtgttatgactaccccaagtgccatgcctagattttggatattcatgtacagggtttcacctttgacttatttcattcaggctctgttggctgttggtgttgctaacgtagacgtcaaatgcgctgattacgaattgctaaaattcacaccaccatccggtatgacatgtgggcagtacatggaaccatatttacaactagcaaagactggttacttaactgatgaaaatgccactgacacctgtagtttctgtcaaatatctacaaccaatgattacttagctaatgtcaattctttctacagtgagagatggagaaattatggtattttcatctgttatattgcattcaattatatcgctggtgtctttttctactggttagcaagagtgcctaaaaagaacggtaaactctccaagaaataa

SEQ ID NO: 81300 - DNA, 720 bp, Saccharomyces pastorianus
atgagcgatgaagcaagccgtgaagctattaaggaagcccacattgctaagcagtccaagagagcaagaccttcctctccttatactgtcagctacatgatgcaagttaaatacctattaatcagaaatatgtggagactgcgaaataatatcgggtttacattatttaggattttgggtaactgtagtatggctttattcttgggttcaatgtttttcaagatcatgaaaaagggtgatacttctacattctatttccgtggttctgctatgttttttgcaattctattcaatgcattttcttctctgttagaaatcttttcgttatatgaggccagaccaatcactgaaaaacatagaacatattcgttataccatccaagtgctgacgcttttgcatcagttctatcagaaataccctcaaagttaatcatcactgtttgcttcaatataatcttctatttcttagtagactttagaagaaatggtggtgtattctttttctacttattaataaacattgtcgcggttttctccatgtctcacttgtttagatgtgttggttccttaacaaagacatttgcagaagctatggttcccgcttctatgttattgttggctctatccatgtataccggttttgctattcctaagaagaagacctacgttggtctaaatggattggtatatcatccgttggctacttatcgaatcttgtga

SEQ ID NO: 81301 - DNA, 300 bp, Saccharomyces pastorianus
atgatgagtaatctagatctgctgaataactttgccaatcaattgaaagatcaatctttacgtatattagaagaacagaaactggagaatgacaaatttactaaccgtcatttattgcatttggaaagattggaaaaagaagtcagttttcaaagaagaattgtttatgcgtcatttgtcgccttcgtagggttgatatcctatctattaataacgagagagctttactttgaagatttcgaagagagcaaaaatggcgctattgaaaaggcagacattattcaacaagcaatcagatga

SEQ ID NO: 81302 - DNA, 1284 bp, Saccharomyces pastorianus
atggcgaaccgtcttctcatatacggccttattttgtgggtaagtataatcggatcttttgcattagataggaacaaaactgctcaaaatgcgaagattggtctacatgataccactgtgatcacgactggaagtacaacgaacgtgcagaaagaacattcctcaccactatccaccggttctttaagaacccatgattttggacaggcctctaaagttgacatacggcaggctgacatacgggaaaacggtgagaggaaagagcaagatgcactaacacagcctgcaacaccaaggaatccgggtgattcgagtaattcatttttatcgttcgacgaatggaagaaggtcaagtcgaaggagcactcatcaggccctgaacgtcatcttagtcgagtgagggagccagtcgatccctcttgctataaagagaaagaatgcataggagaagagttggaaatcgatttggggtttttgacaaacaaaaacgggtggagtgaaagagaagaaaatcaaaaaggattcaatgaggaaaaggacatagagaaagtttacaaaaaaaaattcaactatgcatccttggattgcgctgcaacaattgtcaaaagcaatccagaagcgattggagcgacttctacgttaattgagagcaaagacaagtatttactgaatccctgttcagctccgcagcaattcattgttatagagctttgtgaagatatcctggtggaggaaattgaaattgctaattacgaattcttttcctcgaccttcaagagatttagggtgtcagtttctgatagaataccgatggttaaaaatgaatggaccatattaggagaattcgaggcaggaaattcaagagagttacaaaagtttcaaatacataatccccaaatctgggcaagttatttgaaaattgaaattctatcccattatgaggacgaattttattgtcccatatccttaatcaaagtatatggtaaatcaatgatggatgagtttaagatcgatcaactaaaggctcaagaggataaagaacaatccataggaactaacaatataaacaatttgaatgaacaaaatatccaagacagatgtaacaatatagaaacgcgtttagagactccaaacacaagcaatctctcagacttagctggtgcattatcatgtacttcaaagctcatccctttgaagttcgatgaatttttcaaggtgcttaatgcatccttttgtccttccaagcaaatgatatcttcttcttctcttcggctgttcctgtaa

SEQ ID NO: 81303 - DNA, 594 bp, Saccharomyces pastorianus
atggaccaagataattatcaagatgcttttcaaatgaggtcattcttgaaccaaggcgctactacgaatataaatgacacaccgacgaacaatagcagtattaattccttcgttacggcgacgaatggtgacagcagaatattctacaatagagggccatcaacgccactattaccggctgttctacaaaatttgactaatcaaacggaagcgcagagaaacccctacggacctaattacaataccacagctcaagatcgtaatcttttgggaatcgaaggtgatttgcctccaatcccccctgtggacccaaattcagaagcagaaactgaactaccaacaaggaccacatcggcggcacatctccctccatatatacacttgagcaccagcggccatggagatgatggaaaaattaggaagagaaggcattctaatgtttctatctacattccgaagaatccatacgccacccttatgaaacggagaccacaggcaaatcacgccataatgaataaaactctggcccaaactaatgactttaacacatcggctcaagataactcggaagtggtcgatttaacatcagattga

SEQ ID NO: 81304 - DNA, 978 bp, Saccharomyces pastorianus
  modified_base (20)..(42): a, c, g, t, unknown, or other
  modified_base (59)..(63): a, c, g, t, unknown, or other
atggcaagtgtcatgtcaannnnnnnnnnnnnnnnnnnnnnnatacttacaccttgccnnnnngccagttatatgtttacgaaccctttgtccaacacaggtggtggactcataaatgaaataaaagatgcaataaatgaaatggaacaattaaaggttctagagttaaagcaaatatgcaaatctctggatttatccataacgggcaaaaaggctgtcttacaagaccgaataaaacaattcttaagaaaatcctgtgatattggacatatagatccgtggaggcctaaggctattaagattcttatcgcgaaagtaaggataaactcatcattaccaaaatactctaccctttgggaaactttaaagacgggtgcgttcaagcatcctgtagcatcggggcaactacccgtgacagctctccagagtactgcattgccaccttattcccaacaacaggccttagcatattcctttacctcaccgttttacaaaccaatagtacaaataccggatgccaataaaaaattgaagcaatctgcaggaagaggttgtacaaaaatgaagttcaaggtaagtaaatctaatcatgatcttttgaaatctaacaagagttataaactgtatttgttttctggcttttcaataccgtttatatatgaaactgtgggccatgaggcaatagatttcccgtatccctgtgaactagtgtctaatggcaccaaactagaggacaacgtgaaaggtttaaagaaacaaaatgggacaggtaatcctgcaaatttaacgccttatcttaaagtaccgaccgagatgaatcacctagacttacattatctcaatattgataaagagtactctataagttgctttatagtggaagatttttcacctgaagctcttctggggaaaattctgaaaaggcccaataattatcaagcaagccaccacagcatacatcaaaagaaccttgaatga

SEQ ID NO: 81305 - DNA, 312 bp, Saccharomyces pastorianus
atgaagtatccggcgaagactgaccaatgtaagcatatccaatgttttgatgctctctggtttcttcactctcagtcacaagtccctacatggcagtgtccgatttgtcaacaccctataaaattcgaccagttgaagatttccgaatttgtagataatattattcaaaattgcaatgaagatgttgagcaagttgagatatctgttgatggctcatggaaaccgattcataatagttcggccgttataacggatactgttaaccaaaatcacagtgacctgcaggcatgcaagcatgcactgccgtcgttt

SEQ ID NO: 81306 - DNA, 138 bp, Saccharomyces pastorianus
ggcactgtcaaacaagagcaagattatgacagccgaaatgccttcgatactgattggcgtaatggttcataccacaacgaacccgaaataatatctctggatagctcagatgatgaagcctttattccggctagttaa

SEQ ID NO: 81307 - DNA, 981 bp, Saccharomyces pastorianus
  modified_base (71)..(71): a, c, g, t, unknown, or other
atgatcacaaggattattgaagtatggggaaaggttccgcccaagtatggttttaaaactgggtttttccncacaacaaggtccattctgaagagccccactacaaagcagactgatattattaataaggtaaaatcacccaagcccaaaggtgttcttggtattgggtatgccaaaggtgtaaaacatccaaaaggatcacatagattatcacccaaggtaaactttatcgacgtggataatctcattgcgaagaccgttgctgaaccccagagtataaaatccagtaacggttcagcacagaaagtgagattacaaaaagctgaattaagaagaaagtttttgattgaagcatttcgcaaggaagaggctaggctattacacaaacacgagtatttgcagaagaggacaaaggaactggaaaaagcaaaagaactggagctagaaaaactaaataaggaaaaatcttcagacttgactattatgactctagataaaatgatgtctcaacctcttttaaggaacagatcaccagaagagagcgaattgttgaagttgaaaaggaattacattcgatcgttgttgaactttcaggcgcacaagaaaaagctaaacgaattattaaacctctaccatgtcgctaatgaattcatcgttacagaatcccaactactaaagaaaattgataaggtttttaacgatgaaacggaggaattcactgatgcctatgatgtaacttctaacttcacgcaatttggaaatagaaaattattactttcaggtaacaccaccctacaaacccaaattaacaacgcaataatgggctctttgtcaaacgaaaagtttttcgatatttctttagtggattcatatctgaacaaggatttaaaaaacatttccaataaaattgattccaaattaaaccccacctctaatggagctggaaataatggtaataataataatacaaccaacttgtaa

SEQ ID NO: 81308 - DNA, 465 bp, Saccharomyces pastorianus
atgattgccctgatgtttaaactggaaatagagctaaaaatttctcctgctaagagaaacaatccggggttcaaatccaccgtgtcaacaggtcatcgagatgttccagatgaatggagaacaagtattaacgaagtcgtgatagcccacgtaaccaatgatattagtgtattcatcgggctggttactacttttgaaaacaccgctcattcagatgccatcagttgtattgtaaaatgtttaaggatattgacagaggcaaacaacaacgatgccactatttgcatcgattggatttacaaagtggtggaacaacttggccaagtaacccttaatgaaagagataatttggcgaaggccgtggttgaggggttgaattcaaaggattacagaaaggtgagggaaggaattagggcgtttgttggatggtattcaagaaagaatatcagttcgaggtttgaatag

SEQ ID NO: 81309 - DNA, 2535 bp, Saccharomyces pastorianus
  modified_base (2504)..(2504): a, c, g, t, unknown, or other
atggacaacttacaggtatctgatatagaaactgctttacaatgcatatcgtctactgcatctcaagatgataaaaacaaagcgcttcaatttttagaacaattccaaagatcaactgttgcctggtctatttgcaatgaaatattgtctaaagaagatcctacaaacgctcttctagaattaaatatttttgctgcgcaaactttaaggaataaagtcacatatgatctatcacaattagaaaataatctaccacaattcaaggattctttgttgacgcttttattatcgcataaccaaaaattgattattacacaactgaatgtcgcgttagcacgtttggcgatccaatttttagaatggcagaatccaattttcgagatcatttcattgttgaattcttcaccatctatattattaaactttttaagaattttacctgaggaaaccttagacattgcatctactcccttgacagaagtggaattcaattccagaattcatgaactaattgatccgatagcagaagatgtattgaaattccttgtatcatgcatagacctattacaaaatacagacgggaattccagctcatctatttcattagaacaaattttacggtgtttgaactcttggtcgtatgaattccctgttgaacagttgctaaccgtacaacccttaataaatctcgtgtttgaaactatttccaatggtaatgaaagtgacatggaggcattcgattccgctattgattgtctctgcgttatcctcagagaaagcagagatactactaatgagcagttgatttctgctttatttcatcagttaatgcttttacaagaaaaactattgcctactctgttcacagaccaccctttgaacgatgaatatgatgacgatctcctagaaggtatgacacgattattcgtagaagctggcgaggcttggtcggttgtcatttctaaaaaccccgatttttttaaaccaatggttttggtattattgatgttgacctgcaaaaatgaagacttagatgtcgtttcctatactttccccttttggtttaacttcaaacaaagtttagttttgccaagatatcaagaatcaagaaaggcttactctgatatttttgttaaattaataaatggtataattactcatttacaatatccatcaggccagttttcatctaaagaggaagaagataaatttaaagatttcaggtatcatatgggcgatgtgttaaaagactgtactgcagtggtgggaacttctgaggctttatcgcaaccactaataagaattaagtccgcaatagaaaacaacaatagctggcaaataatggaagccccattattttccctgaggactatggctaaagaaatttcgttgactgaaaacactatattgccagaaatcattaaaatcatttgtaaccttccagagcaggccaagattaggtatgcatcaacattagttcttggtagatataccgaatggacagccaagcatccagaactactagaagttcaattgcaatatatttttaacggttttcaactgcatgagggttcatcggatatgcaaagtataatcactgcatcatcacatgcattaatgttcttctgttcggactgctctaaactattagttgggtatattgatcagttgattaatttcttcctcaacgtgcagagttcgattgatattgagtcacaatttgaactatgtcaaggattaagtgcagtaataaataatcagccagaggccaaagtttcagtaatatttcaaaagctcgtagatgataatttgcgacaaatcgaggctttgattcctcaatggaaagcaaatccaacgctcttggctccacagattgctgataagattgatttgctatatgcgctttttgaagaattgaaaccgagatacaattatcctcagcaaggatcggaacctttactccccaggatagaatttatttggaaggcattaagaactctgctagttgatgcaggtgcaatgactgatagtattatcgtagaaagagtagctaaattgttacgcagaatttttgagagatttcatgtattttgcgagccaatattaccttctgttgccgaatttctaatccaaggttatttaacgactggattcggttcctatctgtggtgttctggttcccttattgttatatttggtgacgatgaatcattccccatatccccgagtctgaaagatgctgtctggaaatttgccctctcccaatgcgagacgttcatactgaatttcaacaagtttgataaacttcaattaaacgattatcatgaggcaataatcgattttttctcattaatttcagacttgataatgttttatcctggcgcatttttgaattcaacagagcttctaggccccgtactgaatgttgccctcgagtgtgttaataagcttgataactacgatgcttacatatgtatcttgcgttgcttagatgatatcatatnctgggggttcaagactccaccgatcctatag

SEQ ID NO: 81310 - DNA, 276 bp, Saccharomyces pastorianus
atgaccgctttgttcacgttcttgtatctaaggtttacctcgcctcaatacaattcgaacggcgcttacaacggcgccctaatggcattctcatttgttattgctttacagatttgcaacattgcaacagaagccattagatccggtactgcaactttctttgttgctcttggtaataacccggaggtcttccatcattcttaccctcataggtttgatgagatttttagggcatatcctgatgtactcagaaaattgagtcaccagaatgtgtga

SEQ ID NO: 81311 - DNA, 1347 bp, Saccharomyces pastorianus
atgccattgaatgaaaaatacgagaggcctccacaacctcctccagcatatgatcccaatcataggccgcccagttcttccgagaactctgccgcggcgaatgtcaacgatggccagacgccgtaccattttagacaggatcaatattacaatctaaattccaaaacgagtggggctcctatagggagcttcgacgaggcctttcctactgaaaatgacaacaagcccaggtggaacgattggccatttaccatttttttcctatgcacggtaggcggattcatcgccattgctgccataaccttaagagcgtggtcccaaacctatagcagtacgggttccggaatatacgatggtgtgaatactggtacgctgaacaccaatgctgccatcctgctagttttcgtgtgcattattgccctggtattctccgttttgggcctcacactttgtcgaatttttccgaagcagtttatatattgcggtatggtcatcaacctagtggcttctcttgggactgccatcatgtacatgtctttgaggtactggtctgcaggtattgtgtttttagtcttcacgttcatgaccgcgtggtgctactggggtatgaggtctagaattcccctttctgtggcggtattgaaagtcgtcgtcgatgccatgaagaaatgcccacagatcttctttgtttcatttgttggagcgctagttgctagtgcgtttgggtttctcttctcagcagtcattgtggctacgtacataaagtacgatcctaatagctcgaatggcggctgtgacgtttctggtggcagctgttcgcattccaaattgattggtgttttggttgtggtttttttctgcggctattatatctctgaagtaataagaaacgtcatacattgtgttatttctggcgtctttggcagctggtattatatgtcaaagtctgaccaaggaatgccaaggtggcccgcatttggagcattgaagagagccatgacttactcgttcggttccatttgctttgggtccttgctagtcgctttgatcgacctgttgagacaaatattacaaatgatcagacacgatgttacctccagcggtggcggtcaaattgccatccagattttgtttatggtgtttgactggattatcggctttctgaagtggctcgccgagtatttcaatcattatgcatactcgttcatcgctctttatggtaaaccgtatttaagagcggccaaagaaacctggtatatgttaagagaaaagggaatggacgccctaatcaatgataatttaattaacattgcactgggtctattttcaatgttgctagttatatga

SEQ ID NO: 81312 - DNA, 648 bp, Saccharomyces pastorianus
atggcgttatcaatgaacctcacggcagggcttttttccaaaacattggtgtttttttgttctctgatctactttaagttgacgcttttcgaaaatggactatgtctatccaacgatatggaagttggatggtcggatttgacgaaattgactgttcctttagacaaggatctatctttaggtacagcaatgagcttgtactcgtcaatcttcgatcgcttgttcacggccggaaataaagaattaatacgcacaatgcatagatcatcacaatttgtgatagagctagctattgaaaggacctataggactattcttggcaacgttattgaattcagaaagttgaccgaggaaacatggctagcacaaatcaaacaagaactagatccgcagagcgataatccatcatcagaagctaaaattgtgagtgataggcagcgggatctcagccttgcagttccaacgcccacgccctcaataattccaatgtcaccctcgcctggtgaaactaagaaccatgcaaagagtcaatcagagatcattcagatgctgacagatgaattttgggcaaattataactcaggctgggaagagttgcttaatcaatctgaattttccactcttttcgatgattacaaagacaattaa

SEQ ID NO: 81313 - DNA, 1704 bp, Saccharomyces pastorianus
atgaaaagaagaagcgatgctttgttgggaagtttccaggccaccaacgttacgccgccaagcgataatagtaatagtacggccggtggagccaatggaagtaactcaggaacaccaacttctactagcggtaagaagagaaacaagcttataaaatcttgtggcttttgcagaaggagaaaacttcgttgtgatcagcaaaaacctatgtgttctacatgcatttctagaaacttaacaacctgtcaatatgctgaagaattcaacaaaaacatcgaaaagaaagctacctatggtccctatcctaacgccgatttacttaagaaagttgaagaactagaaaacaaaatacgtattctagaagctgaaaaaaacactaattcgtctgcgagctccatgtacacttcgccaaatttccctcctttaggcactagtgtaggtagaggttctactgaaacttcatctccattacccgatagtgtaataaatccatatgccgaccggtactacctacaaagtaaacattccggaagatcaacactatacggccccacttctatgagaacccaaattgcaaatagtaattgggggttcattgaaaaatataaacaattatgggcgaaggttaaagtagaaagaaataaatggaagcaaaacaaccaaaaaacgatgtgcagggaactaggccttttggatgagtcggattggcagccagatccattaatcaaacagatatgtcgtttcctaccatcatataacaaaattttgtctattttagatgatttctttaatgatggagcatgcaatgagatcaacgtgattcttgataaggcaaaagttagaagagactttttagattatttcatgcccgaaaaagaggtaaaggcggaaggtgacagatccatagtttatattttatccaatccaaagaaaaattattacaaagctgctgtgatactattaatcctatgtctgaaatacttccatacagatgtcccaaccccaattgagaagttctttactttactaaagggggcctccaccgctaaggtgttctacattgagcgtgcacaaatgttaatacttttctactactatcgtgaaacatattcattcggtggagatggctccgatttggttaatataaatgaatgtttagttactacggttactacaatagggttgcatttaaacattagagaaactttcaaggaacatgaggtttttatgggtagcatcgaaagtttagaaaatgtctggttaatggcaatatttatcgattataacatatcttgtaacgttggtagacccttattgattaacaaattttatctagacgaaaaccaagatcattgcatattgaatagtaaaagtaaaacatatgaggggaagctgaaaagatatttaaaacttacaaggccaatgttgttaactctttatgatagagataaattcccggatttgaaagcttattccaagcgaattatcaattttgtagaagaagaacttggcccacttggacattacacaggtgaaaatatatcggaagaagttccattaagggaaagtagaattttaagtatggcagtcggactattattgtcgttttatgcactaatacattctgtgctgaaagtcagaaacatagaatccaaaaataatacgtttcaattggtctatgatcgatttattccatcattgtga

SEQ ID NO: 81314 - DNA, 1254 bp, Saccharomyces pastorianus
atggagaaacgagaagctttaaatacaaagctgaattcacatatttcaggtacaattaatgagttcttgaaatcattaatggaaaagttatgggacgatttaaaattggaggtgtcttctagagacaaagctactacctcttttgtagaaagtgtggcagcaggtaagagtaagattgagaaagaatttaacgaatcaatggagaccttcaaaaagttagggctactaatatcaaacgaagagattacctgcaaattttccgacgatattgaagaaagaatcaagcaactacgtgatgctgaattgaaagcaaaaatcggtcgtattagaaaaaatctggttcccgaattaaaggatcatgtgattcatttactatcacatccatccaaaaaggtttgggatgatataatgaacgattttgaatctactatcaaagacaatatatctgcgtatcaagtggaaaaagataaatatgattttaaaattggactttcagagagcgaaaacgcgaagatttacaaaattattagaatattggcgtggagaaccttggataccacagtacatgactacctgaaaatagatacgattgttagtatattgagagacaggtttgaagatgtattcagatatgatgcagaaggttctccaagattgtggaaaacagaagaagagattgatggggcattccgtgttgcaaaagaacatgccctggaagtttttgaggttctttcacttgctgtaacctcagataacgttgaaattattcctgatgtaccaatggctgaagaggaaagcggcgaggacaacgaaatatatcgggacaacgaaggtgtgtttcattcccgtcgtttcgcacacatcttgactgaattgcaaaaggagaatgttttagatcaattccgtaggcagattaacattactgttctggattcgaaaaggtctatcatcactactagaacgcatattccaccttggatttacgttttgctagccgtattagggtggaacgaattcgtggctgtcataagaaaccccttatttgtaacccttaccttgatcttaggtgcaaccttttttgttattcataagttcggcctctggggccctgttgttaatgttgttcaaagtgcagttggtgaaacaagaaccgcaataaaggataaactaaggcaatttgtcgttgaagatcatgaagtgaaggaatcttttgaaatgaaagacttctcaaaaaacgagcaaaaagaaaaatga

SEQ ID NO: 81315 - DNA, 1041 bp, Saccharomyces pastorianus
atgactgatagatctgctattcagttgatagatgaagagaaggaatttcatcaaagtgcattacaatattttcaacaatgtattggaaatcgtgatgttggtctagattaccatgtcatctcagttttcggttctcaatcgagtggtaaatcgactttacttaacgtcttgtttaacaccaactttgataccatggatgctcaggtgaaaaggcagcagactactaaaggcatttggttggctcacactaaacaggttaatacaactattgaaatcgataatgatcgtccagatatttttgtgctagatgttgagggctccgatggttcagaaagaggtgaagaccaagattttgagagaaaagccgctttgtttgccattgcagtatctgaagttcttatagttaatatgtgggagcagcaaattgggctatatcaaggtaataatatggctttattaaaaacagtttttgaggtcaatctttccctatttggcaagaatgataatgatcacaaggtgctgttactttttgtaattagagatcatgtaggtgtgactccactctcgagtttgagtgattccgttacgagagaattggaaaaaatatggacagagttaagtaaacctgctggttgtgagggttctagcctgtatgattatttcgatttaaagtttgtcgggctagctcataagttgttgcaagaagacaaatttacccaggatgtcaaaaaattaggtgattcgtttgtgatgaaaggtacggaaaactattatttcaaacctcaatatcaccataggttgccattagatggttggactatgtacgcagaaaattgttgggatcaaattgaacgtaacaaggatttagatcttccaactcagcaaattcttgttgctagattcaaaactgaagaaatatctaatgaagctctagaagagttcatttcaaaatatgatgaatcgattgctcctttaaagggtaacttaggatctttaacatctcagctagtgaagctaaaagaagaatgtctgacaaaatga

SEQ ID NO: 81316 - DNA, 150 bp, Saccharomyces pastorianus
atgttccatgacagattctttataaacgacttcactttctgggttgatgtccttcaagaagccttcaggatgagaagatggattttcagatttgaacaattggttgtaaaccctagtttcagtaactctcaatggagaattatattttga

SEQ ID NO: 81317 - DNA, 414 bp, Saccharomyces pastorianus
atgacggaaccagtacctagagactgggagaaaatggattcagagctaactgataacttaacaatcttttacacagggaaaatgccgtatattgctaaggacaccaaattttttcccgctgctttaccagcggatggtaccattgatttagtcataacggatgcaagaatcccagtgacaagaatgacaccaattttattatccttggataaaggttctcatgtattagagccagaagttattcactcaaaaatattggcttataagattataccaaaagtggagtcaggtttattttcagtggatggtgaaaagtttcctttggaacccttgcaagtggaaataatgcccatgttatgcaagacgttgctaaggaatggtagatatatcgatacagagtttgaatccatgtag

SEQ ID NO: 81318 - DNA, 369 bp, Saccharomyces pastorianus
atgagcatttcatgtcattggacaaataacccatcgtacgccgctctgtgccttgtcaaatccattgaaacaagaatagacttaatgtgttgttcccaaccttcttatatgaacgaatggccaagattatcctttttgagtcagacgtacggcgttattgcagaatctgatattaacactgaattcatcagatggatgggtcccgttaggtttaatttgggtgtagcattcaacattatccaaggtaagaaatatccctgcgaagttttcgtcaaatatgctgccaaatctaaaaaggaattaaaagttcatttcttagaaaataaagataaaaacaaaggatgtttaaccttcgaaccaaatccctag

SEQ ID NO: 81319 - DNA, 597 bp, Saccharomyces pastorianus
  modified_base (530)..(530): a, c, g, t, unknown, or other
atggtggtgcagaaaaaacttagggctatcttgaccgatgaaggtgtattgatcaaatcgcaatcacaccatatgttcaataagcatggtcaactcagaagcggagattctttatccttgttgagctgcttgtcctgtctggatgatggaactttgagctctgatggaggttcttttgatgaggatgattccctggaactgttgcctcttaatactaccattccgttcaacagaattttgaacgcaaaatatgtgaatgtcggtcagaaaggcttcaataatggcaaaatttcttcgaatccttttcaaacggaaaatctgagttcttcgtctgaaaatgacgacgttgagaatcatagtttgagcaatgataaggctcctgtaagcgaatcacagtcatttcccaaaaaagacaagtgggatacaaaaacgaacactgtgaaggtgtctcccgatgattcacaggattactcacccatctttagggattcaagatatcaaacggtaattgagttacttttgctgtaccnagggcctgatgttataccacaaataccttgtaatcaacacgtcttagaaacgagagcaattcgggag

SEQ ID NO: 81320 - DNA, 738 bp, Saccharomyces pastorianus
atgctaaaagatggcgtgaagaaggcagtggccttttctcaatatcctcatttctcttattccactaccgggtcatccatcaacgaattgtggagacagattaaggcattggactccgagagatctatatcttggtcggttattgatcgttggcctacaaatgaaggtctaatcaaggccttctccgaaaatatcaccaaaaaactacaagagtttccgcaacctgtcagagacaaggttgttttattgttttccgcacattctctacccatggatgttgttaacaccggtgatgcctacccagctgaggtagctgcgacggtttacaacatcatgcaaaaattaaagtttaaaaacccttataggttggtttggcaatcccaagttggaccaaaaccatggttgggagcgcagacagctgaaattgcggaatttttaggccccaaagttgatggcctaatgtttattcctatcgcctttacctctgatcatattgaaacattgcatgaaattgacttaggcgtcattggggaatcggaatataaggataaatttaagagatgcgaatctttaaatggcaaccagacctttattgaaggcatggcagatctcgtcaaaagccacttacagagtaaccaactctattctaatcaactacctcttgattttgcacttggcaagtccaatgatcctgtaaaggacctttcattggtatttggcaatcacgaatctacttga

SEQ ID NO: 81321 - DNA, 168 bp, Saccharomyces pastorianus
atgctttccagaacaatccgtacacaaggttccttcctaagaagatcacaactgaccattacaagatcattttcggttacattcaacatgcagaatgcacaaaagagatcacccacaggaattgttttgatgaacatgggtgcccctctaaagttgaggaacatatga

SEQ ID NO: 81322 - DNA, 1302 bp, Saccharomyces pastorianus
atgacaccatctaagccaaatgtaaggtttggtgatgatgatgttaacatttttgatcaaagaaaaaaagtaaatgaaatcaacaagaataacaccgtcataaggtcgatcccatcatcgataagcaccgctattacccccaacaagtctagcttaaagtcaccaaggggaaaaagggcttcgaagaattcttttgataatgaaactaagttagaatcgaaaaatgaaactctgaaagaggtcaatgacgcggttaaccgttgctatgcgctttgtaacattccaactaagcatgtatccataaatagtatttctgatttggcgcagacgttcgaaacgcttgctgtagggataacccatgaaacgaacagaaaagctgagtgtgaacggagcaagaatgcaatagattcactttactaccatgaacagctagaaaaaaaagaacttaatgaaaaaagccttcaaatggcaatcgatcacttgctgaaggtcacaaagcaaaatttgagacaagctgacgatggaaacaaactgaaagaaacagaagcactcaaaagtttcattgaggaaatagaggaagttgacgataataagatttccatcaacagtttacaacaacagttgcttgaagaaaaaacggcaaacaacattttgcgaagggattattataaactccaggaacgtggaaggcgtttatgtcacgagtttcaggagttgcaagatgattattccaaacaaatgaaacaaaaggaatatgaggtgcaaaaactcaagaatgaaattaaagttttattaaacatgaacgataacttaaaggcagagaaggcccattactctcagaaagagaaacaatattttcaaaaatatacctatatagagaaatacatgaatcatgtcaaggaagagtataatagaaaagaggacgaatgcaaaaaattgaactttattattgacaagagcatgaaaaaaatagaacatttggagaggtcgcttcagactcaatttaccgctcaaaacagcttctcaactgcaatgatccaagaggaaggcccgaaagatgcccatttgaaggatcgctatcacaaagtcaaagagtttatggaacaaaagttgcagacttccaaaattaatgacccctcttgttctgaggcagaggcacttgataatgtactttgcttaatcgaaagcagtatgaaaacactggaccaaaatagtaaatgttatccaattgcgacaaaaaagtgcataaagtatgttactgactcaccaagacttaaagaaaatgaacacgttacaaattga

SEQ ID NO: 81323 - DNA, 87 bp, Saccharomyces pastorianus
atgccagaagatacaagctatagcaactccttcgaggagtattacaacgattctcacgcgatttccccttacaaggattcattttaa

SEQ ID NO: 81324 - DNA, 303 bp, Saccharomyces pastorianus
atgattttcagtacaccagttctgtttaaagaattgataggaactattattacaaaaaattatcaactgacaaatactgaaacatttaatgaaaaagttcttcaggacataaagcagaatttagaaggcctttatccgaaaagtgtactaggtatgaaagaattgttacacagtgaaatgaaacagaagcttatcaaagcacaagcaatggagactaacggaaccttgcctttttgggcaagtggcgagccattcaaaagatttaaacagcttcaagagggaaacaggcgccacaagttataa

SEQ ID NO: 81325 - DNA, 195 bp, Saccharomyces pastorianus
atgagcagtcgtgtgtgctaccatattaatggtccctttttcataatcaaattaattgatccaaaacttttgaactctttaactttcgaggattttgtatacattgcactattactgcataaggcaaacgatattgattctgtcttgtatactagttctacaaagctcaggcaagtatttctcctcgggaggtaa

SEQ ID NO: 81326 - DNA, 222 bp, Saccharomyces pastorianus
atgaaaaatttttttttttcaaattctcctcaggctaaagttcacggttctctagctcgtgctggtaaagttaagtctcaaactccaaaggttgaaaaaactgaaaagccaaagaaaccaaagggtcgtgcttacaagagattattgtacaccagaagattcgtcaacgttaccttggttaacggtaagagaagaatgaacccaggtccatctgtccaatag

SEQ ID NO: 81327 - DNA, 255 bp, Saccharomyces pastorianus
atgctatgtataacgcaaccaagcaattttcgaaactcaatttggcttataaatgttcgagataaaatgcgaattacgtgttcaacgtcgtcgagatcagttattttttttcaccgccacagtgcgggtaagcaatttttcgcgtaccaccaccattacacatgtataatatatataggcttattatgtgtgtttgtgctactttatatgacggttatttacaagttagaatattatctattaacaatgcagtag

SEQ ID NO: 81328 - DNA, 585 bp, Saccharomyces pastorianus
atggcagatcaattgaccgatttcctgatcatgcaaaactttagagctaccgccattcatggtgaccgtacccaatctgagagagaacgtgccttggccgccttcagatctggtgccgctactttattggttgccacagctgtcgcagctagaggtctagatattccaaacgtcacccacgttatcaactacgatttaccaagtgatgtcgatgattacgtccatagaattggtagaactggtcgtgccggtaacaccggtcttgccactgcctttttcaacagtgaaaacagtaacattgttaaaggtttgcatgaaattttgactgaagctaaccaagaagtcccatcattcttgaaggacgctatgatgagtgctccaggtagcagaagcaacagccgtagaggcggtttcggtcgcaacaacaacagagattaccgtaaggccggaggcgctagcgcaggcggctggggctcttcaagaagcagagataactctttcagaggcggtagtggctggggtagcgattccaagtcttctggctggggtaacagcggtggttcaaacaactcttcttggtggtga

SEQ ID NO: 81329 - DNA, 1446 bp, Saccharomyces pastorianus
  modified_base (58)..(112): a, c, g, t, unknown, or other
atgcctgctgacttagcacctaacgacacgattttaccgaattggctaaaattctgcnnnnnnnnnnnnnnnnnnnnnnnnnnnnnnnnnnnnnnnnnnnnnnnnnnnnnnnctttagaaaattttgaaatgcaaagattagagaaatgcctgaaattcaagaaaaagcctttacatcaaaagcagctatcacaaaagcagaggggtccgcaatccacggatgattcaaaattatattctttaactagtttgcaacgacagtataaaagttctttgaaaagcaacatacagaaaaatcaaaagctaaaattaattataccaaaaaacaacacatcttcttcgccatcaccattatcttccgatgatactataatgacaccaataaatgattacgaacttactgaaggaattcagtcttttactaagaatagatattctaatatcttaccttacgaacattcaagagtaaagttacctcactccccgaaaccacctgcagtttctgaagcatccacaaccgaaactaaaacagataagtcatatccgatgtgtcccgtagatgcaaaaaaccactcctgcaaaccgaacgactatatcaatgcgaactatttgaagctcacgcaaattaatcctgatttcaagtatattgctacccaagctccgcttccttctacgatggatgatttttggaaggttattactttaaataaagttaaagtaataatatcattgaattctgacgatgaattgaatttaagaaaatgggatatttactggaataatctgtcatattccaaccacactatcaaacttcagaacacctgggagaatatttgcaatattaatggctgtgttctcagagtctttcaagtcaagaaaacagctccacaaaatgataatatcagtcaagattgtgaccttccgcataatggtgaccttacttccactaccatggctgtatccgagccgtttattgtttaccaattacaatacaagaattggttagattcatgcggcgtagatatgaatgacatcattaaactacacaaagtcaaaaattcgttattgtttaacccgcaaagttttattacaagcctcgaaaaggatgtttgcaagcctgatttgatagatgataataatagtgatttacatctcgatacagcaaattcatcgccactattagtccattgttctgcagggtgtggaagaacaggtgttttcgttaccttggatttcctactaagtattctttcacctacaacaaatcactcaaacaagattgatgtttggaatatgactcaggaccttatctttatcatagtgaatgaattaagaaagcaaaggatttcaatggtacagaatctaactcaatatatcgcttgttatgaggcattattaaattattttgccctgcaaaagcagataaagaacgcgttaccttgttaa

SEQ ID NO: 81330 - DNA, 255 bp, Saccharomyces pastorianus
atggatcgcatagcacagcaatatggtagtggcaaaagagacaataacggcaatagaatggcttcttccgctatatcggaaaagggccacatacaagtcaatcaaactagaacacctggtcaaatgcccgtctatagaggtgaaactataaatctgtctaaccttccccaaaatcaaattaaaccgtgcaaagatttggacgacgttaacatacggcggacaactctaataggcattctaaaatacttttactag

SEQ ID NO: 81331 - DNA, 303 bp, Saccharomyces pastorianus
atgtctcttcgtatagccgatttgccctggattaaaagccttgcgcttatagatgaggatatgatgacagacgtggttcagatgatattgaatgatcctgcagtacagagagcaattgaaaatcatcccaggagggagcagttttttatgtttataacacaactaccagatgatttgttaatgaaaattcaggcatttttgaaattaccgaacaaaaattccactaaacaagaaaggacaaattttgggtcagacgcgacacataaggacgagccagtgaaggctcataacaagctaaagtag

SEQ ID NO: 81332 - DNA, 378 bp, Saccharomyces pastorianus
atggctgtcgcgccagtaacaaactggacattgtatgattccgtttacacggaaagatatatgaaccaaccatcggaaaaccatgaaggctattttgaagtatccaccatccaaaatttcaaatcattcgaatctttaaagcgtcttttcattgtgcacggaactttcgatgataatgttcacatacaaaatacttttagattagttgatcaactgaatctattgggattgacgaactatgacatgcacatttttccagactctgatcattccatccggtaccacaacgctcaaagaattgtattccaaaaactatactattggttaagggatgcctttgctgaacgctttgacaacactgaagttttgcatttataa

SEQ ID NO: 81333 - DNA, 2112 bp, Saccharomyces pastorianus
atgtctacttcaactcattcgcataaaaggaagaatagtcatttatttccgcaaaggaaaagttcaaactcttccatggataagccattctttcctaataacgatagtgtagctaacacagatcctcaaagtaacgagaatggacatacaattaacgagattagaccgacagaagctacaatagatgttacagatgttcctcaaaccccctttctccaggaacaatactcaatgcgtcccagacgagaaagcttccagtttaatgatattgaaaaccagcatcacacgcattcctttttcagtgtaaacaaatttaatcgtcgatggggagaatggtctctgcccgagaaaagatcttatgtcttagtctttacattaatagcactatcagttttagttctacttgttattctaataccttcaaaacttctacctaccaaaatcacgcgtcctaagacatctgcaggagattctagtttgggcaaaagatctttctcaattgaaaacgttttgaacggagattttgccatccctgaggatactttccactttcttgacccaccacagcgcttattaggccaagactcagatccggggctatattttactacaaaagaaattgatggacatacgcattttattgcaaagcagttatttgatgagacttttgaagtaaaccttggcggcaataggttcctatatgaaggagtagaatttaccgtaagcactgtccaaattaattataaattggataaacttatatttggaactaacttagagtctgagtttagacactcctcgaaggggttttattggatcaaagacttaaacacaggtaatattgaaccgatattacctcccgaaaaatcagatgataattatgaacttggattatcaaaactttcctatgcgcatttttctcctgcatacaattatatctattttgtttacgagaacaatctgtttttgcaacaagtaaatagcggagttgccaagaaggtaacggaagatggctccaaggatatattcaatgccaaaccagactggatatatgaagaagaggtccttgcttctgatcaagcaatatggtgggctccagacgattcgaaggctgtatttgcaagattcaatgacaccagtgttgacgatatccgattaaaccgttacacaaatatgaacgaagcatacctttccgacaccaaaatcaaatacccgaagccagggttccaaaatccacagttcgacttgtttctcgttaacttacagaacggtataatttactcaattaatactggtggtcagaaggattccattctgtataacggaaaatggattagtccagatacattcaggttcgaaatcaccgatagaaactctaagatattagacgtaaaagtgtatgatataccatcatctcaaatgcttactgtgaggaacaccaattcaaacctgttcaacggatggatcgaaaagacgaaggatattttaagcatccccccaaagccagagttgaaaagaatggattatgggtacattgatattcatgcagacagtagagggttcagtcatctcttttattacccaaccgtttttgccaaagagcctatccagttgaccaaagggaactgggaagtgactggaaatggaatagtcggctacgaatatgaaacagatactatattttttactgccaatgagattggtgtcatgtcacaacacctttatagtatcagccttacggattctacaactcagaatactttccaaagtttacaaaacccatcagacaaatacgatttttatgacttcgaattaagttctagtgcgagatatgctatttctaaaaaactggggcctgatacacctattaaagtagctggtccgcttacaagggttttgaacgttgccgaaattcacgatgattcaatcttgcaactgacgaaggatgaaaagttcaaggaaaaaataaagaactacgatttacctatcacaagctataaaaccatggtcctagacgatggcgtagaaataaattacattgagatcaaaccagcaattaatcctaagaaaaataccgatataagcactttatgggcgcaggactcaaaatta

SEQ ID NO: 81334 - DNA, 1083 bp, Saccharomyces pastorianus
atgaagctactaaccttcccaggtcaagggacctccatctccatttcgatattaaaagcgataataagaaacaaatcaagagaattccaaacaatactgagtcagaacggcaaggaatcaaatgatctattgcagtacatcttccagaacccttccagccccggaagcattgcagtctgctccaaccttttctatcaattgtaccagatactctcgaatccttctgatcctcaagatcaaacaccaaaaaatatgactaagatcgatgcccccgacaagaaagacaatgaacaatgttaccttttcggtcactcgctaggcgagttaacatgtctgagtgttaattcactgttttcgttaaaggatctttttgatattgctaattttagaaataagttaatggtaacatctactgaaaagtacttagtagcccacaatatcaacagatccaacaaatttgaaatgtgggcactctcttctccgagggccacagatttaccgcaagaagtgcaaaaactactaaattcccctaatttattatcatcttcacaaaataccatttctgtagcaaatgcaaattcagtaaagcaatgtgtagtcaccggtctagttgatgatttagagtccttaagaacagaattgaacctaaggttcccgcgtttaagaattacagaattaactaacccatacaacatccccttccataatagcactgtgttgaggcccgttcaggaaccactctatgactacatttgggatatattaaagaaaaacggaactcacacgttgatggagttgaaccatccaataatagctaacttagatggtaacatatcttactatattcatcatgccctagatagattcgttaagtgttcaagcaggactgtgcaattcaccatgtgttatgataccataaactctggaaccccagtggaaattgataagagtatttgctttggcccgggcaatgtgatttataatcttattcggagaaattgtccccaagtggacactatagaatacacctctttagcaactatagacgcttatcacaaggcggcagaggagaacaaagattga

SEQ ID NO: 81335 - DNA, 204 bp, Saccharomyces pastorianus
atgcttgtcttgagaaagttggaagaaaattataggcccttaaatatactcaaaatgcagaaagtgtcatcttcttacatggcatcttttggccgtatgacaaggcgcatttcaacctccgatggaggaagtaaactgagtatcgaactcaaggataaaacaaagcttaccagtaacttgctgcatattagaactattcaataa

SEQ ID NO: 81336 - DNA, 96 bp, Saccharomyces pastorianus
atgaagtttgatggattgttcaacagacggcaaaaaatggcgatttttgccggtgtgattgttaatgttatgttttgtcttgtgagaggtttttag

SEQ ID NO: 81337 - DNA, 153 bp, Saccharomyces pastorianus
atgtatggtaccgcttacaagtttgaggaagtaagcaaggatctaattgccgtttactactcattcggtggcctcttaatgagattagaaggtaactatagaaatttgaataacttgaagcaagagaacgcttatcttttgattcgtcgttag

SEQ ID NO: 81338 - DNA, 783 bp, Saccharomyces pastorianus
atggatacggtagtaaagtcacaaagtaacggctacgaggaggacagcatcttgaaaatcatcgacaactccgatagaccgggagatatattacgtacagtgcacgttccagggaccaacgtgactcactcagttagattttttaacaaccatttatttgcatcttgttcagatgacaacattttaagattctgggacacaagaacagcggacaaaccgctttggacgctaagcgaaccgaaaaatggacgactaacgtccttcgattcctctcaagttactgaaaacctatttgtcactgggttcagcacgggtgtcatcaagctatgggatgcgcgtgctgtgcaactggctactactgacctcacacataggcagaacggcgaggaaccgatccaaaacgaaatagccaagttgttccattctggcggcgattccgttgtcgatatcctgttctcacaaacctctgcaacagaatttgttacggttggaggaacgggtaatgtctaccactgggacatggagtactctttttcaagaaacgacgatgacaacgaagacgaagttcgagtggctgctccggaggaacttcagggtcaatgtttaaaatttttccacacaggtggcacaagaagatcgagcaacccattcgggaagaggaacactgtggcgctacaccccgtaatcaatgattttgttggcactgttgattcagatagtcttgttactgcctacaaaccatttctggccagtgacttcattggcagaggttacgacgattaa

SEQ ID NO: 81339 - DNA, 609 bp, Saccharomyces pastorianus
atggcgaaaagcaaatccaatcagggtgcgagtggagcacgccataaaccggcaccttctttataccaacacatttctagctttaaaccacaattcagcacaagagtcgacgatgttttacattttagcaagacactgacatggagaagtgagattattccagacaaatccaagggcaccttgacgactagtcttttatattctcaaggtagtgatatttacgaaatagacactactttaccattaaagacattctatgacgacgacgacgacgacgacaacgacgacgacgacgaagaaggtaacggcaagacgaagtctgcagccaccccaaatccagagtatggtgatgctttccaagatgttgaggggaaaccattgcgcccaaagtggatttaccagggcgaaacagtggcaaaaatgcaatacttggaaagctcagacgacagtacggcgatcgcgatgtccaagaacggctctttggcatggttcagagatgagatcaaggttcccgttcatatcgtacaggaaatgatgggccctgctactagatactctagtattcactctctaaccagaccaggttcatttagcagtgtcagattttga

SEQ ID NO: 81340 - DNA, 225 bp, Saccharomyces pastorianus
atgacaagagatgtttttgaaaacaccctaagaaagcacggtattgaaaaattagacccattgggagaaccatttgatccaaataaacacgaagcaacgttcgagttgccacaacctgataaggaaccgggtactgttttccatgtacaacaattaggtttcaccttgaatgacagagttatcagaccagcaaaagtcggaattgttaagggcgaagagaactaa

SEQ ID NO: 81341 - DNA, 279 bp, Saccharomyces pastorianus
atgagagctttttcagcagccaccgttagggccacaactaggaagtcgttcatcccaatggcaccaagaactccttttgtgactccatcatttacaaagagtgtaggctcaatgagaagaatgagattttattctgatgaagccaaaagtgaagaatccaaagaaaacaatgaagatttgactgaagagcaatcagaaatcaagaaattagagagccagttaagcgcgaagactaaagaagcttctgaactcaaggacagattatcaagatctgtggca

SEQ ID NO: 81342 - DNA, 126 bp, Saccharomyces pastorianus
atgtggggcaaagtcaccagaactcacggtaactctggtgtcgttagagctacctttagaaacaacttgccagccaagactttcggtgcctctgtcagaattttcttgtacccatctaacatttaa

SEQ ID NO: 81343 - DNA, 1062 bp, Saccharomyces pastorianus
atgttggcggttgttaggtggtttatttctactttgagatctcaatactgctctagaagcgaatcgatgggttctgaaaagaagcctttgaacccattcttgggtgaggtatttgttggaaagtggaaaaatgatgagcatccagagtttggtgaaacggttcttttaagtgagcaagtttcacatcatccacctatgacagcattttcgatttttaatgaaaaaaatgatgtttctcttcaaggatacaatcaaattaaaactggttttaccaaaacattgacgctaacggtcaaaccatacgggcatgtcattttgaagattaaagatgagacctacctgattacaaccccgcctttgcatatcgaaggtattttagtcgcttctccatttgttgaattaggaggcaggtcattcatacagtcatcaaatggtatgttatgtgttatagaattttcaggaagggggtatttcacagggaagaagaactcctttaaggcaagaatttacagaagcccacaagagcatagtcataaagaaaatgcgctatacctaatctctggccaatggtcaggtgtttcaacaattataaaaaaagactcgcaagtttcacatcagttttacgattcatcggaaactcctactgaacatttattagttaagccaatcgaagaacaacatcctctggaaagtaggagggcatggaaggatgtggcagaagcaatcagacaaggaaatattagtatgataaaaaagactaaggaagaactagaaaataagcaaagagccttgagagaacaagaacgcgtgaaaggtgtggaatggcaaagaagatggttcaaacaagtggactacatgaatgaaaatacatcaaatgatgtagagaaagcaagtgaagatgatgcctttaggaaattggcgtccaaactgcagctttctgtgaaaaatgtgccaagtgggacattgattggcggcaaagatgataagaaagatgtttcaaccgcattgcattggaggtttgataaaaatttgtggatgagggagaacgaaattactatataa

SEQ ID NO: 81344 - DNA, 1089 bp, Saccharomyces pastorianus
atgatttggaagttgttggtgactcttgtcttaggcattgatcaacagcataatagggagcatttgaaagcgttaactcaggacgttaaagaagagacgttagagaatattgcgcacgagggcagaggtgataacacaggcgatcagaatgcagtagaaaaatcagatttcgaaaaatcagatacagaaggttcaagaataggccgcgacttaccctttgaatttggaaaacgtaacttgaccgaggaatcagacgtttgggatcataacgcttgggataatgttgagtggggtgaagaacaagtccagcaggcggaggaaaaaatcaaagagcagtttaagcatcctgtacctgagtttgacaaaaaactatacaatgaaaatccggcacgttattgggacattttttataaaaacaacaaggaaaactttttcaaggacagaaagtggttacaaattgaatttccaatcttatacgcatctaccagaaaagacgcagaacccgttacaatatttgaaattggctgtggggcaggtaacacttttttcccgatcttgaaagataatgagaacgaaaacttgaggataatagccacagattttgctccaagagccgtcgaattagttaaaaattctgaacagttcaaccccaagtacggccacgcaacagtatgggatttggccaatcctgacggtaatttacctgatggcgtcgaacctcattctgtggatattgcagtaatgatcttcgtttttagtgctttagcaccaaaccaatgggatcaagccatggataaccttcacaaaattttgaaaccaggcggtaagatcatatttcgtgattacggtgcatatgatttaactcaagttagattcaaaaagaacagaatcctagaagagaacttctacgttagaggtgatggtacaagagtttattttttctctgaagaaaaactaagagaaattttcacgaaaaagtacttcttggaaaataaaattggaactgatagaaggttgttggttaacagaaaaaggcaactaaaaatgtaccgctgctgggtacaagctgtgtttgacgttcctcaatag

SEQ ID NO: 81345 - DNA, 840 bp, Saccharomyces pastorianus
atgggtgtcgcagatttgatcaagaaattcgaaagcatctcaaaggaagaaggcgatgctaccgttgatacaaacagttcatcaaagcctctcaaatcaaacgatgaaaccaaagaattgcatcaacaagagtctactgctgttccgcaagaggttgacgtaaatgaagagtttgagaatgaaccagaaacaactaacagtagtagaactgctgagaaaccattggaaacaaacctcccaaaacctgaaactaacaaagaagacgaagaagagggctccatcagcgagaataaactagattctaaaagtgaaaatgctgacatcaacgttaatgattttcaagaatctaaagaaatggaaaatactggcgctgaagttcttgcaagtagtgttgaggaatccgatgctattcaagaaggtgtggctgaggaaactgaagggattgctactcctaaacaaaaagaaaacgaaaaaaatgatgaatcagaagaagaatctgcaaataatgcatctgaaccagccgaagaatattctcaatctgaagaagatgctgacatcgagcaatctaatggcaaagaaactgaaaatgccgaaaacgcttctcaacaagctaatgatggctctacaagtaccacgacttctaagaataagaagaaaaaaaacaaaaaaaaaaacaagaagaagagaaatggaaatgttaacaccaacgctaatgtcgacgacagcaccaaaaccggtgaaaatgatgatacaaccggcgacaccacgtcatcaacaacctccgccattcaagaagtgaatgatttggaagttgttggtgactcttgtcttaggcattga

SEQ ID NO: 81346 - DNA, 117 bp, Saccharomyces pastorianus
  modified_base (38)..(60): a, c, g, t, unknown, or other
atgagagctatggaagaatacgaacaaaagggctcatnnnnnnnnnnnnnnnnnnnnnnnacatggacaatatggtacgggaaagatattacagaccagccttgcattgacttgtag

SEQ ID NO: 81347 - DNA, 1599 bp, Saccharomyces pastorianus
atggaaacggcaaaaaaattcgaagataaatctgttagaactaaaattcaccaactgttacgtgaggcatttaaaaatgaattagaatctgtgactactgatactaacacttttaagattgcaagatcaaatagaaattcaagaaccaataaacaagagaaaattaaccaaaccagggacgctaacggtgtagaaaattggggatatggccccagtaaagattttattcacttcactctacataaagaaaataaggatactatggaagctgtcaatgttataacaaagttgttaagagttccaagccgtgtgattagatatgcaggtactaaggatcgtagagcagtaacgtgccaaagggtttcgatttcaaagattggtttggatagactaaatgctttaaataagactttaaaaggaatgattatcggaaattacaatttttcgaatgcaagtttgaatctgggagacttgaagggaaatgagttcgttgttgttattagagatgttaccaccggcaatagtgaggtatcactggaagaaattgtgtctaacggctgtaagtctttatcagaaaatgggtttatcaattattttggtatgcagagattcggtacattcagtatttctacgcacacaattggtagagaattgctcctttcaaactggaagaaggctgctgagttgattttatctgaccaggataacgtgcttcctaaatctaaggaagctaggaagatttgggcagaaactaaggacgcggctttagcattgaagcagatgccaagacagtgtctcgcagaaaatgcgttgctatattctttatctaatcaaagaaaagaagaagatggaacttattctgagaacgcttattatactgctattatgaaaattcccagaaatttgagaactatgtatgtacatgcctaccaaagttacgtctggaattctattgctagtaagcggatagaactacatggtttgaagttagttgtaggtgaccttgtcattgatactagtgaaaagtcaccactaatttctgggattgacgatgaagactttgatgaagatgtccgtgaagctcagttcattcgtgcaaaagcagtaactcaagaggatatcgactcaggtaagtataccatggaagatgtcgtgttaccatcgccgggttttgatgtgctttatccttccaacgaagaattgaagcaactgtatgtggatatattgaaagcagataatatggacccatttaatatgagaagaaaagttcgcgatttttcattggctggctcttatagaactgttattcaaaagccaaagagtttagagtatagaataattcactatgatgatccttctcaacaattggtgaacactgatttggacatcctgaataacaccagagcaaaagaaagcggccagaagtatatgaaagccaagttggacagatatatgccagataaaggcggtgagaagactgcggtggtgttaaaatttcaattaggaacctccgcatatgccaccatggcattacgtgaactcatgaagcttgagacttctcgccgtggcgacatgtgtgatgttaaggagaatatctaa

SEQ ID NO: 81348 - DNA, 411 bp, Saccharomyces pastorianus
atgtctgactcctcagaagccactgtaaagagaccccttgatgctcacgtaggaccttccgaaaatgctgcaaagaagttgaaaattgagcaacgtactcaggcagatggtattcacgaagcagatgtcggtattactttgttcttatctccagaattgccaggatttagaggccaaattaagcagcgttatactgactttttggtcaacgaaatagatcaagaaggtaaggtcattcacttaactgataaaggatttaaaatgccaaagaaaccacaacgctctaaagaagaggtcaatgcagaaaaggagtctgaagcagctagaagacaagaattcaacgtcgaccccgaattaagacatcaattggtggagatatttggtgaggaagatgtattgaaaatagaatcc

SEQ ID NO: 81349 - DNA, 267 bp, Saccharomyces pastorianus
atggttcaaagaaaactttggttttaccattcccattttttctacgcaagaggattattcaattacgatttcggtttgttgccatttagagcgcctatcaatgttgttgttggaaggcctatatacgttgaaaagaaaataacaaatccgccagatgatgttgttaatcatttccatgatttgtatattgcggagttgaaaagactatattacgaaaatagagaaaaatatggggtaccggatgcagaattgaagatagttgggtaa

SEQ ID NO: 81350 - DNA, 1134 bp, Saccharomyces pastorianus
atgtcaggaacattcaatgatataagaagaaggaagaaggaagaaggaagccctacagccggtattaccgaaaggcatgagaataagtctttgtcaagcatcgataaaagagaacagactctcaaaccacaactagagtcatgctgtccattggcgaccccttttgaaagaaggttacaaactctggctgtggcatggcacacttcttcatttgtactcttctccatatttacgttatttgcaatctcgacaccagcactgtgggttcttgctattccatatatgatttatttttttttcgacaggtctcctgcaactggcgaagtggtaaatcgatactctcttcgatttcgttcattgcccatttggaagtggtattgtgattatttccctataagtttgattaaaactgtcaatttaaaaccaacttttacgctttcaaaaaacaagagagttaacgaaaaaatttacaagattagattgtggccaactaagtattccattaatctcaaaagcaactctactattgactatcgcaaccaggaatgtacagggccaacgtacttatttggttaccatccacacggcataggagcacttggtgcgtttggagcgtttgcaacagaaggttgtaactattccaagattttcccaggtattcctatttctctgatgacactggtcacacaatttcatatcccattgtatagagactacttattggcgttaggtatttcttcagtatctcggaaaaacgctttaaggactctaagcaaaaatcagtcgatctgcattgttgttggtggcgctagggaatctttattaagttcaacaaatgttacacaactgattttaaacaaaagaaagggttttattaaactggccattcaaacggggaatattaacctagtgcctgtgtttgcatttggagaggtggactgttataatgttctgagcacaaaaaaagattcagtcctgggtaaaatgcaactatggttcaaagaaaactttggttttaccattcccattttttctacgcaagaggattattcaattacgatttcggtttgttgccatttagagcgcctatcaatgttgttgttggaaggcctatatacgttgaaaagaaaataa

SEQ ID NO: 81351 - DNA, 129 bp, Saccharomyces pastorianus
atggaggcagagtgcttgatcagctgtaacctatcaaccattctagaattcccatttgtaaggaagaagacagatgagcttttggaatctcttagtgttgaaggggatagggatgttcaaatgacttga

SEQ ID NO: 81352 - DNA, 1725 bp, Saccharomyces pastorianus
atgagtaagtatggtccattggatattactaactttattactccgtacgatctatgcatattaatcctaatacatgctcactgctcacaagataatggcatatcagtgccaacagcagtatttcttcggttaatatctcctactagaccttcactagaatggaatcctctgctcaaggataatagtaatttaagatcttcatctgttgttcctcctcctgtacttcctattctagataatataataaggatactgttagatgacaaggatggtaacaaaatagctctgacattaatgggctatttggaagcaattaatggactggattcaatcaacagactaatgatggatttagaaaagaactgtttggttaataattacaggtcaatgaaaatgcgtacaacatcaacaagaagacaaatgacaagagcgagttttttaggaacatttttgtcaacttgtatacgcaagtatcaaattggtgattttgaaatgagggagacaatctggattaatctacaaaatttcaaaactgtatttaagcatactccgctatggctacgatttaaagataacattcatattcaaaaggtaaaaaactgtcttctggctaacgacgagatctcggtggaggatcaacagatggtggaatttttccaacacttcaataatggtaatgacgctgattcaaaaacaatgaacgaagaaaattatgggacattgatttccatccaacatttacaatcaatagttaatcgacaaattgtgaattggttagataatacagaatttaatctgatgggtcaagaagaaactagttccacatatgaagaacaatgcggactagtttttgatttgctagatacgctttcattgaacgatgccacaaaattccctttgatttttatattaaagtatctcgaagctataaaagagaacagttatcaaaccgcactagattctctacataactattttgattacaagtccacgggcaattctcaaaattacttccatatctccttgttgtcccttgccaccttccactcaagtttcaatgagtgtgatgcagcgataaattcttttgaggaagccacgagaatcgcaagggaaaataaagatatggaaacgttgaatttgataatgatatggataataaacttcatagaggtgcacccggaatatgcaaacagattttatatcacagtagaacaaataataaaatatctgaaaaatagttcagatgtagaagatgccaatattttcagtaacgcctacaagtttgaaacattgttatctatggtcaaagaatcgaaaactgctgaagtttctagttcacttctgaaattcatggctatcactttgcagaacgtgccttctcaaaactttgatcttttccaaagtcttgttagctatgaagtaaaattttggaaagaactgggatacgaatccatatccgatgtatatgagaaattcctgtctaaaacatcctcttcctctttaaggaactacgactcttctattatcaaccaagatataaaggtagctttcaaggcacttgaagaagacgattttttaaaagtaaaacaataccttttgaaatcagaatcactgaaactagactacgaccaaaaaataaatttgaaatatttaagagtgaagtatctcgttaaaataggtgactatgacctaagcatgcgattaatcaaccaatatgtcagggat

SEQ ID NO: 81353 - DNA, 537 bp, Saccharomyces pastorianus
atgccggttactaaatctttatcaaagctgcaaaagaacttatccaagaaagggaaaaatatcacggttcatccgaagggtagaaagtatgaaaagctggtcagggctactatgcgtgaagataaaatcgcagccaaaaagaagcttcatcaagacaaaagagtccacgaactagctcgggtaaaatttatgcaggatgtagttaactctgatacattcaaagggcaaccaatatttgatcacgcccacacaagagagtttattcaaagttttattgaaagagatgatacggaattagacgaactcaagaagaagaggaggtcaaacaggccaccaagcaatagacaagtgctactgcaacaaaggagggatcaagagttaaaagaatttaaggcggggtttctctgtccagacttgagtgatgcgaagaatatggaatttctaagaaactggaatggcacttttggccttttgaatactctaagattgatcagaattaatgataaaggtgaacaagtcgttggaggaaatgaataa

SEQ ID NO: 81354 - DNA, 786 bp, Saccharomyces pastorianus
atgaatgaaatgtgtaaaaagattaatgccaaggaaaaactcattggatggtatcatagtggtcctaaattaagggcttctgaccttaagattaacgagctgtttaaaaaatatactcagaataatccgctattattaattgttgatgtcaaacaacaaggtgttggtttaccaacagatgcatatgtcgcgattgagcaagttaaggatgatggtacgtctacagaaaagacgtttctacatttgccttgtactattgaggccgaagaagctgaagaaattggtgtagaacacttattgagagacgtacgtgatcaagcagcaggtggcttatctatccggttgaccaaccaattaaaatctttgaaaggattacaaagtaaactaaaagacgttgtcgagtacttagacaaagtcattaataaggaattaccgataaaccacactatattgggcaagctacaagatgttttcaaccttttaccaaatctcggaacacctgatgatgacgaaatagatgtggagaatcacgacagaattaatatttcaaataacttacaaaaggctttaactgtgaaaactaatgatgaattaatgattatatatataagcaatttggttaggtcaattatcgcgtttgatgatttgattgaaaacaaaattcaaaataaaaaaattcaagaacaaagagtaaaggacaaacaatcaaaagtctctgatgacagtgagagtggtgacaaagaagcaactgcgccattgatccaacaaaagaacaagaaaaattaa

SEQ ID NO: 81355 - DNA, 765 bp, Saccharomyces pastorianus
atgttggaaatctactataagacgggcaaaaaaccaagcgagacatttaacgaacaaaaaataactttgaagtttgataccctatttttatggctatacagtaagccggagccacttttccaaaggcttgacgatcgtgtagacgacatgctagaaagaggcgccttgcaagaaatcaagcaattatatgaatattacagtcaaaataaatttacgccggagcaatgcgagaatggtgtttggcaagttattggcttcaaagaattcttaccgtggctaaccgggaaaactgatgacaacacagtaaaattggaggattgtatagaaagaatgaaaacgagaacacgtcaatacgcaaaaaggcaggtaaaatggatcaagaaaatgctgatacctgacatcaaaggcgatatatacttactggatgccactgacctttctcaatgggacacgaatgcatctcaaagagcgatagctatttccaatgactttattagcaatcgacccatcaagcaagaaagggcacctaaagccctagaggagctgttgtctaaaggcgaaactacgatgaagaaattggacgattggacacattatacttgcaacgtctgtcgtaacgcagatggtaagaacgttgtagctattggcgaaaaatattggaaaattcatttgggtagcagaagacataaatccaacttgaaaagaaacactcgtcaagctgattttgaaaaatggaaaataaacaagaaggagactgtggaatga

SEQ ID NO: 81356 - DNA, 327 bp, Saccharomyces pastorianus
atgctaaagggaccgcttaaaggttgcttaaatatgtctaaaaaagttatagtgattgctggtacaacaggagtaggaaagtctcagttgtccatacaattggcacaaaaatttaatggcgaagttatcaattcggattctatgcaggtatataaagatattcctattataacaaataaacatccgcttcaagaaagagagggcattcctcaccatgtaatgaatcacgtagattggtcagaagaatactattcccatcgttttgaaactgaatgcatgaacgctattgaaagatattcaccggaggggtacgatacccatcgttga

SEQ ID NO: 81357 - DNA, 201 bp, Saccharomyces pastorianus
tgcaggtcgactctagaggatcccgagatatccttcaaactgcttgatgaggtgaaagaaaatttaagtgccggcacagcattttacgaaaatttaattacttctaccagcaatctgtacaatgaggtacaggaatatgatacagcaagaagagcagaaaaagctaggcttgataagagtttgacatttgaagaccaatga

SEQ ID NO: 81358 - DNA, 747 bp, Saccharomyces pastorianus
atgagtacaaatacggaaatcataaaaaatagtgatttgcaaagtttaatcaatgataagaggaggttaataaatgaaataaaagactttaataaatccattaaacccttggagtttgaatcgtatcaggattatttcctgataaaaacgttcaaaaaaggaatttctgcaagtggccatgtggatattgacagtttaagaaataaagaatatggaatatactacaagaaaatcaagaggaactctacacaagaagttggcgaaccaatccctcgcaacacatcctcctcctcatcttctactagatcaaactcatcagctgatatcagcgatacagaatattcaggtgagaacactcctacaactactggtgctgccagtcgaagaagacgtacgagatctcgagctattcaaagagaaaatagtctaccagcatctttaccctcaattagtgaagcgaatgcaaacaatgatgatgttactatttctgaaataaatggaagtgaattgccatttccaattccaatatcagaagtggaaaatattgacattgcttcagatataactgaaagggatggtattagaaggagatcatcaaggatatcagaaagagacaaaagacgttcacagtctagactggggtcagaagaagatgaagaaggcgacggacatgacggagatgaaggggagaccaaaatccaagacctatatgagagtttggtacccaaaattttggagccaacgtag

SEQ ID NO: 81359 - DNA, 198 bp, Saccharomyces pastorianus
atggaggtgctatccagaatgattttacaatggttaaagtatgaaaatcatcaagctcataagatcattgttttcaacacctctgtcactatagtggattacgtcaaggactccaagcagtttattgtgagacgtgtcggaaacacccaacatcttggtgatggcgaatttgtcgtcagtgacttaagattacgttag

SEQ ID NO: 81360 - DNA, 495 bp, Saccharomyces pastorianus
atgactaaggaagtaccatattattgcgataatgacgataacaacatcatcagattattcattattaggcatggacaaacagaacacaatgtaaaaaaaattttgcaaggtcacaaagatacctcgatcaatcctacgggagaagaacaagccactaaattggggcattacttgcgttcaagaggtattcattttgataaggttgtcagtagtgatttaaaaaggtgtaggcaaactacggctttagttttgaaacattcaaagcaagaaaatgtgcctacttcctatacttcggggttaagggagcgttatatgggtgttattgaaggtatgcagattactgaggctgaaaagtatgctgataaacatggtgaaggctcttttagaaattttggggaaaaaagtgacgattttgttgctaggttaactggatgtgtcgaagccgcagtagctgcagcatctaatgaaggtgtcacgaatctagccctagaatag

SEQ ID NO: 81361 - DNA, 147 bp, Saccharomyces pastorianus
atggacgataactcaccactcgactttactgtatttgatgaacagtatggcaccagacccctcgtcttgcctcctgttgttacgtcaagcgtggctgaatctttcacagatgaagcagactcgagcatgacagaagcgagtgtatag

SEQ ID NO: 81362 - DNA, 351 bp, Saccharomyces pastorianus
atgatctttttactaacttatcttcaatttcaacggagagatgtaaacatcattctctcctatgataatttctttttttatacagaaggtgttgttgtcgccaagaaggatttcaaccaagccaagcacgaagaaattgacaccaagaacttgtatgtcattaaggctttacaatccttgacttctaagggttacgtcaagactcaattctcatggcaatactactactacaccttgactgaagaaggtgttgaatacttgagagaatacttgaacttgccagaacacattgttccaggtacctacattcaagaaagaaacccaactcaaagaccacaaagaagatattaa

SEQ ID NO: 81363 - DNA, 582 bp, Saccharomyces pastorianus
atgcaatcgcacgttgaatcacagggaaaagcaattaacaaattgattaggaaacatctagatcttgtaaaagaaaggccgcgcttcgaaagatctcgtgaggatctgctaaaggaaaatgctactttggcgattgagctcaccaaggaaattaccgtaagcaaacgatcatctggagaggaaaagaacgatagcgaaaccaaaggtactcatgttgagaagaaaaaagggactgttagtaagtcacctatttcaacacgaaaagttacactatctaaatcattagcgagtttgctaggagagcatgaattgacgaggaccgaagtagtacgacgactctgggcatatattaaagcgcataatctgcagaatcctaacaacaagaaagaaatactttgcgacgaaaaattagaattaatacttggcaagagtaccaatatgtttgagatgcacaaaattttggcaagtcatatgacagagcctaaaaaaataagcgactgtcctcctcttatccaagaagtccgcagaaaggaaaagcccatcgtttcagattccgagcaatcagatacaaagggcatttga

SEQ ID NO: 81364 - DNA, 123 bp, Saccharomyces pastorianus
atggctgaattaaacgattatagtacgatgatcgatattcttctctctgatatggatttggaaacggtcacaactaaaaaggttaggatggctttgaaagaagtatatgcaatcgcacgttga

SEQ ID NO: 81365 - DNA, 900 bp, Saccharomyces pastorianus
atgggaagaatatatagatcttttagcaggtcaagagatcgtgcaataaacctaatagtcaacaaattttctgattttattgcatttgccttctcgagaaccacattaaaaacagtgtgtggtcaccatggttctgcacttgcgtctgacgaagcagtatatgacgcaattttaccactatttgactatttaaacgcaaatttgaacattctggcatcagaactttcacagagattgttgtttatggtaatgctaagagcgtggaacctcgttttagagaacgctgatttacttcttctacctgcattgaatagcgctaaagttaatatattgcgttcagcaaagaaatctttgtgggaaaatactctttcaacaacaaaaacggtatcaggatacggtcgtcctttgactcaagcggaaatcgaggctgtattcaaatggcttgatgcgctgtgtgtagatttttttcataataaaggagaaggtccccctcttgcagaattgaaaaatgagtattaccaaaatatattgctgatcccagctttttatgataaaagtgtctccgaattgaaggatgaagttcagcgattgattcccctatatgaagagtatttgagatggttttatctgaagaaaactccgattacttttacgaataaatccgctggaacaatatctcgaaaaaagtcgctagcagctaacattgtaaaagagcctaaggaacaactggaacgtgatgcagaagtaatgaatattatattgagaatattgatcgcgaaaggccaacatgattacgttcatcgaattttacatgacagaaaagaacttgttaatactatgaaaaatagaagagcggtgagtagagcggtcactcctacaggaaaaaagggcagaaactga

SEQ ID NO: 81366 - DNA, 2811 bp, Saccharomyces pastorianus
atgaatcgaacagtctccacattatcatctactgtatctgatgtatccgtggaaataccgtcaatatgcaacgtcattaataccgaattaccaacatcagatgtctatctttacactttaaaactaattttgttggattatatcaacgaaccgcgatttaaagaagcagctttgctatcgaataggacaagaacgtcaagtgttttatctgacaaaacgaatcatcagcaaacgcaacatgggaagaaactagtggttgacaaacaagacgatatgtcggaacgcgatatagtacaggcaactttacgtatattaaaagggaagttggcacaaatttcaggaaataaaaacttggcgccgaatgagatgcattggaaaagtattgttaagatgtattatagcatgctcgattcttctagtgcagatacattttccaagatgggtcaaatggaggaggtggtcggttatttcacaaatattgccagtaatgaactaaagaaaatgactattaaaaattctcgtgacgagctgttcagtgaagttgcttattttatagacctagtaattgatgtacttccagatagttgtgcaaatatcataaagagactgcttgattataagattaatcttaaaaaaggcgagacaacagtaaagaagaaaagagccgcctcacctgccacagtccctcaatatagaagcatttccgggagcacgattagcaataagcaaccctctttcaaagtccaagatatttcacatatgaagtattttatgcagttattcgaaacagatgaaacaaagcttcaacaagacgtaatggctgttaaggacgattgtacaaatcccatattttgcggtgaactaagatatcttaggaaaaaaatcaagaaagacaacggtactttgacggcttctgatttttcaagtgacagagaatacaatttatggaagaattatgaacttcttgaaattgcaaatttaatggatcgatttgagataggcgaaaaggttacctctcacggaaaccgtcttatacccaaggatgcaaaaagcgtatttgtccgtctcataggccttgttttaaaaaaagagtgttctaatgctgtaaatgccataaatctttctcaagaagctctattcttctttcataaatcagcgaggtattggagaatagaatatccttccaccatctcctcgttggtttattcagcagcaaatttaagtgttctaggagatgaagagctaaatatcccaataactgaaaacttgttttctgtcatccgcaataaatatttatgttcagaggataatctggatccatccgcttggaatgctcaggatcgctatttatgggctgcaaacctttttcatacgactgatcagtctatgaggacaataaataaccttttaactgcgatattttcaggtacaaagccaaaattttctccagttttgtcattttattattcaaacattgttggggatccagtaatggaattctatgaaacgcagtccgtagctgtaaagaaatactggatcaaattatttaagaagactctttttaaagcatcagaggattattttgtctcccttctgcaggatatgctaaaggctaacacaatagaaattcaaaacgttcagaatctcgtagaaacaattatagaagccataaaagcgattcaaaaacgttacaataaacctttattggacgaaatatctctgcctagacaatgcgcagtatttctatgtgaagtatacggttcggattctttaaatctaataaaaaccgctgaaaagagtaccatgaaaatgactggacaaaagttgggtccaatagatgcgctagatatgtatgatgtactgaaagaactgagacagatttacctgcaggtaaagccaaaagggaaatttttctttaaccttgaaaattacttcatcaaatatttgactcgattatgtgatgatgtgagccgtaatgttcaaaaagttattaaatcttcactagaaagcgagaattggcaacccgtaaatgaccaggaccatttcagtagatcagttttggacatattcaaaatgataaatgaatcaactagcatgttggagaaatttggttggcaaaatgaatttcaactggcacaaatgatcacggtaatattaaaggcgttttcagatggtatgctttcatactcagctcaactaatggaattgatccagagagatttacaggagggtgatgaaccatcctactctttagaaagctcagacactcgatcttcacttagcctgaataacgctaacgtaaatcatgaaaaatcaagaagtagtaggctgtttgaagatttgaaaaatgtagttaaatcaactccgaagatggtagctcctgctccatatcagttcaagaagcgtacgtgcgtactgctaaatgatcttgataaaacactttttctgttagagagcttcgaagaaaaagcagatccatcaaaaatatcctctgttattgcacagtaccactcctcccataatttagaggataatgggaagtcattcgatgaccagaatatgaagcaagtttatacccttcgaattatcggtgctgaaaatattaaaggcttcagcaaaacggggctttcaaactcctacgtttccatgagaaacatcactttacaacgggaaataggtactactaagattgttgcaagatcgattactcccaaatgggacgaagagtttgtgtttgagtctccattcggaaagtcgaacgatattatgtttactatatggcaccatccacacagcagattaaagacttag

SEQ ID NO: 81367 - DNA, 171 bp, Saccharomyces pastorianus
atggcaccatccacacagcagattaaagacttagcggaagatgatctatgtggaaaagccaatatgaaattcactccgagaaagctcaaggatgatgggtttcctatcgatatttcgctcacattgaatccgcagggaactttatattggcaaatatccctggaaagtgag

SEQ ID NO: 81368 - DNA, 456 bp, Saccharomyces pastorianus
atgtctgactgggatacaaatactattattggtagcagagcaagagctggtggttctggcccaagggccaacgttgccagatctcaaggccaaattaatgctgcaagaagacaggggttggttgtttccgttgacaagaagtacggatcaaccaatacgaggggtgacaacgagggtcagaggttgaccaaggtcgaccgtgagacagatattgtcaaacccaagaaattggatccaaatgtcggtagggccatctcgcgtgccagaacagacaagaaaatgtcgcagaaggatttggcaaccaaaattaacgaaaagccaaccgtggtaaacgattatgaagccgctagagctattccaaaccaacaagttttgtctaagttggaaagagccttaggcgttaaattgagaggtaacaacattggttcgcctttgggagctccaaagaagaaatga

SEQ ID NO: 81369 - DNA, 660 bp, Saccharomyces pastorianus
atggaagaagaataccaaaaatcatcatcttcgttaccaaaggacgttaacaaacaagaagaacagcctctgagggctaaacggctgtgtgaacgatggttagacaacctcttcatgcttttatatgaagacctgaagatgtatacattatggcaaaccgaacaactgtacatggatgcacagaataacaaccacaataagttgactttcgaatgggagttatttggcctttgtgcacgtcgactgggccatttccctgaggccgccaaggccttccagaacggtttatcgcagagattttcatcaaggtgcgcgaggaaactgctggaatattgtataaacgaacgccaacgggtcaaaaattttataagctcacctaattcgcatgacatggtccctgaaatagtaagctcacgcataagagagctagacaatagcattatcgacctttgcgtgaagatatgctgctggaaccaccgttggtatacggaattttccataagtttacttgattgtttaagtgtggtcattcaagatatgggtctgaccaaagtttcgaatgaaatctcgtcaagatatccagaaactgttctcaacttggtgcaggagaatttgctcaatttcttcactacttgcaccattggatgctacgatgcataa

SEQ ID NO: 81370 - DNA, 1476 bp, Saccharomyces pastorianus
atgattacgcagaattctataccagaggtaaaagaagattttattggttatgttttacatgagagaagaattcggttaccgcagtttcaagacttagggccggcagacttggtcacactaacaaagtatttgcccacttcaagtaacataaatgccataaacagtacgagtagaaatggtgcggccattattcagtcccctgcagccgttgtagccgatgactctgccgcttccatggcaaccaatggcgatgctagtgacaccgccgttaccacaaattatacaaatgcatctatatacagtagcagcagaaatgccaatgatggagccccgatggtcgctgagctccatccacttgataaactgaaggacgaagtagggacatttttttactcaatgggtgtcgatacatccggtccaacttcaatcgcaatttttttgaaggagatttcagaggtcatcagcgagaaaccccaagtttggtttggcaggaagaaaaccttcaatgttgctcgaatttcattttccacttggaatgcgttcaggagatgcgacataaatgtcgtcgttcatattccaggatcgattcagaactttatagtggattgcaacggtgaaagtcaaaatatagagatgtgtgcggattatgacttaatttgggctgaaacgttcgtaagtggcgtagtacggtcaatcatgttaatgaaggaaaacgctgaagagggagaattacaaaatttggtggaaacattgattttgaacccgtttactgcaggacaaatcgacgatgtaccagaaatgttcattgatctgttccctatagtttaccataagggcccattattgggagctccgtattatattaccaatgtgacgaacactaataactatttggtagaaacactcgtagagatagttaagctgactcgtaatgttagcagggcggaaataatgttgaagaatctggctactgacaaccctgaggcgatcataatactaatcaagatctttttggtgtgtgatcaagaattagacgcaataaagctcacatacgatatgctttcgcaggataaaataataaacaacactaataaccgcatggattataaatctgaattactgtgcttacaagcgcaatttttgatagacaaaaggcaggattacagcttggcgcaaaacatagcgcaagaggcagtcaattgttctcccagtgaatttagaccttggtatcttttatccaaagtgtatgtaaagctaaatgatattgaaaatgccttactgatactgaattcatgccctatgtctccattaaaggaaaaatacgtactgaaaagagtagctccgttgccttcgaataatagtcttcatttgccattgccaattgacgttgtactggatgaagtgacgtcgttgaatccacaagacgttcagaatgaacaccagctctgcgagatccacatgctgtgtcacatttag

SEQ ID NO: 81371 - DNA, 138 bp, Saccharomyces pastorianus
atgcattttatattgaagacctgcaagatgtatacattatggcaaaccgaacaactgtacatggatgcacagaataacaaccacaataaagttgactttcgaatgggagtatttggcctttgtgcacgtcgactgggc

SEQ ID NO: 81372 - DNA, 2103 bp, Saccharomyces pastorianus
atgacagacatgcaaatacaatggtataaatcattattagagaaggatatagacgctgttaacggtgctgttggaaaaagagaaggcaaaacgaggttactgaatattgttatgcaattaaggaaatgctgtaatcatccatatctttttgaaggcgcagaacctggacctccatacactaccgatgaacatttgattttcaattccgggaaaatgattatattagataagttactgaaaagactgaaggaaaagggatctagagtattgattttcagtcaaatgtcgagactattggatatcttagaagattattgctattttagagattttgaatattgcagaatcgacggttctactagccatgaagaacgtatagaagctatcgatgagtataataaacctaattctgaaaagttcgtttttttgctaacaacacgtgccggtggtttaggtattaaccttgtcacagccgacactgttattctttttgattctgattggaaccctcaagctgatctacaagcaatggatagagcgcatagaattggtcaaaagaaacaagttcatgtttatagatttgtcacagaaaatgctattgaagagaaagtcattgagcgtgccgcacaaaagctgagactagaccagttggttatccaacagggcacgggcaagaaaactgcatctcttggtaactcaaaggatgatctgttggatatgattcaatttggcgctaaaaatatgtttgaaaagaaagcaagtaaagtcactgttgatgctgatatcgatgatattttgaaaaagggggaacagaagacacaagaactaaatgccaaataccaaagtttaggacttgacgacttacaaaagttcaatgggatcgagaaccaatctgcttacgaatggaatggtaaaagctttcaaaaaaaatccaacgacaaagtagttgaatggattaatccttcccgaagagaaagaagaagagagcaaaccacttattcagttgacgattattataaggaaattattggtggtggctctaaatcagcaagcaagcaaactccgcagccaaaagcaccccgcgctccaaaggttatacacggtcaagatttccagttcttccccaaggagttagatgccttacaagaaaaggaacagctttacttcaagaaaaaggtcaactataaggttacttcttatgatattacgggagatatacgtaatgaaggaagcgatgctgaagaagaagaaggagaatacaaaaatgccgctaatacagaaggtcataaaggtcatgaggaacttaaaagaaggattgaggaggagcaagagaagattaattcagcaccggattttacccaagaagatgaattacgaaagcaagaattgatatcaaaagcctttactaactggaataagagggactttatggcgtttatcaacgcctgcgccaaatacggtagagatgatatggaaaacattaagaaatctattgattccaaaacaccagaagaggttgaagtgtatgcaaaaatattctgggaaagactaaaggaaatcaatgggtgggagaagtatttacataatgtagaacttggtgaaaaaaaaaatgaaaaactgaaattccaggaaactctattgaggcagaaaatcgaacagtgtaaacatccattacatgagctgataatacagtatccacctaataatgctagaagaacttacaataccttagaagataaatttttattattagctgttaacaagtacggacttcgtgctgacaagctctatgaaaaattaaagcaagaaatcatgatgagtgatttgttcacttttgattggtttataaagacaagaacggtgcatgagctatcaaaaagagtccatacgctattaactttaattgtaagagagtatgagcaacctgacgcaaataagaagaaaaggagtagaacttcagcgactagagaggatactcctttatcccaaaatgaaagcactagagcttcaacggttccaaatctcccgacgacgatggtgacaaatcaaaaagatacaaacgatcatgttgataaaagaaccaaaattgatcaagaagcatga

SEQ ID NO: 81373 - DNA, 750 bp, Saccharomyces pastorianus
atgacgacccagcaagaggagcaacgaagtgataccaagaatagcaaaagcgagtcaccttcagaagttttagtcgatactcctgactcaaagtcaaatggcagtagtgatgatgataatatcggacaaagtgaagagctatcagataaagaaatatatacagtagaagatagaccaccagaatattgggctcaaagaaagaaaaaattcgtacttgatgtagatccaaaatacgccaagcaaaaggacaagtccgatacgtacaaaagattcaaatatttattaggcgtcacagaccttttccgtcattttattggaattaaggcaaaacatgataaaaatattcaaaaactcttaaaacaactagattctgatgcaaacaaactttccaaatcacacagcaccgtcagttcgtcatcacgtcaccatagaaaaacagaaaaggaggaagatgctgaattaatggctgatgaggaagaagagattgtagatacatatcaggaagacatattcgtctcagaatctccctccttcgtcaagtcaggaaaattaagagactatcaagttcaaggcttaaactggttaatatcgttgcacgaaaacaaactatctggtatcttggccgatgaaatggggctgggtaaaaccttacaaacaatttcattcctaggttatttgagatacgtcaaacaaattgagggaccctttctaataatagtaccgaagtcaacactagataattggagatga

SEQ ID NO: 81374 - DNA, 1755 bp, Saccharomyces pastorianus
atggtttatctgcgattaccgcccagtggccttattgatattgatatcattgtgtacgttagaacagaaaaaaagaaatttggaaaatttttcaacctcatcgaaaattttcagaaaagcaagaattatttatgctttcgcaaaaatttcgcatatgttatttttgaaatagcagtcgataccaaattagctgtagaacctcaacctcctcatacaatggcttacgttttaactgaaacttcagctggttatgctcttttaaaagcttccgataagaaaatctacaaatcttcaagcttaattcaagacttggatagctctgacaaagtcttgaaggaattcaagatcgccgccttttccaagttcaactctgcagctaacgctttagaggaagccaactccattattgaaggtaaagtttcttcccaattagaaaaacttctggaagaaattaaaaaggacaagaagtcgaccttgattgttagtgaaactaaactggcaaacgctattaataagttgggattgaacttcaatgttgtttccgatgctgtaaccttagatatctatagagctatcaaagaatatttgccagaattgctgccaggtatgtctgataatgatctaagcaagatgtctttgggtttagctcattccatcggtcgtcacaaattaaaattttctgctgacaaagttgatgttatgattattcaagcaattgctttattggatgatttagataaagaattaaacacatatgccatgagatgtaaagaatggtacgggtggcactttcctgagttagctaagattgttactgattccgtcgcttatgcgagaattattctaacaatgggtatcagatccaaggcttctgaaacagatttgagtgaaatcttaccagaagagattgaagaacgtgtcaaaaccgctgctgaagtgtctatgggtactgaaatcactcaaaccgatctagacaacatcaatgctttagctgaacaaatagtcgaatttgccgcttacagagaacagttgtccaattacttgtctgcaagaatgaaggctattgctccaaacttgactcagttggttggtgaattagttggtgctagacttatcgctcattcaggttccttaatttccttggccaaatcaccagcttctaccatccaaatattaggtgccgaaaaggctttattcagagctttaaagaccaagcatgatacaccaaagtatggtttgctatatcatgcctctcttgttggtcaagctactggtaagaacaaaggtaagattgcaagagttctggctgctaaggccgctgtctcattgcgttatgatgctttagctgaagatagagacgattcaggtgacattggtctagaatcaagagccaaagtagaaaatagattatcccaattagaaggtagagatttaagaactactccaaaggttgttcgtgaggctaagaaggtggaaatgactgaagctagggcctacaatgcagatgctgataccgcaaaggctgcttctgattctgaatccgattctgatgatgaagaggaagaaaagaaagaaaagaaagaaaagaagagaaagagagacgatgatgaagattccaaggattctaaaaaagctaagaaggaaaagaagaaggaaaagaaggaaaagaaggaaaagaaggaaaagaaggaaaagaaagagaagaaagagaagaaggaaaagaagtccaagaaagagaagaaagagaagaaataa

SEQ ID NO: 81375 - DNA, 978 bp, Saccharomyces pastorianus
atgcctgcaggtcctgagcggtgttgtcgtagagcagttgaacattacgtaaacagatatctacgcatttctgtcatttggattcatacagggtttacagacaatatggggaccgaagatgccattgcccttccaaatagcacgctagggccgcgtaccgaagctaagcaaagactatcatctaagagtcatcaagtctcggcgaaagtaacggttccagcaaaagatgaaattagtagtagcgatgacgatgcacacgttccagtgacagaaatacatttgaaatctcatgaatggttcggcgattttataactaaacatgaaattccccgtaaggtgttccattcttccattggctttattactttgtacctgtatacgcagggtattaattataaaaatgttttatggcctttgatatacgccttcatcatattgtttattttggatctgataagactaaactggccctttttcaatatgctttactgtagaactgtgggtgcgctaatgagaaaaaaggagattcatacatacaatggggtattgtggtacattcttgggttaatcttttcttttaactttttctctaaagatgttaccttaatatcgttatttttgctaagttggtccgatacagccgccgcaactattggaagaaagtatggtcatttaacacccaaattggcaagaaataaatcccttgcaggttcgatagctgcgtttacagttggtgttatcacctgctgggtattttatggctattttgttcctgcctacagctacgtcaacaaacctggcgagatccaatggagcccagaaacaagcagattaagtttgaatatgctatccttgttaggtggtgtggtagctgctttgagtgaaggtatagatttgttcaactgggatgataatttcactattcctgtcctgtcatcactttttatgaacgcagtaatcaaaacattcaagaagtaa

SEQ ID NO: 81376 - DNA, 441 bp, Saccharomyces pastorianus
atgagaatttttgcttcaaatgaagtcatcgccaagtctcgttactggtatttcttgcaaaaattgcacaaggttaagaaggcttctggtgaaattgtttccatcaaccaaatcaacgaagctcacccaaccaaggtcaagaacttcggtgtttgggttagatacgattccagatctggtactcacaacatgtacaaggaaatcagagacgtatccagagttgctgccgtcgaaaccttataccaagacatggctgctagacacagagctagatttagatctattcacatcttgaaggttgctgaaattgaaaagactgctgatgtcaagagacaatacgtcaagcaattcttgaccaaggatttaaaattcccattacctcacagagtccaaaaatctaccaagactttctcttacaagagaccatcaaccttctactaa

SEQ ID NO: 81377 - DNA, 852 bp, Saccharomyces pastorianus
atgcatatgccatcatcccacacacatacacatgcccatgttgatggaatagagaatactacaccaatggatagcacggataacattagtgagattatgcctaatgctatagtagatagttttatgaacgaaaatactagattattgacaccggaaaatgcatccaagacgccatcatactcaacgtcaagccatacgattgccagcggcggaaattacacagaacacaacaagcgcaagagatctttaaatatgcatggtgtgtttcttcacgttttgggcgatgctcttggcaacatcggcgttatgttgtctgcatttttcatttggaagaccgactattcttggaagtattatacagatccgcttgtctcattgataattaccggtataattttttcctctgcgcttcctctatcgtgcaaggcttccaaaatattgttacaagcgacaccttccactttatccggcgatcaagtagaaggtgatcttttgaaaataccaggaataatagctattcatgatttccatatttggaatttaacagagtctatttttattgcatctttgcatattcaactagatatcagcccggaacaatttactgacctggccaaaatagttagatcaaaacttcaccgctatggcattcactccgctactttgcaacctgaatttattaccagagaggttacttcaaccgaaagagccggagactcccaaggtgatcatctacaaaatgacccgctttcattaaggccaaagacatatggtactggcatttcaggttccacttgtcttatcgacgacgctgccaactgcaacacagctgattgcttagaggatcattaa

SEQ ID NO: 81378 - DNA, 222 bp, Saccharomyces pastorianus
atggatatgcttctggagcttcttcttccagtctatgcgagattgaatgagagcggctggttgctatggtttgtcttccatgatgtgtacgaagctgtgaaaatgagtactaaggagtcagtgcacaccagggtaatcaatttccctgatattttgtcaactcaacaaatgagacagggtccatctcagatcaggacacctctggtaatgcttcttatgtga

SEQ ID NO: 81379 - DNA, 513 bp, Saccharomyces pastorianus
atgggggtattagtgatttcatgcattgaaattgcagaaaatgctgcgaatctcgcttcacttttctttataatgtcattatctttctgcggtgttctggctacgccaaatattctaccaagattctggatttttatgtatagagtatcgccactgacatacctcattgatgctctgctatcggtaggactggccaatgctagtgtcgtttgttccagcaacgaacttttaaaaattgttcctccaagcggtatgacatgctcggaatatatggaaccttatatgcaatccaccgggacgggttatctgctcgatgggagttccgaaactgaatgtcacttttgtcaattcagttctaccaatgattatctggcgactgtgagttcttcgtattcacgtagatggatgaactatggtatttttagtgcatatattgtctttgactattgtgcagcaatatttttatactggctggtgcgggttccaaagaaaagcaaaaaattaaagaaataa

SEQ ID NO: 81380 - DNA, 1056 bp, Saccharomyces pastorianus
atggttatgtcagcagcaggattgcattttgaaaccgcaactgtgagagagtcattaaggttttccgcgtatctgcgtcaagccgatgatgtatccatcgaggagaaagataaatacgttgaagaagtcattgaggtattggagatgaaactttatgctgatgccatagtaggcgttcctggtgaaggtttaaatgtggaacaaagaaaaaggttaaccataggtgtggagttagctgccaaaccaaaactgttggtatttttagatgagcccacgtctgggcttgattcccaaactgcatggtcaacttgtcaattaatgaaaaaattggctagtcgcggacaagcaattttatgtaccattcatcaaccttctgctctcttaatgcaagagtttgataggttactatttttgcaagagggcggacaaactgtatattttggagagctagggaaaggttgcaaaacaatgatcaactatttcgaagctcatggtgcccataaatgcccaccagatgccaatccagccgaatggatgttagaaatagtaggtgctgcaccaggaactcacgctagtcaagattattttgccatttggagagattctgaagaatatagggaaatgcagaaagagttggactggatggaacgagaattgcctaaacggacggaaggttcctcaaatgaggagcagaaggagtttgctacgtcaactttgtaccagatcaaattggtgagttatcgattattccatcaatattggagaacaccattttacttatggtcaaaatttttttcaacaattgtgtctgaactcttcataggcttcacttttttcaaggcgaatacatcattacagggcctacagaatcaaatgctggccatttttatgtttacagtagtattcaacccaatattgcaacaatatttaccacttttcgttcagcagagggaactttatgaagctacgagaaaggccatcaagaaccttttcgtggaaacgcatttattgtatcgcacgacttctcgtggaacatccctatggaactttactggc

SEQ ID NO: 81381 - DNA, 93 bp, Saccharomyces pastorianus
atgctgtatcggatggtgcgtggcctgttctgtgcctcttttgtaaaacagttacaaacaacttttcttgcaactgctattgttctttgctga

SEQ ID NO: 81382 - DNA, 435 bp, Saccharomyces pastorianus
atgtcgtccttcatcgactcgattaaatcgacgtctctttcaagagccttgacaatcgccttaggttccaacaacttcaaaagagcctccacgatcaatgattgcaaaatgggcttgtactcgtcccggttgttggcaattcctgacaacttttccttggtttcctcgaatatcccgtctagcgactgttcacgagcagaaagaaccttcaacctcattttgtttgctatcgttgacttagtaatctgttgcgaaagcatggccttcttcaacttgctcttgaagttgccgtcaatgttgttggtttcatttcttacgatgttggtcttctcgatttcgtactcttggtcagccttcaattggatttccttcgctttttcttcagcttcctttctgatgaaagcttgcatcttgttcaattcatcgttcacttga

SEQ ID NO: 81383 - DNA, 621 bp, Saccharomyces pastorianus
atggaactgaagcctgtgaagctcaaagaatggctgaacagtttgctgctgatttggatgctgcagacagctgccgtctctccaatcaaagaaaagaagttgaaggaacttggtgtcaaacttggtcaactttcaatttctgttatcacaaaaaatgaactgaagcaaaaatttaacaaaattgaaaaagcagtgaaggatgaagttaagtcaagggccaaaaaagaaaacaaacaaactcttgatgaagtgaagacatttttcgaaaccaatgagaatgctccatacctagttaaattcattgatatttctccaaatgctaaagctatcactgaagcgatcaactacatgaaatccaatgatgctgtcaaagacaagtcaatctatctattggcaggtaatgaccctgaaggtcgtgttgctcacggttgttacatctccaatgctgctttagccaagggtattgatggttctgcgcttgccaaaaaggtgtccagtatcatcggcggtaaggctggtggtaaaggtaatgttttccaaggtatgggtgataaaccagccgctataaaggatgcagttgatgatttggaaagtttgttcaaggagaagctttccatttaa

SEQ ID NO: 81384 - DNA, 2193 bp, Saccharomyces pastorianus
atgacgatcggtgataagcaaaaatggaccgctactaatgtccgtaatacctttctagactatttcaaatctaaagaacacaagtttgtcaaatcctctccagtagttccatttgatgatccaactttacttttcgctaatgccggtatgaaccaatacaagcctatctttttaggtactgtcgatccagcttccgatttctacaccttgaaaagggcttacaactctcaaaagtgtatcagagctggtggtaaacacaacgatttagaagatgtcggtaaggattcttatcatcataccttttttgaaatgctgggtaactggtcgtttggcgactatttcaagaaggaagctattacttactcatggactttgttgactgaagtatacggcattccaaaggatagattatacgttacctattttgaaggtgatgaaaagttaggcttggaacctgatactgaagcccgtgaactatggaaaaatgttggtgttcccgatgaccatatattacctggtaatgcaaaggacaacttttgggaaatgggtgaccaaggcccatgtggtccttgttctgaaattcactacgatagaataggtggtagaaatgctgcttccttggttaatatggacgaccctgatgtcttggaagtttggaatttggttttcattcaattcaacagagaacaagacgggtctttgaagcctttacctgccaagcatatcgacacaggtatggggttcgaaagattggtttctgttctgcaagatgttagatctaactatgataccgatgttttcacacctttgttcgagcgtatccaagaaatcacttcagttagaccatattctggcaattttggtgagaatgacaaggacggtatcgatactgcctacagagttttagctgatcatgtccgtacattgacttttgccttagctgacggtggcgttccaaacaatgaaggtagaggatatgttttgagacgtattctaagaagaggtgcccgttacgcccgtaaatacatgaattacccaatcggtaactttttctccactttggctccaactttaatttctcaggttcaagatatctttcccgaattagccaaggatcctgcattcctctttgaaatcttggatgaagaagaagcttctttcgctaagaccttggatcgtggtgaaagactatttgaaaaatatgcttctgctgcttctaagactgaatctaagactttagacggtaaacaagtttggagactttacgacacttatggtttcccagtcgacttgactgaattgatggctgaagaacaaggcttgaagattgatggacccggtttcgaaaaggccaaacaagagtcatacgaagcatccaaaagaggtggtaagaaggaccaaagtgatttgattaagttaaacgtccatgaattatccgagttgaacgatgctaaggtgcccaagactaatgatgaattcaaatacggcagcgccaacgtcgaaggtaccattttgaaactgcatgacggtaccaactttgttgatgagatcactgaaccaggtaagaagtacggtattattttggataaaacatgtttctacgccgaacaaggtggtcaagaatatgacactggtaaaattgttattgatgacgctgctgagtttaatgttgaaaatgttcaattgtataacggttttgttttccacaccgggtctttagaagaaggtaagttgtctgtcggtgacaagattatcgcttcattcgatgaactacgtcgtttccctattaagaacaatcatactggtacacatatcttaaactttgctctgaaggaaactttgggtaatgatgtcgatcaaaagggttctttggttgccccagaaaaattgagattcgatttctctcataaaaaggctgtgtcaaatgaagaattgaaaaaagttgaagatatctgtaatgagcaaattaaagaaaacttacaagtgttttacaaggaaattccattggacttggccaaatccattgatggtgttcgtgctgtctttggtgagacttacccagatccagttcgtgtagtttctgttggtaagccaatcgaagaattgttggccaacccagctaacgaagagtggaccaagtattctattgaattttgcggtggtacccatgtcaacaagacaggcgatatgtaa

SEQ ID NO: 81385 - DNA, 246 bp, Saccharomyces pastorianus
atgtcaacaagacaggcgatatgtaaatacttcgtcattttaacagagagcggtattgcaaagggtatcagaagaattgttgctgttaatggaactgaagcctgtgaagctcaaagaatggctgaacagtttgctgctgatttggatgctgcagacagctgccgtctctccaatcaaagaaaagaagttgaaggaacttggtgtcaaacttggtcaactttcaatttctgttatcacaaaaaatga

SEQ ID NO: 81386 - DNA, 1614 bp, Saccharomyces pastorianus
atgatctcctccattttaactaggttgttttaccaaggtacacatatatacaataatggtattgattataccactgaaagtagcttaccaagaatggatttgagcgagttttttagacctaataatttaacgatgtttgaagatggaaaatcagcttctattgatttactactaattttagatccacttgaagagagaacgcaaatgattctttctcttgttgagcaattcaggcctttgaaatttgttaatattcaggtaattttaatgccgacactggaattaaacattgtccctattagaagaatatacgttgatgacgcagatattgtcaaatcaataacttctgaggatagcagatcagatccagaagtagatattgaaatggatgttcctaattctttcattgtagataataattatcggataaaaaaattgctcatagaattacattccttctctagcaaaacagtcctttcagctggcaatattgatggtatggggggtgtatgcctagcacttgtcgattctgcagggaacattattgacaaaactacaacaatgaaaacctttggctatggacaatttcataccgacaaatttttaaagggttgctatataaaaagttgtgattcaagatataccgttcagtcattttctactgacgggcatcccgactttataccatcagattccttggatatactgtcgtacaatccacaaaaaatcgctgtaaaaatttcagaagagcctacacacgaggaagaatacgaggaaggtcgcaacaatgatacaataatcaatatttttactattttagagtccgggccagatgaggaagagaggtacatgcaaatgattttatccattttgtcaaagtgtcccgaaacgcaaaaggtgaattttttcattttagatcagccgtttatctccgacactttaaggaaatcatgtgagtatataaattcctctgatgaaatgagaggcaatgtcatttttttgaattatgaatggcctcaatggttaagaccgcaaagattttcttcaaggagaagggatgtctctagatttctgttcttggatgtccttttacctcaaaacatctccaaagtgttatatatgagtccaactgaagtaccgctggatccttttgacatttttcaatttcaaggcctcaaacgtgcacctctaggactattccgaatgagtggtgatggttattggaaagaaggatactgggaaaaaatgttaagggagaataatttagaattttattctaccgaaccggcctttttagtaaacttagagaggtttcgggagttagatgctggtgataaatacaggattcactatcaacgtatttctacagacgccatgtctcttgtcaatatcggccaagatctagttaacaacctacaactcgaggttccgattaggtttctcaagggatcgtataagaagaaattagttattaatgatgaatgtgtttctgaatggaagaaaaaaataaataagttcgcatcctctcctggcgatgaagacgtacctggagaaagtgttagcagcaaataccaagattccgacaatgccgctcctctgcatgacgaattataa

SEQ ID NO: 81387 - DNA, 666 bp, Saccharomyces pastorianus
atgaaaacaacgaaaaggattcctaacaaagaaaataggaaattgaaagtggtaaaatctgttgtgaactcagaagctctgcccaagagaagaagatacgataggaaaattaagagaagatcaagggagttgtacggagatgatggaaacaggtcagaaaactatgatgaagaaagtactcaagaagttccagttagatcagtgactccgatacgtcaagttaaaaggtctcttcatactatttcttcgccattggcctcacagggcgtagtgaataatgtccccaagtatattccaagcatgtcgtgggaaaagttgccggattactcacctcctcttcacactttgccgaatagtaataataaagttttaaaagtggaatggaaaggctctccaatggacttgaatcatgatcctctcaaacagcgtctgcatcctgcagaactagttctcgcacagattctgagacttccatgtgatctttatttggactctaaaagaagatttttcttggaaaaagttcatagattcaaaaaggggttgccgttcaggagaacggatgctcaaaaggcttgtagaatagacgttaataaagcatcaaggctatttgcagcatttgaaaaggtaggttggttacaagataaacattttgaaaagtatttgtaa

SEQ ID NO: 81388 - DNA, 429 bp, Saccharomyces pastorianus
atgctagataacatgcaatttcattctccagcaccggaacatcctcaattgaatgggggtattaacaaaattcccgcttcccacaaaataggttacaaattaaaccagcaagtgcagagattggctgtggtcaggaataatattgaagagagattgaactcgatggaatcctcacacggacagatatccgatagtagcgttgtccgtgctatcgatgcaagtatcgatgacttcctaataccttcacctccattatcgccaaagctgaggcaatgccccataataagccagcctcagctggttaatgtggaaagcgaccatagggagctgatcatgttgacccccgtttgggaagcgggcttgaactctcagaatacaaccataatacaaggaatttcttatcgcaatatagcttcttccgagatatga

SEQ ID NO: 81389 - DNA, 336 bp, Saccharomyces pastorianus
atgggtgaatcttcgctaccgccaagatcagcatgtaattcatcacagctaatattttcagtagtaaatcttaaagtacctgcagttggattagaattattcttattagtttgggagagttggttgacatattcaattaaggaatcatcgcttaacgtagatagaaaagaccttgcattcaagccgtcggtctttgctgttaaatgtgaatcattgacactttgctggctaaggcaattgtttttatcaggtgtttccctatttatagagtattccaaatcgctgtctaataaatctacaagaccaccatgttcacccatcgctggatatgcctag

SEQ ID NO: 81390 - DNA, 1191 bp, Saccharomyces pastorianus
atgatctttaccactgacgcaagttttgcaaacacctccaatgataaaatcatgtatatagactatgctaacctgacaaaagttatcgttccggggagatttatatacgtggacgacgggattctctcttttaaagtgctccaaatcattgacgaatctaatttaagggtgcaagcggtaaactcgggttatatcgcatcccataagggtgttaatctgcctaataccgacgttgatttgccccccttgtccgccaaagacatgaaggacttgcaattcggagtccgcaatggcattcacatcgtatttgcctctttcataagaacttcagaagatgtgttgtctatcagaaaagcgttgggttctgaagggcaagatatcaagattatatccaagatagaaaaccagcaagggttggataattttgacgaaatcctggaagtcacggatggtgttatgatagcgagaggcgatttaggaattgaaatcctggcacctgaagtattagccattcaaaaaaagctgattgcaaaatgtaatttggcgggcaaacctgtcatttgcgcgactcagatgctggattcaatgacacacaatccgagaccgacaagggccgaagtatcggatgtggttaacgctgtgttggatggtgctgattgtgttatgctttctggagaaacggcgaagggtgattatccggtgaatgcagttaatattatggcggcgaccgctctgattgctgaaagtactatcgcccatttggctctttatgacgatctcagtgacgccactcccaaacctacttccactacggaaactgtagcagctgcagctaccgcagcaatcttggagcaagatggtaaggccatcgttgtattatctactacagggaacacggcaaggctactgtcgaagtatagaccaagctgccctatcatattagtaacaagacacgcaagaacggcaagaattgcacatttgtatagaggtgttttcccatttctgtatgaaccgaaacgcctagacgactggggtgaggatgttcataggcgcctaaagtttggtgttgaaatggcgaggtctttcggaatggtggacaacggtgatactgttgtttccattcaaggattcaaaggaggaatcggccattccaataccttacgcatttctactgttggtcaagaattctag

SEQ ID NO: 81391 - DNA, 195 bp, Saccharomyces pastorianus
atgccagagtccagattgcagagactagctaatttgaaaataggaactccgcagcagctcagacgcacctccataataggtaccattgggcccaagacaaatagctgcgaggttattactgctcggagaaaagctggtttgaacatcattcgattgacttttcccatggctcctacgaattccatcaatcagtaa

SEQ ID NO: 81392 - DNA, 1818 bp, Saccharomyces pastorianus
atggtaaatatactgcccttccacaagaacaatagacacagcgcgggagtcgtcacctgcgcggacgatgttagcggcgacggtagcggcggcgacaccaagaaggaggagaatgttgtccaggtaacggaatcaccatcgtccgggtcgcgcaataatcatcgcagcgacaatgaaaaagatgacgccatccgtatggagaaaatatctaagaaccagtccgcgtcgtccaacggcaccatccgcgaggatttgattatggacgtggacttggagaaatcgccctccgtcgatggcgatagcgagccgcacaaactaaaacaaggtttgcagtcgcgccatgtgcaactgatcgcgctgggcggcgccatcggtaccggtttgctagtggggacttcatccacgcttcatacgtgcggtcccgcggggctgttcatatcgtacattattatttccgcggtgatctacccgatcatgtgcgcgctgggcgaaatggtgtgctttttgcccggtgatggttctgacagtgccgggtcgacggccaatctggtcactaggtacgttgacccttcgttgggcttcgccactgggtggaattacttctactgctacgtcattttagtggccgccgagtgtacggcggcatccggtgtggtcgaatactggaccaccgcggttcccaagggtgtttggatcacgatctttctatgcgtggttgttatactaaacttttccgcggtcaaagtgtacggcgaatccgagttttggttcgcgtctatcaagatattatgcattgttggactgatcattctgtcctttattttgttttggggtggtggccccaaccatgaccgtcttgggttcagatactggcaacatccgggcgcttttgcgcatcacctcacgggcggatcgctgggtaacttcacagatatctacactgggattatcaagggcgccttcgccttcattcttggtccggaactggtgtgcatgacttccgcggaatgcgcggaccagcgtagaaatatcgctaaggcttcgcgccgctttgtatggagactgatcttcttctacgttctggggacgctggccatctccgttattgttccatataatgacccaacattggtaaatgcgctggcgcagggcaaaccgggagccggctcgtcaccctttgtgatcggaattcaaaacgccgggattaaggttcttccccacattatcaatgggtgcatcttgaccagcgcgtggtctgccgccaatgcgtttatgtttgcgagcacgagatcactgttgaccatggcgcaaacgggacaggcacccaaatgtttgggcagaatcaacaaatggggtgttccatacgtggctgtgggtgtttccttcttgtgttcttgtttggcatatctgaacgtgtcttcatccacggcagacgtgtttaattggttttccaatatcagcaccatttccgggtttctgggctggatgtgcggctgcatcgcgtacctgagattccgcaaggctattttctacaatggcctctacgacagattgcctttcaagacgtggggacagccttacaccgtgtggttctctctcattgttataggcatcatcaccattaccaacgggtatgccattttcatccctaagtactggagagtagcagatttcatagctgcctacatcaccctacccatcttcctggttttgtggttcggccataagctgtatactcggacgtggagacaatggtggctccactgtgtcacgagatcgatgttactacagggctatgttcgagatcgacaagcttga

SEQ ID NO: 81393 - DNA, 1590 bp, Saccharomyces pastorianus
atgaaactcaacatagattataacctagttccattaatcaagtcgaaattatcttcacccgctttattgcaagaggtattaaacaaggctggcagctcagttacacaaaattgtcaaattttgtacttgtacttgaaactattcgaaaatgacgtaaattgcccgaaaataagcgagatttgtatcgacatttaccagaaaaagataaaattccaattaactactcaagtgaaaagacaatttaacgataattcgcccgaactgtttcaaatttttgtcattttgaaatactggcaattaataggacaaaatgatttcaatcaggaattgttttggaaatttgtagacatagtatccccacaaaagaagttaaatctgtacaacgaattcatccctataatacagcaaataatatctcaatgcgttagcctaaactacacaaggatcgttcaattaattaaatcagataacgaactgacttgccgatcaatatgtcatatgcccgatcaagaaaagatgtgttcccttttcttctcccagttccccctattgtcacctcaatccagatcgcttttgataggcgaacttgatcatcattgggatgttagaataagcttactcccgtcgaattcgtatcgaaaatttcgcaacatcattatcaactgtctcgatgattatacaataactcaacagggtgatgtaggacgtctggtaagaatacaggctttaaaacttatgcaatcccatcccgatttcttatctggcgattgcgactccatcaatccaaaattaacgagattgctggcggaacctgtaccagagatcagaaaactatgttatcaattacttgcttcggccacatcacaaatcactgtgttatctgactcttcgatactcaatttccgtcacaagcaaggtttaagtgaagaattctggaaaggatatgcagtgagcgctggagcaatacattttacagattctcagcttacttcatcaatagattcatttatcgtatactacagatctttgtctccttcacaacagctggaattatgtcacgatttaatcagaataattccaagcgctaaacaaatcgctgaatcaagaatacgtgatcgtaacaaggatccgttgacaggtggtatgagatttgacaccatcaaattcaccattcattgtgtaaaattttggactagaatcatggaatctgggttggttgttctacatccaaattttaattttcagggtgttttcgccaagttctataacctacatttattagattgtacgacattgagagtaagcgtgatcaaattcttcccgttcttggcaatatcttgttaccacacaatgagagaaaatgctgaccagaagaatctatccaacataatactgaaaaggttgttggttcttgtgaaacgtgaatacgccgcaacaaaatcaaaatttatgactgatcaaaatgtcgctttacaaggtatgttccagatatttttggaattaggtgtcaccaggcaactccaagctctacaagtggcctgccagaaacatgaattggcgaatatattagagtctgatatcactttatag

SEQ ID NO: 81394 - DNA, 567 bp, Saccharomyces pastorianus
atgaacaatattcgggccttgctggactcgatacaatctggagttcagaccgtttctccagaaaagcaccaacagacgattgccgcgatcaacaaatttcaagatgatcctgcacttctagacaccatactaccgagatgcgtgcctcttttgaccaagtcgttcttttgtatgtcacagcgtgatcagaaacttgttgcggagcttttctacaatcttgacaagatctcccactcaaaagtccttaaatcattagatacaagtatttttagattaaacgaaattttaaactatttacaagatcgagcctcgccctcttctttcagcgatgtcttgtgcgtctatctaaacctttcttggctaagcgtcattctgctttcaccttacgcattcaaagataaattcaacaaaacgcttcaagtatcttccaggttcgagactaccccatttgcatacctccaattaacaagatcaaagccgttttatatttcaaaaacttcacagatgcctttgaccagctaccggaacgggaacaggcaaatgtgccgtttctcaaccaatttttaa

SEQ ID NO: 81395 - DNA, 1821 bp, Saccharomyces pastorianus
atgaaagatgttgaaagatataattctgacgactttgacaccgaattcagggagcctgatatgcctacattcgttccatctagttccttaaaatcctggttaatggacgacaaagtgagagatcagtttgtattacaagatgacgtgaagactagtgtgttctggaactctatgttcaatgaagaagattctttggtggaatctagagagaactggtctaccaattatgttagattctccccaaagggtacctatttgttttcttaccatcaacagggtgtaactgcatggggtggtccaaacttcgatcgtttgagaagattctatcatccagatgtaagaaactcttccgtctctccgaatgaaaagtacctggtcactttctccacggaaccaatcattgtagaagaagataacgaattctctccatttaccaagaaaaatgagggtcatcaattatgcatctgggacattgcttctggtctgttgatggcaactttcccagtgataaagagcccatatctgaaatggcctttagttagatggtcttataatgataaatattgtgctcgtatggttggagacagtttaatagttcacgatgctactaaaaacttcatgccattagaagctaaggctttgaagccttctggtattagagatttctcatttgctccagaaggtgttaaattacaaccattcagaaacggtgacgagccttctgttttattggcttattggactcctgagactaataattccgcttgtactgctaccattgctgaagttcctcgcggtagagtgctaaaaaccgttaacttagttcaagtctccaacgtaactctgcactggcaaaaccaagctgagttcctgtgcttcaatgtcgaacgtcacacaaagtctggtaagactcaattcagtaatctacaaatttgtaggttgactgaaagagatataccagttgaaaaggttgaattgaaagatagtgtctttgaattcggttgggaaccccacggaaatagatttgttacaatttctgttcatgaagtagctgatatgaattatgctatcccagcaaatacaatcagattttacgctccagaaactaaagaaaagactgccaaggacgtaattaaaagatggagcttggtcaaagaaattccaaaaacttttgccaacactgtttcttggtctccagcgggtagatttgtggttgtaggtgctttagtgggtccaaacatgcgtagatcagacctacaattttacgatatggactatccaggtgaaaagaatattaatgacaataatgatgtttcagcttctttgaaagatgttgctcatcctacctactctgcggctactaatatcacttgggatccatctggtagatacgttaccgcatggtcaagttctttgaaacacaaggtggagcatggttacaaaattttcaatattgctggtaacttagttaaagaagacatcattgctggcttcaagaactttgcctggagaccaaggccagcttccattttgtctaacgccgaaaggaaaaaggttaggaaaaacttgagggaatggtctgcccaattcgaagagcaagatgcaatggaagctgacaccgccatgagagatttgattctacaccaacgtgaattattgaagcaatggaccgaatatagagaaaaaattggccaagaaatggaaaaatctatgaatttcaaaatctttgacgttcaaccagaagatgccagcgatgactttaccaccatcgaagagatagttgaagaagttttggaagaaacaaaggaaaaggtcgaataa

SEQ ID NO: 81396 - DNA, 453 bp, Saccharomyces pastorianus
atgaaaaattttcttccacgcacattgaaaaatatttacgaattatatttcaataacatctcagtacatagtatagtatctcgcaacacacagctcaaaaggtcaaagataattcaaatgactaccgagactttcgaagacattaagctagaggacatccctgttgacgacattgatttttccgacctggaagaacaatacaaggtcactgaagaattcaatttcgatcagtacatcgtcgttaatggtgccccagtcatcccatccgccaaagttcctgttttgaaaaaggctttgacttctttgttttccaaagctggtaaagttgttaacatggaatttccaattgatgaagccactggtaagacgaaaggttttctcttcgtggaatgtggctcaatgaacgatgctaaaaaaattatcaagagttccacggtaaaagactggatttaa

SEQ ID NO: 81397 - DNA, 84 bp, Saccharomyces pastorianus
atgtccagtgatgatgaaaatgctccagtggctacgaatgcaaacgctaccactgaccaagagggtgatattcacctagaatag

SEQ ID NO: 81398 - DNA, 1575 bp, Saccharomyces pastorianus
atggcaactctggagtcaagcctgaagggtagactattggtctcacccctttcaatgattgatcttttcattgacgttcgggatcccaattgtgtagaaatctataaaaaaagggttaagaaggatctaacaggttccgaatcggatgagcaactgctcgaaatccatgagatttttttccatagggctcaattagcattattcttgtctgatttgaataatataaccatttcatacagtggttcggttccaatggatacactagaaactttacgcgttaaagccaatgaacttttaaaaaacaaatttcagctaagaagtgtggatattaacatctacgacgaagagaagacatttcaaaaactaacgttcaattcaattttgaattctataagtttatcgggccaaatcttgggtaaattaatgatgttaagggcctcaatagcgctgatgttatattttgaaacacttgcaatggagagaagcgaatgcttatccttcttctataagtatttttttcaatgttgtgccgacaccatttccctaatcagattttttttcctgtatttcaatggcagttacgagaaagttctttcttctttagtttgtttcatcactacaaaagttattcaattggctgttcctaccacgatgtttacccttttggtcatcatcatgcgggtagagctggccaaaaatatgcttctggtcaaatgtaacgaatgcaatgccagaggtgacattagtgacctcccagaaataaaggagaaaataaagtcattggacactatcaaggagaacttcgagaggcttttgttggaagtatatttaattgcgtcccaaaacctgagatttaaatatttctacattttcaagatgttgaccttgtttgacgtattcattcaaaggctgaggaaaggtcaattattttctggtttgtttgtcaaagtagacaaagacttgactaccaaaaaaattgccacaatgttggagttgacacttggaattaacttggacaagtctgaccatttaattgatagactaaaggacaaaaatctcactgttaactttacccttgatcaattccaccaaatcatcaaagaatttgacagaataaaaaacatcggtgttgctgacccacaaaattctctgaatccatcaaaaccaaacatgaaagataatacacccacaattgaacttttactcaactccagcgtggaaaatgagagcgtaccaccgtacagcagctcaaatgaccctacaaatgttggtaatggctccacttatagcttagcacacaatattagtaaccaaaataatgaggaaaacatgcctccgtcaattggttcgagtgaaagtaaccgtgccgctcctaatctaaactttatgccgataaacaataactacaataacagtggttcgaacattaataacaatgacaatgttaagttaccgagtaattttaaaaactactatgaccctcccatgtcttctttggacatatccatggatgttcccgatatttttggtagccttgatttcttcgattatgacctacttttccagaacgactag

SEQ ID NO: 81399 - DNA, 1257 bp, Saccharomyces pastorianus
atgtactttacagacgaatcatcaccggcaatgaatagagtaggtaaaaaaaggaatagactttcttttgtttgccaagcttgcagaaaagcaaagacgaagtgtgaccaggaaaaacctagatgtggcagatgtactaaacaaaacctcttttgtatatatgatgtcgccagacaggcggcccctaggaatccgaataaggatgccaccatagcgagactgaaaaaggagattcgttactggagaaataaaaccgtggatttgattcaagaaaagaaagacttctacactgcattgaaaaggccgactgaagaattagctgctagaaggacatgtaaaagcttgcaggaaaatagctttccaataagtctttataagactcatcccagattgattatgaccaaagtgatgaaaagagaaatcaaccctttatctgagaagtacttaatatttcaagatacctttctgaagacattaattgcctccgtgcttctaagttcttccagaaactccatgattcctgctttaaatgcagatattagtaggtcgaggacacagccatgcgtaaagaataacgttgtaaaaatgagagaggttctattgaaaaactcaaaatacgaatcacaaagaaaatccattaacgagtttacggacaggctactacagagaaagaaccctgaagaacagattgcggtaaataaagtaatttctttattatacagtaacagggaatcgtcatatttagaggatacatgccccaccgaaaacgactattctgatttgttgaaaggctacatcaatgaaatcgagaaaacgctccctcccaaggcaatcattgaacagtacctctctcatttctttgagcatattttccacctaatcccttttgccagcaaggaaatgttggaggaatcaattcacacaacagtacagtataatgaattaggagaggtacgactatcgatgggcacaacccttatacgaaataaaatggagaatctgtgtatcttactgttaattttgaggatcgcgtatatctctttgacatttatagaagataagattgaagattacagtccgtatattaccaaagagatgctagagcaatatccgattcaaagcgaagtaattttcctagcgcagcagatacttgcatcggaaaattggtgtgcttgtgcaaatgaaaataccatttcatgcttactctatatctggtgtgcatttgttttttccccaactgagggtgatttctgttag

SEQ ID NO: 81400 - DNA, 951 bp, Saccharomyces pastorianus
atgataatattggcgtttattatcttcaaaacgtttttgaaagtacttcagaagtttaagattaaaacgattagatatttacacttccacacacattggagtgtacttttacaagggacactatatcgagcggtgttcataatttattccgagatatctcttttagcactttgggagttcactcaaacagactcagcagctaccttagtggaggcaatcgttgttttcattttgattacagtcttgttatcatccgcaagcgtaagaatatggaggaagatgatcaagtctaagaaaatatttggccagccaagctatttactcttcagtagctcgaaattcttaaacaagttcggctttctttactctcaatttaagtctacaaaagtctggtggttaatggcgacctctgcacacatgcttattaggtctatactagtgggttctctacaagcgcacggaaaatctcaatctattggtatctttttgaatgaagctatctatctcatccttttgtgctggatgcaaccttacatggataaaacaaccaacttcttcaatattagtatccattcactgaatttagtgaacgcattttttttcttatttttcagtaacttatttcagcagcccatagctgtgtcttcttttatgggactaattttctttttactaaatgcagcgttttctttgtatctcttcattttcatattgatatgctttacgatggcaatatactacaaacaccctgatacaagatacaaacctattgatgatcaaagacgatcctttttgaagggtgaaatggatgatgatgcggtttacgaatcggtcccggaactgcacgaaatgaagaaagccgttcttgaatgcaacagtattcaaaagccgcagatcaataagattgacctttgtaaacaaaattcgaactgtgaatatctgtatatgtga

SEQ ID NO: 81401 - DNA, 498 bp, Saccharomyces pastorianus
atgagacagatgtacagatatggcgctaacgttggatttattgacttcaccccctggataagcgaatttgacatgaatgataacaaagaaaatttttggccacttattgagcactaccatgaagtaatttcggaagctttaagaaataaaaagcatctccatggcttagggttcaatatacaaggcttcgttcaaaaatatgtgaacattgacaaggtaatgtgcgatcgtgccatcgggaaaagacgcggaggtacattgttaagcaatgtaggtctgtttaatcagttagaggagcccgatgccaaatattctatatgcgatttggcatttggccaatttcaaggatcctggcaccaagcattttccttgggtgtttgttcgactaatgtaaaggggatgaatattgttgttgcttcaacaaagaatgttgttggtagtcaagaatctctcgaagagctttgctccatttacaaagctctccttttaggcccttag

SEQ ID NO: 81402 - DNA, 1011 bp, Saccharomyces pastorianus
atgaatgaaatcgatgagaaaaatcaggcccccgtgcaacaagaatgcctgaaagagatgattcagaatgggcatgctcggcgtatgggatctgttgaagatctgtatgttgctctcaacagacaaaacttatatcgaaacttctgcacatatggagaattgagtgattactgtactagggatcagctcacattagctttgagggaaatctgcctgaaaaatccaactcttttacatattgttctaccaacaagatggccaaatcatgaaaattattatcgcagttccgaatactattcacggccacatccagtgcatgattatatctcagtattacaagaattgaaactgagtggtgtggttctcaatgaacaacctgagtacagtgcagtaatgaagcaaatattagaagaattcaaaaatagtaagggttcctatactgcaaaaatttttaaacttactaccactttgactattccttactttggaccaacaggaccgagttggcggctaatttgtcttccagaagagcacacagaaaagtggagaaaatttatctttgtatctaatcattgcatgtctgatggtcggtcttcgatccacttttttcatgatttaagagacgaattaaataatattaaaactccaccaaaaaaattagattacattttcaagtacgaggaggattaccaattattgaggaaacttccagaaccgatcgaaaaggtgatagactttagaccaccgtacttgtttattccgaagtcacttctttcgggtttcatctacaatcatttgagattttcttcaaaaggtgtctgtatgagaatggatgatgtggaaaaacccgatgatgttgtcaccgagatcatcaatatttcaccaacagaatttcagcgattaaagctaatattagatcaaatatccaaggtaagtgtactatcactccgtttttacatgtttgttggtttgtatctcttcataaatggggtaaatttttcaaaccattga

SEQ ID NO: 81403 - DNA, 339 bp, Saccharomyces pastorianus
atggaagaaatcgcacaagttattaaggacttgggcgacaaaataaatcctaacttctcgttcttaggaatcaactgcgtcagcttcaaccaatcacccgacattcttgagtctctacatcaagcactaccaaatatggccttgcttgcttatccaaacagtggtgaagtttatgatactgaaaagaagatatggttgccaaatagcaataagctgaacagttgggatacggttgttaaacagtacattagcagcggtgcccgtatcattggtggttgttgcagaacaagtccaaaagacatccaagagatttctgcagccgtcaagaaatacacgtaa

SEQ ID NO: 81404 - DNA, 240 bp, Saccharomyces pastorianus
atggagggcgcatgcggcggttcttgtgcctgctccacctgtcacgtcatcgttgatccagactactacgatgccctgccggaacctgaagatgatgaaaacgatatgctcgatcttgcttacgggctaacagagacaagcaggcttgggtgccagattaagatgtcaaaagatatcgatgggattagagtcgctctgccccagatgacaagaaacgttaataacaacgattttagttaa

SEQ ID NO: 81405 - DNA, 135 bp, Saccharomyces pastorianus
atgctcgatcttgcttacgggctaacagagacaagcaggctggggtgccagattaagatgtctaaagatatcgatgggattagagtcgctctgccccagatgacaagaaacgttaataacaacgattttagttaa

SEQ ID NO: 81406 - DNA, 246 bp, Saccharomyces pastorianus
atgactccagccccaaagatctcctacaagaagggtgctgcctccaacagaaccaagttcgtcagatctttggttagagaaatcgccggtttgtccccatatgaaagaagattgatcgatttgatcagaaactccggtgaaaagagagccagaaaggtcgccaagaagagattgggttctttcaccagagccaaggctaaggtcgaagaaatgaacaacatcattgctgcctctcgtcgtcattaa

SEQ ID NO: 81407 - DNA, 1584 bp, Saccharomyces pastorianus
atggccatatcattgggcttgaatagggacctcccctcgtccttcaatgatagcagcattctggaacaaagacgccgaatttggtggtctgtctactcttgggagatccaattgtccctgctttatggtcgatccattcagctttctcagaatacaatctccttcccttcttctgtcgacgatgtgcagcgtaccacaacaggtcccaccatataccatggcatcattgaaacagcaaggctcttacaagttttcacaaaaatctatgaactagacaaaacagttaccacagaaaaaagtcccatatgtgcaaaaaaatgcttgatgatttgtaatgagattgaggaggtttcgagacaggcaccaaagtttttacaaatggatatctccaccaccgctctaactaatttgttgaaggaacacccttggctatccttcacaagattcgaactgaagtggagacagttgtctcttatcatttatgtattaagagattttttcactaattttacccagaaaaagtcacaactagaacaggatcaaaatgatcatcaaagttatgaagttaaacgatgctccatcatgttaagcgatgcagcacaaagaactgttatgtctgtaagtagctatatggacaatcataatgtcaccccatattttgcctggaattgttcttattacttgttcaatgcagtcctagtacccataaagactctactctcaaactcaaaatcgaatgctgagaataacgagaccgcacaattattacaacaaattaacactgttctgatgctattaaaaaaactggccacttttaaaatccagacttgtgaaaaatacattcaagtactggaagaggtatgtgcgccgtttctgttatcacagtgtgcaatcccattaccgcatatcagttataacaatagtaatggtagcgccattaaaaatattgtcggttctgcaactatcgcccaataccctactcttccggaggaaaatgtcaacaatatcagtgttaaatatgtttctcctggctcagtagggccttcacctgtgccattgaaatcaggagcaagtttcagtgatctagtcaagctgttatctaaccgtccaccctctcgtaactctccagtgacaataccaagaagcacaccttcgcatcgctcagtcacgccttttctagggcaacagcaacagctgcaatcattagtgccactgaccccgtctgctttgtttggtggcgccaattttaatcaaagtgggaatattgctgatagctcattgtccttcactttcactaacaatagcaacggtccgaacctcataacaactccaacaaattctcaagcgctttcacaaccaattgcctcctctaacgttcatggtaacttcatgaataatgaaatcacggctagtaaaattgatgatggtaataattcaaaaccactgtcacctggttggacggaccaaactgcgtataacgcgtttggaatcactacagggatgtttaataccactacaatggatgatgtatataactatctattcgatgatgaagataccccaccaaacccaaaaaaagagtaa

SEQ ID NO: 81408 - DNA, 366 bp, Saccharomyces pastorianus
atggaaagaatcatgaaggctcaagccttgagagactcttccatgtcctcctacatgtcttccaagaagactttcgaaatttctccaaaatctccaattattaaggaattgaaaaagagagttgatgagggtggtgcacaagataagaccgtcaaagatttgactaacttattattcgagaccgctttgttgacttctggtttcagtttggaagaaccaacttcttttgcatcaagaataaatagattgatttctttaggtttgaacattgatgaggatgaagaaacagaaaccgctccagaagcttctaccgaagctccagttgaagaggttccagctgacaccgagatggaagaagttgattaa

SEQ ID NO: 81409 - DNA, 1011 bp, Saccharomyces pastorianus
atgttacaacaaaataagattatgaaggttattagaaagaatattgtcaagaaattgattgaagccttcaacgaaatcgctgaagactccgagcaatttgacaaattttactctgccttcgctaagaacattaagctgggtgtacatgaggacactcaaaacagagctgctttagctaagttgctacgttacaattctactaaatctgtcgatgaattgacttccttgactgattacgttactagaatgccagaacaccaaaagaacatctattacatcaccggtgaatctctaaaggcagtcgaaaagtctccattcttggacgccttgaaggctaagaactttgaagttttgttcttgaccgacccaattgatgaatacgctttcactcaattgaaggaattcgagggtaaaactttggttgacattactaaagatttcgaattggaagaaacagacgaagaaaaagctgaaagagagaaggagatcaaagaatacgaaccattgaccaaggccttgaaggatatcttgggtgaccaagtggagaaggttgttgtttcttacaaattgctagatgctccagctgccatcagaactggtcaattcggctggtctgctaacatggaaagaatcatgaaggctcaagccttgagagactcttccatgtcctcctacatgtcttccaagaagactttcgaaatttctccaaaatctccaattattaaggaattgaaaaagagagttgatgagggtggtgcacaagataagaccgtcaaggatttgactaacttattattcgagaccgctttgttgacttctggtttcagtttggaagaaccaacttcttttgcatcaagaattaacagattgatctctttgggtttgaacattgatgaggatgaagaaacagagactgctccagaagcatccaccgcagctccggttgaagaggtcccagttgacaccgaaatggaagaggtagatacggtagaacatcatgggcttgaatag

SEQ ID NO: 81410 - DNA, 720 bp, Saccharomyces pastorianus
atggctagtgaaacttttgaatttcaagctgaaatcactcagttgatgagtttgatcatcaacactgtctattctaacaaggaaattttcttgagagaactgatctctaacgcctccgatgctttagacaaaattagataccaagctttgtctgatccaaagcaattggaaactgaaccagatttgttcattagaatcaccccaaaaccagaagaaaaagttttggaaatcagagattctggtattggtatgaccaaggctgaattgattaacaatttgggtaccattgctaagtctggtactaaagctttcatggaagctctatctgctggtgccgatgtatccatgattggtcaattcggtgttggtttttactctttattcttagtcgccgacagagttcaagttatttccaagaacaatgaggacgaacaatatatttgggaatctaatgccggtggttctttcaccgttactttggacgaagttaacgaaagaattggtagaggtaccgtcttgagattattcttgaaagatgaccaattggagtacttggaagaaaagagaattaaagaagtcatcaagagacattctgaattcgttgcttaccctatccaacttctagtcaccaaggaagttgaaaaggaagttccaattccagaagaagaaaagaaagacgaggaaaagaaggatgaggaaaagaaggatgaagatgactag

SEQ ID NO: 81411 - DNA, 150 bp, Saccharomyces pastorianus
atgatgtcgaacctgaagatgatgaagacacacaaactgagggcagaattcggtccaatcacaaagggtacagaaattgaacaagtcgccaaggaagccaccgaggctttaagagaagaaaccgagaaactgaatataaataaagactaa

SEQ ID NO: 81412 - DNA, 528 bp, Saccharomyces pastorianus
atgggcctacacagtgaaccgttagatcaagaggaccaagacaccataatactcgatgcaagagctggcgatttggattctctgaaagatatatttaccactttagtcagtcccaagttactttcgacttgtaaggaaagtgaatctgattctacggctttacatatggctgctgccaacggtcatatagagaccgttcggtatatactggagacggtttctcgcgcaaatagtgccgaagacttgaaagcttttgttaatgaggtgaacaaaacaggcaacacggctttacattgggcgtcgttgaatggcaaattagacgtggtcaagctactgtgtgatgagtatgaggcagacccctttattagaaacaaattcggccacgatgctatctttgaggccgagaacagcgggaaggaagaagtggaaacgtactttttgaagaagtatgatgtcgaacctgaagatgatgaagacacacaaactgagggcagaattcggtccaatcacaaagggtacagaaattga

SEQ ID NO: 81413 - DNA, 435 bp, Saccharomyces pastorianus
atggctgcagcaaacggccatgttgagacagtccagtacatacttgagacggtttctcgcgagaacagtgctgaagagttgaaagccttcatcaatgaggtaaacgaaacaggcaacaccgcacttcattgggcctcgttgaacggcaaactggacgtggtcagattactatgtgacgaatatgaggccgaccccttcatcagaaataagtttggccacgatgccatctttgaagccgagaacagcgggaaggaagacgtagagacgtacttcttgaagaaatacgatgttgagcccgaggatgatgaagatacacagtgtgagggacaagctggcgttcaaatcacaaagggtacagaaattgaacaagccaccaaggaggccactgatgctttaagagaggaaactgaaaagttaaatataaataaggattaa

SEQ ID NO: 81414 - DNA, 2070 bp, Saccharomyces pastorianus
atggatctcggagatatcatttctcaggtggacccaatcacattattcgttttggtctctgttgtggaagcatttattgcatctggtatcaccgacccatacgaaatgtacaaatacgtacatgtttctgaggttggtaactgttctggttctggtatgggtggtgtttctgccttacgtggtatgtttaaggatcgtttcaaggatgagcctgtccaaaatgatattttacaagaatcatttatcaacaccatgtccgcttgggttaatatgttgttgatttcctcatctggtccaatcaagacacctgttggtgcctgtgccacatccgtggaatctgttgacattggtgtagaaaccatcttgtctggtaaggctagaatctgtattgtcggtggttacgatgatttccaagaagaaggctcctttgagttcggtaacatgaaggccacttccaacactttggaagaatttgaacatggtcgtaccccagcggaaatgtccagacctgccaccactacccgtaacggttttatggaagctcaaggtgctggtattcaaatcatcatgcaagctgatttagctttgaagatgggtgtgccaatttacggtattgttgccatggctgctaccgccaccgataagattggtagatctgtgccagctccaggtaagggtattttaaccactgctcgtgaacaccactccagtgttaagtatgcttcaccaaacttgaacatgaagtacagaaagcgccaattggttactcgtgaagctcagattaaagattgggtagaaaacgaattggaagctttgaagttggaggccgaagaaattccaagcgaagaccaaaacgagttcttacttgaacgtaccagagaaatccacaacgaagctgaaagtcaattgagagctgcacaacaacaatggggtaacgacttctacaagagggacccacgtattgctccattgagaggagcactggctacttacggtttaactattgatgacttgggtgtcgcttcattccacggtacatccacaaaggctaatgacaagaacgaatctgccacaattaatgaaatgatgaagcatttgggtagatctgaaggtaatcccgtcattggtgttttccaaaagttcttgactggtcatccaaagggtgctgctggtgcatggatgatgaatggtgctttgcaaattctaaacagtggtattattccaggtaaccgtaacgctgataacgtggataagatcttggagcaatttgaatacgtcttgtacccatccaagactttaaagaccgacggtgtcagagccgtgtccatcacttctttcggttttggtcaaaagggtggtcaagctattgtggttcatccagactacttatacggtgctatcactgaagacagatacaacgagtatgtcgccaaggttagtgccagagagaaaagtgcctacaaattcttccataatggtatgatctacaacaagttgttcgtaagtaaagagcatgctccatacactgatgaattggaagaggatgtttacttggacccattagcccgtgtatctaaggataagaaatcaggctccttgactttcaactctaaaaacatccaaagcaaggacagttacatcaatgctaacaccattgaaactgccaagatgattgaaaacatgaccaaggagaaagtctctaacggtggcgtcggtgtagatgttgaattaatcactagcatcaacgttgaaaatgatacttttttcgagcgcaatttcaccccgcaagaaatagagtactgcagcgcgcagcctagtgtgcaaagctctttcgctgggacatggtccgccaaagaggctgttttcaagtccttaggcgtcaagtccttaggcggtggtgctgcattgaaagacatcgaaatcgtacgcgttaacaaaaacgctccagccgttgaactgcacggtaacgccaaaaaggctgccgaagaagctggtgttaccgatgtgaaggtatctatttctcacgatgacctccaagctgtcgcggtcgccgtttctactaagaaatag

SEQ ID NO: 81415 - DNA, 1500 bp, Saccharomyces pastorianus
atgaagccggaagttgagcaagaattagctcatattttgctaactgaattgttagcttatcaatttgcctctcctgtgagatggattgaaactcaagatgtttttttgaaggattttaacactgaaagggttgttgaaatcggtccttctccaactttggctgggatgactcaaagaaccttgaagaataaatacgaatcttacgatgctgctctgtctttacatagagaaatcttatgctattcgaaggatgccaaagagatttattatactccagatccatccgaattagctgcaaaggaagagcccgctaaagaagaagctcctgctccaactccagctgctagtgctcctgctcctgcagcagcagccccagctcccgtcgcggcagcagccccagctgcagcagctgctgagattgccgatgaacctgtcaaggcttccctattgttacacgttttggttgctcacaagttgaagaagtcgttagattccattccaatgtccaagacaatcaaagacttggtcggtggtaaatctacagtccaaaatgaaattttgggtgatttaggtaaagaatttggtactactcctgaaaaaccagaagaaactccattagaagaattggcagaaactttccaagataccttctctggagcattgggtaagcaatcttcctcgttattatcaagattaatctcatctaagatgcctggtgggtttactattactgtcgctagaaaatacttacaaactcgctggggactaccatctggtagacaagatggtgtccttttggtagctttatctaacgagcctgctgctcgtctaggttctgaagctgatgccaaggctttcttggactccatggctcaaaaatacgcttccattgttggtgttgacttatcatcagctgctagcgctagtggtgctgccggtgcaggtgctgctgccggtgcagctatgatcgatgctggcgctctggaagaaataaccaaagaccacaaggttttggcgcgtcaacaactgcaagtattggctcgttatctaaaaatggacttggataacggtgaaagaaagttcttgaaagaaaaggacactgttgctgaacttcaagctcagttggattacttgaatgccgaattaggtgaattctttgttaacggtgttgctacttctttctctagaaaaaaggccagaaccttcgattcttcctggaactgggctaaacaatctttattatcattatactttgagataattcatggtgtcttgaaaaacgttgatagagaggttgttagcgaagctatcaatatcatgaacagatccaacgatgctttgattcaattcatggaataccatatctctaacactgatgatactaaaggtgtaaactatcaattggtcaaaactcttggtgatcatttgattgaaaactgtaaacaagttttggatgttgatccagtttacaaagatgttgctaagcctaccggtccataa

SEQ ID NO: 81416 - DNA, 1224 bp, Saccharomyces pastorianus
atggcccttggtggtccaataaccaaagaatctcaacctactattgaagaggatttgactcgtgtttacaaggcgatcagtgctcaagctgataaacaagatatttccaactccaccagggttgaatttgaaaaactatatagtgatttgatgaagttcttggaaagctccaaagaaatcgatccttctcaaacaacccaattggccggtatggatgttgaggatgctttggacaaagattccaccaaagaagttgcttctttgccaaacaaatctaccatttctaagacggtatcttcaactattccaagagaaactattccgttcttacatttgagaaagaagactcctgccggagattggaaatatgaccgccaattgtcttctcttttcttagatggtttagaaaaggctgccttcaatggtgtcaccttcaaggacaaatacgtcttgatcactggtgctggtaagggttctattggtgctgaagtcttgcaaggtttgttacaaggtggtgctaaggttgttgttaccacctctcgtttctctaagcaagttacagactactaccaatcaatttacgccaaatatggtgctaagggttctactttgattgttgttccgttcaaccaaggttctaagcaagacgttgaagctttgattgaatttatctacgacactgaaaagaacggtggtttaggttgggatctggatgctattattccattcgcggccattccagaacaaggtattgaattagaacatattgattctaagtctgaatttgctcatagaatcatgttgaccaatatcttaagaatgatgggttgtgtcaagaagcaaaaatctgcaagaggtattgaaacaagaccagctcaagtcattctaccaatgtctccaaaccatggtactttcggtggtgatggtatgtattcagaatccaagttgtctttggaaactttgttcaacagatggcactctgaatcctgggccaatcaattaaccgtttgcggtgctcttattggttggactagaggtactggtttaatgagcgctaataacatcattgctgaaggcattgaaaagatgggtgttcgtactttctctcaaaaggaaatggctttcaacttattgggtctattgactccagaagtcgtagagttgtgccaaaaatcacctgttatggctgacttgaatggtggttgcaatttgttcctgaattga

SEQ ID NO: 81417 - DNA, 156 bp, Saccharomyces pastorianus
atggaagcttttggtgaattttcgttggaaggttgcgttgaaatggcttggattatgggcttcatttcataccataacggtaatttgaagggtcgtccatacactggttgggttgattccaaaacaaaagaaccagttgatgacaaggacgtatag

SEQ ID NO: 81418 - DNA, 1737 bp, Saccharomyces pastorianus
atggtcaattggatggttttcctgacaaggatacatgacgcacctgtttcgtcgaacataaattgcaaggtgaagaaggtgattgagacgtggttgccgtcatgtgctttagatgaagaactgcatctaccttctcgtgaggaaattgcagccgctttaggatctgtcggttttgatgaagagagaagagcacaaaccgttggatctttatctggtggttggaaaatgaagttggaattggcaagagctatgttacaaaaagctgatattttattgctggatgaacctaccaatcatttagatgtttcgaacgttaaatggttagaagaatacttactggaacatactgatattacttcattgattgtttcgcatgactctggtttcttagatacagtctgtactgacatcatccattatgaaaacaagaaattggcttactacaaaggtaacttggcagcatttgttgagcagaaacctgaagctaaatcttactataccttaacagattctaatgctcaaatgcgtttcccacccccaggtattttaacaggtgttaagtctaacactagagccgtcgctaaaatgactgatgtaactttctcttatccaggtgcccaaaagccttccttaagccatgtctcctgttcattgtctctgtcttctcgtgtggcttgtttaggtcctaacggtgctggtaaatccactttgatcaagctattaactggtgaattggttccaaatgaaggtaaagtggaaaaacatccaaatttacgtattggttatattgctcagcatgcattgcaacacgtcaatgaacataaggaaaagacggcaaaccaatatttgcaatggcgttatcaattcggtgacgaccgtgaagtcttattgaaggaatccagaaaaatatccgaagatgaaaaggaaatgatgacaaaggaaatcgacattgatgacggtagaggtaagagagccattgaagctattgtaggtagacaaaagttgaaaaaatctttccaatatgaggtcaaatggaaatactggaaaccaaaatacaactcctgggttccaaaagatgttttggtcgagcatggctttgaaaaattggttcaaaaattcgacgatcacgaagcctccagagaagggttgggttaccgtgaattaattccttcagttatcaccaaacattttgaagacgttggtcttgattctgaaattgctaaccatactccattaggttctttatctggtggtcaattagttaaagtcgttattgccggtgctatgtggaacaaccctcatttacttgttttggatgaacctaccaactatttggacagagactctcttggtgctttggccgttgctattcgtgactggagtggtggtgtcgttatgatttcgcataataacgaatttgttggtgctttatgtcctgaacaatggattgtggagaacggtaaaatggttcaaaagggctctgcacaagttgaccaatccaaattcgaagatggtggtaatgctgatgccgttggtctaaaggcctccaacttggccaagccatctgtagatgacgatgattctccagctaacatcaaggtcaagcaaagaaagaagagattgacaagaaatgaaaagaagctgcaagccgaacgtcgtcgtctacgttacattgagtggttgtcatcgccaaaaggtacaccaaaaccagttgatactgacgatgaagaagattga

SEQ ID NO: 81419 - DNA, 888 bp, Saccharomyces pastorianus
atgcctccaaagaagtttaaggatctaaactctttccttgacgaccaaccaaaggacccaaatctagtcgcttctcccttcggtggttattttaaaaaccctgctgctgatgccggtagtaataacgcttccaaaaaaagtagctaccaacaacagcgtaattggaaacaggggggcaactaccaacaaggtggttaccaatcgtataacagtaattacaacaattacaacaactacaacaactacaacaattataacaactacaataactataataaatacaatggccagggctatcaaaaatctacttacaaacaatcggctgtgacgcccaaccaaagtggaactccaactccatctgcttctactacatctttgacctctttgaatgaaaagctgtcgaacttagagttaacacccatctctcaattcttgtcaaagatacctgaatgtcaaagtatcactgattgcaaaaatcaaatcaaactaatcattgaagaatttggcaaagaaggtaacagtacgggtgagaaaattgaagagtggacaatcgtcgatgttctatctaaattcatcaaacctaagaatccatcattagttagagaatctgccatgctaataatttccaacattgctcaatttttcagtggaaagccaccacaggaagcatacttgctaccattcttcaatgttgcacttgactgtatttcagataaagagaatacagtcaaacgtgccgcgcaacatgccattgattctttgttgaattgctttccaatggaggctttaacctgttttgtactgcctacgattttggattacttatcatctggtgccaaatggcaagctaaaatggccgctctaagcgttgtagatagaataagataa

SEQ ID NO: 81420 - DNA, 390 bp, Saccharomyces pastorianus
atgaatgacgaaactgttatcaagtatatgagcaagattttgaccgtggattctaatgtgaacgactggaaaagacttgaagattttttgaccgccgtttttggtggttcagattcacaaagagaatttgtcaaacaagactttatccataacttgagagctttattctaccaagaaaaggaaagggcagatgaggacgaaggtattgagattgtcaacactgatttctccttagcttatggttcaagaatgcttttgaacaaaacaaatcttcgtctcctaaagggtcatcgttacggtttgtgtggtagaaatggtgctggtaagtctactttaatgagagcaattgctaatggtcaattggatggttttcctgacaaggatacatga

SEQ ID NO: 81421 - DNA, 141 bp, Saccharomyces pastorianus
atggaaccaagcatactggaagacgctgctagttccacccaaatgcatgctatgccagcccgagatttgagcttgagcagtgttgcaaacgcccaagatgttactaaaaaagcaaacatcctggatcctgattatttgtaa

SEQ ID NO: 81422 - DNA, 1701 bp, Saccharomyces pastorianus
atgattccgggaattgcctaccaagtgcccgatattgatgcgtacgtaagattgaacatttataacaacgtaagtgaaaatttggcttgtatccaggttttcttttccaatgggaaaactgtatcacaaattggggttaaatgggtgacagctgttatcgccggtattggtttattaacttccgctgtcttgtccaccttcgggaactccacagcagcatcccacatttctgcaaacaccatgtcactgttcttatatttccaatctgtcgctgtggtcgcaatgcaacatgtagacagtgttccacccattgctgctgcctggtctgaaaaccttgcctggtcgatgggcttgatccgtattacatttatgcagaaaatcttccgttggtatgtagaggcgactggaggctccgcatctctatatttgaccgcgacaacaatgtcagtgctcactcaacgaggtctagattaccttaaaaatacttcagtttacaagagggcggaaaatgtcttgtacggtaactcaaacactttaatctttcgagggattaaaagaatgggataccgtatgaagattgaaaatacggccatcgtttgtactgggttcacattctttgtgctgtgcggttatttcttggccgggtttatcatggcctgcaaatacagtatcgagttatgtataagatgtggttggatgcggagtgataggttttaccaatttaggaaaaactggaggtcagttctgaaaggatcgttgttaagatacatctatattgggttcacgcaactgacaattttaagtttttgggagttcactgaacgggattccgccggtgttattgttattgcatgcctattcattgtattgtcatgcgggttgatggcgtgggctgcgtacagaaccatttttttcgcaagtaaatctgtggaaatgtacaataacccagctgctttattgtatggtgatgagtacgtcttaaacaagtacgggtttttctacaccatgttcaacgcaaaacattattggtggaatgctcttttaacgacgtatattcttgtaaaagctttatttgtcggattcgcacaggcatcaggtaaaacgcaagcattggctattttcattattgacttggcgtattttgttgccatcatccgttataaaccatatttggaccgtccaacgaatattgtcaacatttttatttgcactgtcaccttggtcaactctttccttttcatgtttttctcaaacttgtttaaccaaaagtatgctgtctctgccatcatgggctgggtgtttttcattatgaatgctgcgttttctttgcttctactgttgatgattctggcctttaccacaatcattctgttttctaagaatcctgactccaggttcaagccagcaaaggatgacagagcatctttccaaaagcatgctattcctcatgaaggtgccttgaataagtcagtggccaacgaattaatggccctaggtaatgtggcaaaggatcataccgaaaattgggaatacgaactgaagagtcaagaaggtaaaagtgaagataatcttttcggagttgaatacgatgacgagaaaacaggaactaattcagagaatgctgaaagtagcagtaaggaaaccacccgtccaaccttttctgaaaggttttacgttcattatcaatcaaaaggaataaga

SEQ ID NO: 81423 - DNA, 450 bp, Saccharomyces pastorianus
atgttaaagaacgatagattggcaaccttacaaccaacatggcatccaacttctgaagaactggctattggtaacattaagtttacaactttcgatttgggtggtcatattcaagctcgtcgtttatggaaggattatttcccagaagttaatggtatcgtctttttagtcgatgctgctgaccctgaaagatttgatgaagcacgtgtcgaattagatgctttattcaacattgccgaattgaaggacgttccttttgtaattcttggtaacaagatcgatgctccaaacgccgtttctgaagcggagctacgttctgctttaggattattgaataccactggctctcaaagaattgaaggtcaaagaccagttgaagttttcatgtgttccgttgttatgagaaatggttatttagaggcgttccaatggttatctcaatatatttaa

SEQ ID NO: 81424 - DNA, 120 bp, Saccharomyces pastorianus
atggaggaagaaaaatcacaaagggataaggagaaaaagaaagaatacttcgcccagaatggtaaaagaacaactatggacggtgacgatgaatctcgtccacgtaagatgaggaggtaa

SEQ ID NO: 81425 - DNA, 861 bp, Saccharomyces pastorianus
  modified_base (760)..(760): a, c, g, t, unknown, or other
  modified_base (767)..(767): a, c, g, t, unknown, or other
atgctaaagtatacaccagaacacacatattgtaatgcggctttctacggtcccttatgttctccaaacacacctttttgtggtgttcaaattgttgctaatagtgataccgggaacggttttagaattgcagcaacaggtatcgttgaagagatagacgttaatattgaaattgttaaaaagttaaaattagttgggtttccatataaaattttcaaaaatactgcctttataaaggacatgttttcaagtgctatggaagttgcaaggtttgagggtgcgcagatcaaaactgtctcgggtatccgtggtgaaatcaaaagggcactttcaaagcctgagggtcactatagggcagcctttgaggataaaatcctaatgagtgatattgtaattctaagatcatggtatcctgtccgcgtcaagaaattctataatcctgttacctcactattgttgaaggaaaaaaccgagtggaaaggtttaagattgacaggccaaataagagcggctatgaacctggaaacaccgtcgaatccggacagtgcatatcataaaatagaacgtgtagaaagacacttcaatggtctaaaggtcccaaaagctgttcaaaaggaattgccattcaaatctcagatccatcaaatgaaaccacaaaagaagaaaacatatatggctaaaagagccgtggtgctaggtggtgatgaaaagaaggcaagatcattcattccaaaaagtattgacgcatttcgcaaagccnaaagcanagccaagcaggcaaggcaaccagcacaggctcagtccacacgtcaatcgacaagcattgcaacacaaattcagcctcaagcatcggcaggcaag

SEQ ID NO: 81426 - DNA, 243 bp, Saccharomyces pastorianus
atggttcatttagagtctgttgtgagatacatttattctcaactatatgttctaagcaggttatcagacagagagtttgccacaggtaaattcaagtttgttcctcctggggtgaaggtcgaaaaactgacaccaaagcaagaggaagagttgaaggccaagaccattgcaaaatatgaagctctagacaaggatcctaaaaccttaccaagcgagagaagtaggctgtcatatacaaactaa

SEQ ID NO: 81427 - DNA, 522 bp, Saccharomyces pastorianus
atgattccagatctatcaagaagagacgatatacatacattactgttgggccgaaacaatatcgttgaagtagacggtcgcctattgcctatgaatgtacagaaccttacattatcgaataacagcataagaaggtttgaagatcttcaaaggttgtgtagagcgcccaggacgttgaagaatctaactttaatagggaatcaagtatgtcatttagccaattatagagaacatgtacttcgattagtaccgcatttagagactttagactttcaaaacgtaacagctgaggaaagaaagagcgcaatgagctttccaaggcaggcggacggcgatacgttgggcccagtaaatactgcaataagagataatggatccagagataaaacgatggagatcatgaatttggtggtgagtaagatgacagtagagagaagaaatgaattgaaaaagcagttagcagaagctacttctttagaagagattgccaggctggaaaaactactctctggtggtgtttaa

SEQ ID NO: 81428 - DNA, 1398 bp, Saccharomyces pastorianus
atggttggttactgtggtactggctaccatggtatgcaatataatccaccaaatccaaccatcgagtctgccctattcaaagcatttgttgaagcaggtgctatttccaaggacaactccaacgatttgaaaaagaatggattcatgagagctgcaagaactgataagggtgtccatgctggaggtaatttaatatcattgaaaatgattattgaagatcctgatatcaagcagaagatcaacgaaaagttaccggaagggataagggtatgggatatcgagcgtgtgaacaaggcgtttgattgtagaaaaatgtgcagttcacgttggtacgaatacttattaccaacttattcactcattggccccaaacctggttctatactttatagagacatcgaagaaagtaaaacagaattacctggtgtattagatgaagacttggaatccaaagaattttgggaagagtttaaaaaagatgcgaatgaaaaattttcaacagaagaaatcgaagctatattagcatatgttccgcccgcaagagatgaatttgatataaatgaagaactataccagaaggtaaaaaagtacaagcaattagaaaatgctcaccgtagaagatatcgtatatccgcggcaaaactggccaaattccgtgcttctacaagtcaataccttggcgctcataacttccataattttacattaggcaaggacttcaaagaaccaagtgccattcgatttatgaaagatataaaagtatctgatccatttgttattggcgatgcccaaacagaatggatttccatcaagattcacggccagtctttcatgctacatcaaattcgtaagatggtatcaatggcaaccttaattacccgttgtggttgccccgtcgaacgcattagtcaggcttacggacagcagaagattaatattccgaaggcacctgcattaggattattgttagaagctccagtatttgaaggttataataaaagactagaacagtttggttacaaggcgatcgatttttccaaatatcaagacgaagtggataagttcaaaatgaagcatatctacgataagatctacaaggaagaggtggacgaaaatgtttttaatgcgttctttagttatattgatagtttcaacaaggttactggagcacagggagaagaaactgccgataaatcgggacctgctgtgcaaaagagtatcttcgaattcttgacagctaagggtatcccaggtcttactgatgcgcccgagagcaataagaagattaagcaaagaaaaagaatggaagaggaggaagctgctagtaaaaaggctgaaatatccagcaccactcagagcaacgaacctgaagtacaaccggaagcggcagctaattag

SEQ ID NO: 81429 - DNA, 1770 bp, Saccharomyces pastorianus
atgctgcaggacaagtatcaaaaggctttacattatttaaaaaaattcaaacatatagatgacaagtacggtcgcaaatttgcgctagaaaaattgtacattttctataaattgaatatgccagatgaattcaacacattgtacacagcaattatcacagatgatctcgatacggtactaaaaaaggatatcgagtcacttagaggtatcctacatgtgagagctcaatattgttataaaaatgggctgtaccaagaagcttttaaaatatatcaacatttagcaagtcacaatgagaaggatcaggatagtcaaattgaactctcttgtaacgaaagggttccgctatccgttgcgacagagttaatgaacagatcacccttagttactcctatggatgaatcttcctacgatttattattcaatgaatcattcatcatggcatccgtaggtaaatatgacaaggctatcgaactattagaaaaagcgcttcaaggagccacgaatgaaggctatcaaaacgatattaatactattaaattgcaattatcatttgttttgcaaatggtggggaaaactgcacaaagtaaagaaatcttaaagggcttattgcaggaactgaaagccgattctccattctctttaatttgtcaaaataacctaaatgcgtttgttgatttctctaaatacaatacaaacttcaatttactgttaagggaattaaacgtagaaaaactaaacacttttaatttacaaaccttcacccatgaacaatggtcaaacattcaacgcaatgtacttttcctgcgtttgttcaacaatgtcaaaattcactctcaagagtcccttttatcaagaacgttcgataaatactctaagttagttgacaatgttactttggaaagctacaagacgcaggccaagaaactttaccaccacactacaaaaaccattttaagtggaacagatggaagtacgattggaatattactactgactatccaattgctaataatagagaaggaatgggaaaatgctatcagaataggagaattatttttaaatgaaagctggaaatcgtcctttgaaaaattcaacgattcacaagccatcgtgtgttacattttatttgaattatacaagattaagggaagaaacaactccaaaagtgttctgcttaaaaaattaggctccgtgagagtccaattgagcggaaaaatccaagaaaacataccattttggaaacacgtcgggtttgaattattgtccatgggtaatgctaaagaatcgaaggctttactcagagagatttcaaactttagtaaaggcgatgcagatgtccttgttgacagagttgtttcgtcagattctttggatatagcacaaggtatagatctagtgagagatattgatattgataaattaattcaacttggtgtgaaacccttagaatcgtcagcaaagagaagtaaaaacaccgcagttagcaaagttcaaaagagaaaagttttagagctaaagaagaaaagaaagattaaacgcctcgaaaaatttttacaaggtcgcgacacctccaaattacctgatcctgaaaggtggctgccattaagagacaggtctacttataggccaaagaaaaaacaacaaggtgcaaaacaaactcaaggtggtgctatgaacaaaaaatcagaacaggcccttgacatatcaaagaaagggaagcccactgttaataaaaagcctaagaacaagaagaagggccgtaaatag

SEQ ID NO: 81430 - DNA, 153 bp, Saccharomyces pastorianus
atgaaagaaagcaaaaaaatggctaaagataatttaactaatttgctctctcaattgaacattcaattgtctcaagacgagcattcgcaggtcgaacagacttgcgtgaaactattggattctggatgtgagaatccagcggatgtatttaga

SEQ ID NO: 81431 - DNA, 900 bp, Saccharomyces pastorianus
atggaaagctccaaaattccatcacctataaggaaagcgacttcttccaaaatgatacacgaaaataagaagctacctaaatttaaatccctatcactcgatgactttgaactggggaagaaattaggaaagggtaaattcggtaaagtttattgcgttcggcacaggagtacaggatatatttgcgcactgaaagtaatggagaaggaagaaataataaagtataatttacagaaacaattcagaagggaggtagaaatacaaacatcgctaaatcatccgaatctaactaaatcatacggctattttcatgatgaaaaaagagtgtacctgctaatggaatacttagtcaatggggaaatgtataaactattgaggttacacggacccttcaacgatattttagcatcagattatatttatcaaattgccaatgccctagattatatgcataaaaagaatattattcatagagatattaaacctgaaaatatactaatagggttcaataatgtcattaagttaacggacttcggatggagtataataaatccgccagaaaatagaaggaaaactgtctgtgggacaattgactacctttctccagaaatggtggagtcaagggaatatgatcacactatagatgcatgggctcttggcgtcctggcgtttgaactactgaccggtgcccctccgttcgaagaagaaatgaaagatactacatataaaaggatagcagcactggatatcaaaatgcccagtaacatttctcaggatgcgcaagatttaatacttaaactactaaaatacgaccccaaagatagaatgcgccttggagacgtaaaaatgcatccttggatactaagaaacaagcccttttgggaaaataagcggttatag

SEQ ID NO: 81432 - DNA, 1341 bp, Saccharomyces pastorianus
atgaaaagttcgaaggtatatttaaagagtggtttgaactggtcagttcttcagatatgtttgacttggaacagagtggcagatgatgtgcagaccttccataatctcgatgagttgacatatgaggctttgtatgagaagattttgaagataacagaacttcaaagaccaactatctggtattcttttcctgcatttttatggtcgcaccttatattcatttcaagagcattccctgaatatgtgctaaacagaaactgtcctgacaactctattgtactgcttcccatcgtcgatcttctaaatcatgactaccgttccaaagtcaaatggtatcctgaaaatgggtggttctgttatgaaaaaatcggtaccgcctcccaatcacgagaactatcaaataattatggcggtaagggaaatgaggagttactctctggatatggatttgttttagaagacaacatatttgactcagtggctttgaaagttaaattgccattagatgtggtatctacaattcttgaaacagaacctagtttgaagctgcccttactttcggattacaccacttatgcttttgaaaacaaagactgtgtccagcaagaaaagaaggctactcgtagtgctacagactacatcaatggggtgacttacttcattaacatacaaaatgaacaatgtttagaaccattactggatctttttacctacctttctaaggccgaagaggaggatctacacgatttgagagcccgtttgcagggtatacaaatgctacgaaatgcattgcagagcaaactcaacagcattactggaccacctgcaactgatgactcttatgcaattgatccttacagagtctattgtgctgacgtttatactaaaggtcaaaaacaaattttaaaagaggctttaacgaggttgaaaaaactagaaaaaacaatgctgtcagagaacaagcaccaattgctaaccatgagcaaaattcttaagaatgaccctgcttttgcagaaactgaattaccttcgctgttcagcaacgaagatggtgaagaggtcatctttgaatctacttatgatttattgatactttggattctactgaaaacgaaaaagaattcttaccccaccaaatatgaatgggttggacagcagtatactaatttcaagcaaactgcatatatttcagatgatgccaaggctttccatactgcatacttcgagaagcaagacgatgtggatttggccgaagtagatcatgcgattcagtttgtagtagacaattcctttaccagaacttcatctacaaccgaagagactattttagtacgtaagtag

SEQ ID NO: 81433 - DNA, 498 bp, Saccharomyces pastorianus
atgtcatcagatgcgttaaaagcactacttcagtggggtgcgtcatttggtgtaatagtgccagaggaactcaagtttttatataccgatcttaagggcattatttgcgtatgtgaaaaagatatagacaatcccagcatcaagattcctcccgagattgtcatttcaaggaatctgcccatgaagttttttgggctaagtgaatccactaagaatatcaacggatggctgaagttgttcttcgcaaaaataaaatttgatagggataatgatactatcgtggacaatgttcgtgtgaatgataaatttaaaccttacttggatgcattgccttcccgcctaaattcgcccttggtctggaacccaagcgagttgaagcgtttatcatctacaaacttagggaattcgattcatgaaaagttcgaaggtatatttaaagagtggtttgaactggtcagttcttcagatatgtttgacttggaacagagtggcagatga

SEQ ID NO: 81434 - DNA, 204 bp, Saccharomyces pastorianus
atgtgttttcaccaccaaatgctttcctcgagtgtcgaacctttcttctctttgtatttcaatcacgttccatatatgtggtcgtgtttcaactttttttcttcgtctccttttcctcgttgcaccaaaaattctccagaaaaaaagaaattcaaacgtgggctgcctattagtagtaaatacacagacgggaagaagcgttga

SEQ ID NO: 81435 - DNA, 927 bp, Saccharomyces pastorianus
atgagaacgcttggtactggatcttttggtagggttcatttggtgcgctctgttcacaatggtcggtattatgctataaaagttttaaagaaacaacaagttgtcaagatgaaacaggttgaacataccaatgacgaacgacgtatgctaaagcttgtggagcatccgtttctgattagaatgtggggtacgtttcaagatgctaggaatatctttatggtgatggattatatcgaaggtggtgaacttttctcgttactgagaaagtcacaaagatttcctaatcctgtagcaaaattttacgctgcggaagtcatactggcattagagtacttgcatgctcataatatcatctacagggatttaaagccagaaaatatcttgctggatagaaatggccacattaaaataaccgattttgggttcgccaaagaggtacaaactgtcacatggacgctttgtgggactcctgattacattgctcctgaagttattaccacaaagccatataataagtcggtggattggtggtctctaggtgttctaatctacgaaatgttagctggttatacacccttttacgatactactccaatgaagacgtatgaaaagattttacaaggtaaagtagtatatccaccatattttcatcccgacgtcgtggatctactaagcaaactgatcactgcagatttgacaagaagaatcggtaatttacaaagcggttccagggacatcaaagctcacccatggtttagtgaagttgtatgggaaagattgttagcaaaggatattgaaactccatacgagcctcctatcacatcaggtatcggtgacacgtctttattcgatcaatatcccgaggagcagctagattatggtattcaaggcgatgatccatatgctgaatactttcaagatttctaa

SEQ ID NO: 81436 - DNA, 393 bp, Saccharomyces pastorianus
atgtggctactgaaaatatccaataacaaacagaaacatatgcaagaaatgggcataaaggaagatgaactgaagagccaacctagcattttcaaagagtcaaggaaagaaaagcaatttatacagagtattcaaaatcaagtgcagagaggaaatccgaagattgacttgaacttgaaattgatacagcgagaatttgcaaacgaaaactcccaacttttggactttataagagaattgggagatgtaggattacttgaatatgagctatctcaacaagaaaaagatgtactttttgggagctctgaagataataataaaaatcattacaaaccaaattacaaaaacaggaaacctaatctgagtagagccaactttactagaaataagtaa

SEQ ID NO: 81437 - DNA, 387 bp, Saccharomyces pastorianus
atggaccagcaacaactattatctgccattcaagaccttccacctaacgttgtatcgaatttgctttcaatggcccaacaacagcaacaacaacctcatgctcagcagcaattggttggtttaatacaatcaatgcaaggccaggctcctcaacaacagcaacaacagttgggtggatattcctctatgaactcatcctctccccctcctatgagtaccaattacaatggtcaaaatatatctgcaaaaccctctgccccaccaatgtcacaccaacctccgccacctcaacaacaacaacaacagcagcagcagcaacagcaacagcaacctgctggcaataatgttcaaagtctattagatagtttagcaaaactacaaaaatag

SEQ ID NO: 81438 - DNA, 666 bp, Saccharomyces pastorianus
atgcaaatcaatatcaaatatgcctttggattcattcagtttgacaaccctcaaagcgttagagatgcaattgaatgcgagtctcaagaaatgaactttggcaaaaagttgatcctggaagtttctagctcgaatgctcgtcctcaatttgatcatggtgatcacggtacaaacagtagttctacttttatttcttctgcaaaacgaccatttcaaactgaatctggtgacatgtacaatgacgacaatggtgctggctacaagaaatccagaagacacaccgtttcttgcaacattttcgttaaaagaaccgcagatcgtacgtatgccattgaggttttcaacaggtttagggacgggactggtttggaaactgatatgattttcttgaaaccaagaatggaactgggaaagcttatcaatgatgccgcatataatggggtgtggggcgttgttttagttaataaaacacacaatgtagatgttcaaactttctacaaaggctcacaaggtgaaacgaaatttgatgaatatattagcatatccgctgatgacgcagttgccatttttaataacatcaataacaacagaaataattctcgtcctactgattaccgtgctatgagccatcagccatacatatatggcgttccggcctcgtatggt

SEQ ID NO: 81439 - DNA, 612 bp, Saccharomyces pastorianus
atgatcgcgctgttcaacttgaacattatgtatttggaacttttgatcccatggaggctctttcggctgtgggccatggtcgatggtattgatgcacctgaaaatatgctacgatgtgtggataataattatagtacagtggggttctggagagcctggcatacaagttttaacaagtgggtaatccgttacatctatgttccatttggcgggtccaataacaaaatattaacgagctttgccgtattctcatttgtagcaatatggcatgacatccaattacgagtgttgttttgggggtggttaacagtccttttattattaggcgaaacctacattactaactgttttagtagatatagattcagaagctggtacaggtttgtttgcggtatcggtgctgcaataaatatttgcatgatgatgattattaatctctatggattttgcttgggtgcagagggaacgaagcttctattgaagggcatatttaacaattcacatagtccggagtttttgactgcggtaatggtaagcctatttattgctgttcaggtaatgtttgagattagagaagaagaaaaaagacatggcatcaacttgaaatgttga

SEQ ID NO: 81440 - DNA, 1155 bp, Saccharomyces pastorianus
  modified_base (996)..(996): a, c, g, t, unknown, or other
atgtcgatgttaagaatctggagttgcatcgtacatttcttttccgtgcaggcacttgattcacgaataaagccagacattgaattcaaaaggcgacaaaggatatttatcagttcatctaaagaagaaaatggttcatcttcaagtgccgttactgttacccgtaaccctgtgctcagctctaatagcccatctcctccgctatggaatacatgggaatttagactatattatttggcgttcaccgtagtagttcctttcatgataaaggcggcactggctacgagctccgagtctaatccaaactactataaatccagcggactgctagcccatggttggattctgggccgcaaagtggataacagcgatgctcagtataggttttttagatccaatttttttttgttggccatcttaatattactacaaattatattaaaaaaggtttttgttaaatttagtaaaattccgaaaacaaaattcgattttgcgtgtggattagtttttgtctgtttcatgtacgggatcaattctgttaagctctttacgcatgcttttattttcttcactttggcacattcgctaaagagaaagcgtttgatagccgcttttgcgatttggtcctatggtatctttacactattcatcaatcaaaaaatgaaaaatctcccctttaataatattgctatcatcctaagtcccatggatcaatggtataagggtatcgttcctcgatgggatttttttttcaattttacattattgcgtttgttaagttactccatggattttttggaaagatggcatgaacaattgagccgccaaccttcgatagattacgatgatagacgacctgaattcaggaaaagtttatctggttctactctacaaaccatttatgagtcaggtaagaatgttctggaggaaaaggaacgactggtagcagaacatcacatccaggattacaactttatcaattttatcgcttatatnacctacgcgccattgtttttagtgggcccaattatcacttttaatgactacctttatcaatcagaaaataagcttccttcgctaacgaaaaaaaacataggcttctatgccctcaaagtattttcgagtttgcttttgatggaaattatcctacattaa

SEQ ID NO: 81441 - DNA, 261 bp, Saccharomyces pastorianus
atgtacaagagagaagccgacgctgaagcttggcattggttgcaactaaaacctggccaaccaatgtacaagagagaagccgacgctgaagcttggcattggctgcaactaaagcctggccaaccaatgtacaaaagagaagccgacgctgaagcttggcattggttgcagttaaagcctggccaaccaatgtacaaaagagaagccgacgctgaagcttggcattggttgcagtttaaacccggccaaccaatgtactaa

SEQ ID NO: 81442 - DNA, 129 bp, Saccharomyces pastorianus
atgagatttccttcaatttttactgcagttttattcgcagcatcctccgcattagctgctccagtcaacactacaacagaagatgataacggcacaaattccggcctgaagctgtcatcggttacttag

SEQ ID NO: 81443 - DNA, 1491 bp, Saccharomyces pastorianus
atggaatttgtagaagataaggacaactctgcggtcttctcagtaacaaatagggatggctattatgtattgattgagttgacgaaaaacaatttggaagagggtccctaccgactaagttataaggtcttgcattctaataagatgatgaaaggtttcttggagggcgctttctttaattcaaaaggtgaatacattacttatgggttcaagtccagcttgttttatctctacaatgaaaccaactgttatgaactagctagtgaagtttgtggtggttcccatcgtctgtggaatctcgcaaaaattactgacggccacgtattaatgtatatcaaggcatcccgatttcatctaaggaaaatttacaactccattgtccctgaaactttagaaaatggtgtacacggaagggaaatcagagatatttcaatctgtcccgtttcaaatatcaacacgaatgacaatttcaaggatgggcatatattctgtactgcatctgaagatactacaattaagctgggatattttaacaatagaacagggaaggtgcagaatttttggacacaaagaaagcatgtgtctggattacaacgttgtcagtttataaatcacaaactaatgatatcatcttcagctagagaggagttattcttatgggaattgaacgataagtataataaacgaccatatatgaccatacgacaagctttacctgtatccacaactaatcctgatctaaggatcatggattttgatgtcaagtttatatcacagtcaggtgacttcttattagttactgtttattcagattcaacaataaagatttggcactatagggaaaatcagaataagtttgacctgatcatgcaaggtcgttataagacgtgctgtttattcaacgtcgtatttattgcgctgaaagaagagcttcttgttgtcatttcaccaactgatggacatttagtggtttataatataaccgagtacgtaccattttccgttgatccgatttctggcgatttggttgaccacaaactggaccctactatctcaaatcttcccgcacctgtagtgcagttgccggtacatcaatctggtatcaagtccttagactatgttgctaatgctacaagaacttccgccacaattttgacagggggtgatgataatggtttagggttgagcaacctgaaattatatgactcgaataaagtaacgttaaaaacaagtgactttatcgctgcagcagcttcttcgacaataacatccggtatgttgattaatggtggcaaagaagtcattaccacatcggttgatcaagtaatacgcgcttgggaaattaccgcaggcaagctttcactggtagataaaaagcgtaccactgtggcggatacaggatcattagatatcatttccaatgatgaagatgctgattctgagaaaacgttactgatcggaggtgttggtttatcaatttggaaaaaatga

SEQ ID NO: 81444 - DNA, 123 bp, Saccharomyces pastorianus
atgggttccagcacgactttgcaccaccaacgcgtcattaactctctgcagccgactacgagggcagtgaatcgcaggatggaaaatgtgggctacatgcatacacagccacaacaaaggtga

SEQ ID NO: 81445 - DNA, 1191 bp, Saccharomyces pastorianus
atgtctcttaggagacaaagttctaaacaacacaaattattaaacgaagaagaagatctaatcaagcctgatgatatttcttccgctggtaccaaggatattgaagggcatagcttactggaaaattatgcacctaatatgattctctcccagtcgactggagttgaacgtagatttgaaaattcatcatccatccaaaattcgcttgggaatgaaattcatgactcgggtgagcatatggcttcaggtgatacttttaatgaactggatgatggcaaattgcgcaagagcaagaaaaatggtggaagatctcaacttggccaaaatataccgaactctcagtctactttccccaccactgctaacatcggtagtaaagataataatgtaccacagcacaacttttcgacctccatatcgagtttaaccaataatttgaggagagctgctcctgaaagcttccatggttcaagaatgaataatatttttcacaagaaaggtaatcagaatctacttttgagatccaacgatctcaacaaaaattctgcagccccgacctctccattgtccaacgaacatatcacatctagtacgaactccggtagcgatgcaaacagacaatccaactcaggtgccaaatttaatagcttcgcccagttccttaaatcagatgggattgatgcagaatcaagaacacaaagaaaattatggttgcagagggagaattctattatggacttaagttcacaaaatgacggtagtgactctatctttatggcaggaaacattgatgcgaaaagggagtttgagagaatatcccatgaatactctaatgtaaaaagattttacaacccattagatgaagcgttgttgagagtacaacctataataacgggaaatgcaaataatatcaggaaaaaaagccataacgatgctcagtcaatcgcacattctagcagtgatacagatcataaggatgaggacgattgctctttactaactatgacaaaaaatttgaagatctttatccacatcttgcaagtgcaaagattcaggcagtgttgtccggtatatggaaaagcgaaagttacttatttaacaaggatgttaatccaatcaacaagaataggacaacgagtacaaaccacagcgttggccacactgcttcacagaatgcacgtaacttgctga

SEQ ID NO: 81446 - DNA, 774 bp, Saccharomyces pastorianus
atgaatgctacgttacaagaaaaggccaaagatgcgaataatctcgaacatagtttgactaaagacgacattaaacagtatatcaaggattacatccatgccgctaagaattctatcgcggctggcgccgatggtgtagaaattcatagcgccaatgggtacttgttgaatcagttcttggatccacattctaataagaggaccgacgaatacggcggaacgatcgaaaacagggcccgctttacactggaggttgtcgatgctcttatcgaaactatcggtcctgaacgggtgggtttgaggttgtcgccatacggcacttttaacagtatgtctggaggtgctgaaccaggtattatcgctcaatatgcttatgttttgggtgaattagagaagagggcaaaggctggtaagcgtttggcctttgtgcaccttgttgaaccacgtgtcacggacccatcgttggtggagggcgaaggagaatattccgagggtactaacgattttgcctactctatatggaagggtccaatcatcagagctggtaattacgctcttcatccagaagtggttagagaacaagtaaaggatcccagaaccttgataggctatggtagattcttcatctccaacccagatttagtctaccgtttagaagagggcctgccattgaacaagtatgacagaagtaccttctacaccatgtccgcggaaggttataccgactacccaacatatgaagaggcagtagatttaggttggaacaagaactga

SEQ ID NO: 81447 - DNA, 123 bp, Saccharomyces pastorianus
atgccatttgtaaaaggttttgagccgatctccctaagagacacaaacctttttgaaccaattaagattggtaacactcagctggcacatcgtgcggttatgcccccatttgagccagaatga

SEQ ID NO: 81448 - DNA, 1140 bp, Saccharomyces pastorianus
atgacaaataacccgataaccaccgataagttgtatcgcactgaaatgttaagattatttccgaaattggttgtactagataacgtgattgtgagagacgaacaaaaattgcaaaccgtttactcattaccgatgaagattcaacagttttttttcgaaaacgatgcattagggcaatcatctacagactttgcaaccaactttttgaatctatgggataataatagagaacaactgttaaatttgtattcgccccaatcccagttttctgtttccgtggattctactattcctccatctacggtaacagattcggaccaaactccagcatttggttattacatgtcgtcctcacgtaatatatccaaagtgtccagtgaaaaatctatccagcagagattgtcaatcgggcaagagtccattaatagtatattcaagactttgccgaaaacaaagcaccatttacaagaaccacccaatgaatactcaatggaaacaattagttatcctcaaataaatgggttcgttattacgttgcacggattttttgaagagactggcaagcctgaactggaatccaataaaaaaacggggaaaaataactatcaaaagaatagaagatacaatcatggttacaactccacatcaaataataagttatccaaaaaatcctttgatagaacctgggtaattgttccaatgaataatagtgtcataatcgcatctgatctgttaactgtaagagcgtattccacaggcgcttggaaaactgcatctattgcaatagcacagcctccacagcaacaggcctcggtcctaccacaggtcgcaagcatgaacccaaatataacgacaccaccgcagccacaaccttcagtggtaccaggagggatgagcattcccggcgcaccccaaggagccatggtcatggctcccactttgcaactacctccagatgtccagtcgcggctaaatcccgtacaactcgagctgctgaataaactacatttggaaacgaaattgaatgcagaatacacgtttatgttggccgagcaaagtaactggaactatgaaattgccataaaaggttttcagagtagcatgaatggcatccctagagaagcatttgtgcagttctaa

SEQ ID NO: 81449 - DNA, 321 bp, Saccharomyces pastorianus
atgagcggatttcacaatgttggaaatatcaatatgatggctcaacagcagatgcaacaaaatagaataaagattagcgtgaggaactggcagaatgcaaccatgaacgatttgattaattttataagccgcaacgctcgagtagctgtttatgacgctcatgtggaaggacctttagttattggatatgtcaactcaaaggcagaagcagaatcgttaacgaaatggaacggtgtccggtttgcaggcagtaatttaaagttcgaacttttagataacaatggggcctctgcgggacttcagacaccatttcgttcttga

SEQ ID NO: 81450 - DNA, 4644 bp, Saccharomyces pastorianus
atgagtgcagtgcgtctggaaatagtgtacttgaagaaaaaagccatctctgtaatagaagcacaaaacaagagaaagtatttgagtcaatacaaaactacaagttgtggcgaaataaaatgtttggaaatgtcgagggagtcgaacgacacaatacagagcgatacgattagatcatcctctaaatcagactattttagaatccagctaaataatcaagactactatatgtcaaaacccacctttttggacccatcgcacggcgaaagcctgcccttaaaccagttttcacaggtcccaaacatcagggtgtttggtgctttacccacagggcatcaagtattgtgccacgtccatggcattctaccatacatgttcatcaagtatgatggtcaaataactgacacgagtacattgagacaccaaagatgtgcccaagttcataaaacgctggaagtaaaaattagggcatcctttaaaaggaaaaaagatgataaacacgatttagccggcgacaaacttggaaatctcaattttgtcgctgatgtctctgttgtaaagggtataccattttatggttaccacgttggctggaatctgttttacaaaatttctttgcttaatccttcttgtctaagtaggatttcggaattgattagagatggcaagattttcggaaagaaattcgaaatttatgaatcacatattccttacttgctacaatggaccgcagattttaacttatttggatgttcatggataaacttggataggtgttattttcgctctcctgttttaaatagtatactggacatagataagctgacaattaatgatgatcttcagttgttactagatcgattttgtgacttcaagtgtaacgtactcggtagaagggattttccacgggttggaaatggattgattgagatagatatactaccgcaattcatcaaaaatagagaaaagttacagcatagagatatacatcacgactttttggaaaaactgggagatatttctgacatacctgtcaaaccatatgtatcctctgctagggacatgataaatgaacttaccatgcaacgagaggatttgtccttgaagaaatataaagaaccaccagaaacaaagcgccatgtgagtggtcatcaatggcaatcttctggagagttcgaagcgttttataagaaagcacaacataaaacaagtacttttgatggtcaaataccaaattttgagaactttatagataagaatcaaaaattctcagccataaatacgccctatgaagcattaccgcaattgtggccaaggcttccacagattgaaataaacaataatagtatgcaagataaaaagaacgacgaccaagttaatgcatcgttcaccgaatacgagatatgtggtgttgataatgagaacgaaggtgtaaaaggaagcaatataaagtctcggtcttattcatggttaccggaaagcattgcgtctccgaaagattctactatactattagatcatcaaacaaaatatcacaatacgataaatttttcaatggattgtgctatgacgcaaaatatggcaagtaaacgaaaacttagatcatctgtttctgctaataaaacatcgttgctgtctcggaaaagaaagaaggttatggctgcgggattatgctatggaaaaagagcctttgtttatggtgagcctcctttcggttatcaagatattctgaataaattggaagacgagggattcccaaaaatagactataaggaccctttcttttcgaatccagttgatctagaaaataaaccttacgcgtacgcaggtaagaggtttgaaataagctcgacacatgtatcaacgagaatacccgtccaatttgggggagagaccgtatcagtttataacaagccaactttcgacatgttttcctcctggaaatatgcgttaaaaccacctacgtatgatgctgttcaaaaatggtacaataaagtaccctcgatgggaaacaaaaaaactgagtctcagataagcatgcacacccctcatagtaagtttttatacaaatttgctagtgacgtttccggaaaacaaaaaagaaaaaaaagtagcgttcacgattctcttactcatctgacacttgagattcatgcaaacacgagaagtgataaaattccagaccctgcaatagatgaagtttccatgattatatggtgtcttgaagaagaaactttccctttagatttggatatcgcttacgaagggattatgatagtccacaaagcttctgaggatagtacatttcctactaaaattcaacattgtattaacgaaattcccgtgatgttctatgaaagtgaatttgaaatgtttgaggctctaactgatttggtattacttcttgatcctgatattctttccggtttcgaaatacataatttttcatggggttatataattgaaaggtgtcaaaaaatacatcaatttgacattgtcagggaacttgccagagtcaaatgccaaattaagacgaagttgtcagatacttggggatatgcccattcctcaggaattatgattaccggaagacatatgattaatatatggagagcgttgaggtccgacgtaaatttaacgcaatacactattgaaagtgctgcgttcaatatcctccataaacgattacctcacttttcatttgagtcgctaactaatatgtggaacgctaaaaagagcacaaccgaattaaagactgtgttaaattattggttatcaagagctcagataaatatacaactattaagaaagcaggattacattgctcgaaacatcgaacaggcaagattgataggaatagatttccattctgtatattacagaggatcacaatttaaagtagaatcttttttaatccgaatatgcaagtccgaaagttttatccttctttctccaggcaaaaaggatgttcgtaagcaaaaagcacttgaatgtgtgcctttggttatggagccagaatctgctttctacaaaagtcctttaattgttttggatttccaatcattatatccatccattatgattggatacaactattgctattcgactatgataggaagagtccgagaaataaactcaacggaaaataaccttggagtatctaagttttcattaccaagaaatattttagctttattaaaaaatgatgtaactatcgctccaaatggtgttgtttatgccaagacctctgttagaaaatcaacgttatccaaaatgttaacagatatccttgatgtcagagtgatgataaagaaaacaatgaacgaaataggtgatgacaacactaccctaaaaaggcttttgaataacaaacagttagcactaaaattattggcaaatgtcacctacggttatacatcagcttcattttctggacgaatgccatgctctgatttagctgatagcattgtacaaacaggcagagaaacattggagaaagcaatagatattattgagaaagatgaaacttggaacgccaaagttgtctatggagacacagatagtttatttgtatatctacctggaaaaactgctattgaggctttttctataggacatgctatggcagaaagagttactcaaaacaatccaaaaccaatctttttgaagtttgaaaaagtataccatccctccatattaattagcaaaaaaaggtacgtaggattttcctatgaaagtccttcgcagacccttcctatttttgatgctaagggtattgaaactgttagaagggatggtatcccagcccagcagaagattattgaaaaatgtattcgattactttttcaaaccaaagacctgtcaaaaataaaaaagtatcttcaaaatgaattttttaagattcaaataggaaaggtatctgcccaagatttttgttttgcaaaagaagttaaattaggagcgtataaaagcgaaaagacagcccctgcaggtgccgtggttgtaaaaagaagaataaatgaagaccatagagcagaaccccaatacaaggagcgtataccttaccttgttgttaaaggaaagcaaggacaactgcttcgggaaagatgcgtatcaccagaagagttcttagaaggtgagaatttagagttagattcggagtattatataaacaaaattctgatacctcctcttgatagattgttcaatttgattggtataaatgttggtaactgggctcaggaaatagtaaaatccaaaagggcgagcacaactactacaaaagtggaaaacataacaagagtaggaacttctgcaacatgttgtaattgtggtgaagaattgactaaaatatgttcacttcagttatgtgatgactgtttagagaaaagaagcaccacaaccttatcatttctcataaagaaattaaagagacaaaaagaatacgaaacactaaagaccgtgtgcaggacgtgcagttatcgttacacttccgatgcaggcatcgaaaatgaccatatagctagtaaatgcaattcatatgactgtccagtattttactctcgtgtcaaagcagaaagatacttgagagataatcaatctgttcaaagggaagaaacattaatatctctaaatgattggtaa

SEQ ID NO: 81451 - DNA, 723 bp, Saccharomyces pastorianus
atgctgaaaagatataattatacctctgaacaggaggaaaaattaaactctatcttaatttcggaaaatgtcatacagtcttcatgggatgagattgaaaataaatggataccgcgcatcaacaacatgaaatctgcgaagagaataaatcaattaccacccacttgcgaagatgaatattgctgcattaggtttgtgtgcgagagtttgtttaatcttaaatatatggatcctcagtgcataacataccgagctttcaatatgttacaatcgaatgagcttagcaaaatatctaaatttcctgtcttactgcactttcaaaaattagtatttcaaacactctatattctattaccttcacatttgcatagaatgctctccataccgctattgagacatatattaggtactgaatatgggaatgcttttggtttatggcaagagggcgaagcctcagacagcagagaatattttggatactgggtatttccagaagcctcctatttcaaccactcttgtaaccccaatataacgaaatatcgtaaaggtaattcaatgctattcactgtgaatagagatataaaaaaggatgagcagatctgtatcgattattccggggtactggacttaccaacagtaaaacgccgggcctttttggccgacagttggttttttgattgtacttgtgaaagatgtaaatcagaattgcaatctgtccattag

SEQ ID NO: 81452 - DNA, 1341 bp, Saccharomyces pastorianus
atgcccgttcgattgaaggatcttcaagtgatatatatcaatggcagacgttatgcggacagcgcctttcaaggatacgtcgattctttgttccaagcacaagatttcggagagaaaagcatgagtttactcaaaattaaaagcgtgggaaaaccgtatcgatcacatcccgtcttcatccttgatgttcggtgcccccaaactatcgatgatctgttacaggatccagcaaagaaaattgttaaaccttcccatatacgtaccattgaaccattgatcgttaagaccattcgctcctttctgacatttcaaggatacttaacgcctgataaatcagattcatctttcgaaatagtcaattgttcacagaagacgacaacattgcctaatagtcgaagccaaatcagtaaacgtaaccaagtattaaattcaaaaatgaagattgcacgcattaattcatacataggaaaacccgttgtcaatggacgtagaataaacaatagtacaataaactacgaaaaaatcaagaatataagactcgacggtcagaaatcaagcttacggaataaactctcttccaggccctacgatagtggttttacagaagattatgacagtataggaaaaaccataacagatttttcaatatcaagatctgtcctggcaaaatatgaagtgattaatcaagtagataaaaaatttattctcatacgttgtttagaccaatctattcataattgcccactattagttctagttgatcaacatgcttgcgatgagaggataagactagaagagctattttatagcctgttgacagaagttgtaaccggaacttttgttgcacgagacctcaaggattgttgcattgaagttgatcgtactgaggctgacttatttaagcattatcaaagtgaatttaaaaagtggggaattggctatgaaacaattgagggaacaatggaaacctcacttttggaaattaaaacactgcctgagatgttgacttccaaatataacggagataaagactacttaaaaatggtcttgctgcaacatgcacatgacctgaaggatttcaaaaaacttccaatggatttatcccatttcgaaaactacacttcggttgataaattatattggtggaagtactcaagctgcgttccaacggtctttcatgaaattcttaacagcaaggcatgcagatctgctgttatgtttggggatgaattaacccggcaagagtgcataattttaattagcaagctctcgcgatgccataacccattcgaatgcgcccacgggagaccttctatggtacccattgcagaattgaagtaa

SEQ ID NO: 81453 - DNA, 609 bp, Saccharomyces pastorianus
atgagccagcatattaggaaattagattcgaatgtttctgaaagacttaaatctcaggcatgcacggtatcgctagcatcagcggttagagaaatagttcaaaattctgtagatgcacacgctaccactatcgacgtcatgatcgacctccctaatttgagctttgcagtttacgatgatggtattggtttgactcgaagtgacctaaatatattggccacacaaaattatacttccaaaatacgaaagatgaatgatttagtaacgatgaaaacctacggttacagaggagacgccctatatagcatttctaatgtctctaatctgtttgtttgttccaagaaaaaggattacaactctgcatggatgagaaaatttccatccaaaagcgtcatgttgagtgagaataccatactcccaatagatcctttttggaaaatttgtgcttggagccgaacaaagtctggtactgttgttattgttgaagatatgctgtataatttacctgtccggcgcagaatactaaaggaagaaccccctttcaaggctttcaaacacaataaaggcagatatgctacagatactggtaatgcacccgatgatttcact

SEQ ID NO: 81454 - DNA, 183 bp, Saccharomyces pastorianus
atgattcaaaccacatccgccgatgaacagtactgtagtgcgtctaccaagtatgttacagttacagctgctgcagttacccaagtggttactactacggcggagcctgttgttaattacgttactataactgccgatgctagtaatgttacaggttctgctaacaacggtacccacatttaa

SEQ ID NO: 81455 - DNA, 396 bp, Saccharomyces pastorianus
atgattttcaaaatattgtgtagtttactactggtaacctccaacttcgcttctgccttatatgtcaatgaaactacgagctatacaccatacacgaagacattaactccaacatactctgtttcacctcaagagacaacattaacgtacagcgatgaaacaaccaccttctacataacatctactttttactctacctactggttcactacctcccaatcagctgctattattagtacacctactgcaagtacacctactgcaagcacgcctagcctaactacgtccacaaatgaatacaccaccacctattctgacacagacaccacctacacgtctactctgacctctacttacatatactctattacgggaatccgccaacgagaaggctga

SEQ ID NO: 81456 - DNA, 1407 bp, Saccharomyces pastorianus
atggggataaaaagtttcgacgttataatatcgtacctcgaaatttacaatgaaaggatttacgacctgttagaaagcggattagaagaatccggtagtagaatcagtactccttcaaggttatatatgagcaagagcaacagcaatggattgggcgtagaattaaaaatcagagatgactctcagtatggggtcaaagttatcggtctcaccgaaagaagatgtgaaagtagtgaagaattattgaggtggattgcagttggtgacaaaagtaggaaaattggcgaaactgactacaatgcaagaagctcacgatctcatgccattgtactgattcgtttaacaagtactaacgtaaagaacggcacctcaagatcgagtacattgtcgttgtgtgacctagcaggttcggaaagggctacggggcaacaagagaggagaaaggaaggttcattcatcaacaaatccttacttgctttggggactgtgatatccaaactcagtgccgacaagatgaactcagtaggctcaaacattccctcgccatctgcaagtggcagtagcagcagtagtggaaatgctaccaataacggcactagcccaagcaaccacattccatatcgtgattctaaattgactagattattgcaaccggcactaagcggtgacagcatagtgacaacgatatgtacagtcgacaccagaaatgatgcggcagcggaaactatgaatacgctgaggtttgcatcaagagcgaaaaacgtcgcacttcatgtatccaaaaaatccatcatcagtaacgggaataacgatggagataaagatcgcaccattgagctactgagacgccaattggaagaacaacgtaggatgatctctgaattgaagaaccgttcaaacattggcgagcccttaaccaaatcttccaatgaaagtacttataaagacattaaagccaccggcaatgatggtgatccgaatttggctctaatgagagcggagaatcgagtattaaaatataaactagagaattgtgaaaaactactagataaagatgtggttgatttgcaagattctgagattatggaaattgtagaaatgcttccctttgaggtcggcacccttttggaaacaaagttccaaggtttggaatcacaaataaggcaatataggaaatacactcaaaaacttgaagacaagatcatggcgctagaaaaaagtggtcatactgcaatgtcgctaactgggtgtgacggcactgaagtgatcgaattacagaagatgctcgagaggaaggataaaatgattgaggccctgcagagtgccaaacgactgcgggatagggctttgaaaccactcattaatacacagcaatcaccgcaccctgtcgtggataacgataaatga

SEQ ID NO: 81457 - DNA, 534 bp, Saccharomyces pastorianus
atgattcaaaaaatgagcccaagcttaaggaggccatcaacgaggtctagttctggttcaagtaatatcccacaatcgccctctgtacgatcaacttcatcgttttctaatctgacaagaaactccatacggagcacctctaattcgggttctcagtcgatttctgcatcttccactagaagtaactccccactaagatccgtatcagccaaatccgatcccttccttcacccaggtaggataaggatcaggcggagcgacagtattaacaacaactcgagaaaaaacgatacatatactgggtcaatcactgtgaccatccggccgaaaccacggagcgttggaacttcccgtgaccatgtggggctaaaatcgcccaggtactctcaaccaagatccaactcacatcacggtagcaatacatttgttagagacccctggtttattactaatgacaaaacaatagtgcatgaagaaattggagagttcaagttcgatcatgttttgcttcccattgcgactctagagatcccg

SEQ ID NO: 81458 - DNA, 222 bp, Saccharomyces pastorianus
atgtcggctaagaagccgccagttagcgatacaaataataacggcaataattcggtactaaacgacttggtagagtcaccgattaatgcgaatacggggaacattttgaagagaatacattcggtaagtttatcgcaatcacaaattgatcctagtaagaaggttaaaagggcaaaattggaccaaacctcaaaaggccccgagaatttgcaattttcgtaa

SEQ ID NO: 81459 - DNA, 399 bp, Saccharomyces pastorianus
atgttcgctcatcggtacttatattttggttgtatcgcttttattaataaggccaagtcatccgcctccttgagatggcattctcctatgctagatgacatcagcggtgtaaagacttggtcaaaagttgctgaagggatgataaaaatgtataaagccgaagtccttagtaaattgcccatcatgcaacatttttactttagcgagtttttgccttgtccggatggtgtatctccaccaagaggccacatacatgatgggactgataaggatgatgagtgcaattttgaaggacatgttcatactacttggggagattgctgtggtataaagttaccgagcgctattgcggctactgagatgaataaaaaacatcataaaccaataccttttgattag

SEQ ID NO: 81460 - DNA, 459 bp, Saccharomyces pastorianus
atgttgccagaaaagagactattgactccagacgatatgaaactatgggaagaatccccaacaagagctcatttcactaaatttattatagatttggctgaatctgtcaaaggacatgagaattctcagtacaaagaaccaatgtcggagtcaataaacagtatgatgaacttgctttcgcaaataaaagatatcactcagaagcacccagtaataaaggatgcagatagctcgagatttggtaaggttgagtttagggacttttatgacgaagtttcacggaattccaggaagatcttacattccgaatttccctctctcacagatgagcagttggaacaattatcgatttatctagatgaatcatggggcaataccagaagaatcgatcatggtccaggtcatgaatccaactccatgtgtacacttcatggactctatactcttggacatattcaa

SEQ ID NO: 81461 - DNA, 867 bp, Saccharomyces pastorianus
atgaaagtttgggatcttgcaacaggaaaattaaaaactaccttagcagggcatgtaatgacagtgagagacgttgctgtgtcggatcgacatccttatttattttctgttagtgaagataagacggtcaaatgctgggacctagagaaaaaccagattattagagattactatggacatttatcgggggttcgtacggtgagcatacatccaacgctggatctcatagctaccgcaggccgagatagcgttatcaaactctgggatatgagaaccagaatacctgttattacactagttgggcataagggtccaatcaatcaagtacagtgtactccagtagaccctcaagtggtgagttcatcgactgatgctacggtaaggttatgggatgtagttgctgggaaaacaatgaaagttctaacacatcataagaggtctgtgagagctacagcgttgcatcctaaggagttttcggtggcttctgcgtgtactgatgacatcagatcatggggattagcagaggggtctttactcaccaattttgagtctgaaaagacaggcataatcaatactttaagcattaatcaagatgatgtattattcgctggcggtgacaatggtgtgctttccttttatgattataagtctggtcacaaataccaatcgttggccacgagagaaatggtaggctctctggaaggtgaacggagtgttctttgtagcactttcgataaaacaggtttaagattaatcactggagaagcagacaaaagcataaagatttggaaacaggatgagacggctacaaaagagtcagaaccggggctagcgtggaaccccaacttaagcgccaaaagattttag

SEQ ID NO: 81462 - DNA, 165 bp, Saccharomyces pastorianus
atggccactctgccgccccacctacaaagcgaaatggaaggtcagaaatcattgctaatgcgatatgatacttataggaaggaaagtcttcttttagtggtgaaggcaagaaagttactctgcagcatgttcctacagatttttcagaagcatcacaagcagtga

SEQ ID NO: 81463 - DNA, 1329 bp, Saccharomyces pastorianus
atggaaaaaatgctgctggttgataaagtcaattttggttacaatatgttggaagactatgttttaaaatatacatggtccggtttgggttatgtttttgcctcaatccctatcgttatgtctaccttagcgacaggcatcaattcagaggaaaaaaatatgaaggaatttatagtcaacaaaaggttgatgttgtcgcttgcagatgcaggctcgagattgatgcattcgataaaggacatctcacaattgaccggctacactaataggatatttactctgctttccgtcttacacagggttcactctctgaactttaattacggcgctgttccttcaatcctgtcaatacgtacagaagacgcttccagaaattccaacttattacccaccacggataattcgcaagatgctattcgtggtactattcaacgcaattttaacggtattcggttagaaaatatagacgtaatcattccatcagtaagggcgagcgaaggcataaagctgattaacaagcttacatttcaaattcctttgcatattgacccaataacttcaaagtccaattctatacaagacttatcgaaggcaaatgatataaagttaccattttcgcagggttctggctccagcctgttaatattagggccaaatggttgcggtaaaagttcaattcaacgcattatagctgaaatatggccagtgtataacaaaaatggattattgtcgattccttcagaaaataatatttttttcattcctcagaaaccatattttagtagaggtggaactttaagagaccaaattatataccccatgtcctcggatgaattctttgatagaggatttagagataaggagctagtacagatattagtcgaagtgaaactagattatcttttaaaaagaggcgttggcttaacttacctagatgccattgccgattggaaggacttattaagtggtggtgaaaagcaaagagtaaattttgctagaatcatgtttcataaaccactatacgtaatattagatgaggctacaaacgcaattagtgttgacatggaagactatctgttcaatcttttaaaacgatacagattcaatttcatttccatatcacaaagacccacattaatcaaatatcatgaaatgttactagagatcggtgaaaatcgagatggcaaatggcaattacaggcagttggtaccgatgaagcaatcacgtcgattgacaacgagattgaggaattggagagaaaacttgaaagagtaaaagattgggaagatgagaggaagaagctacgggaaaagcttgaaattatttga

SEQ ID NO: 81464 - DNA, 126 bp, Saccharomyces pastorianus
atgtggggtaaggttaccagaactcacggtaactctggtgtcgttagagccaccttcagaaacaatttgccagccaagaccttcggtgcttctgttagaatcttcttgtacccatccaacatctaa

SEQ ID NO: 81465 - DNA, 780 bp, Saccharomyces pastorianus
atgaatactgacccagaatatcaaaagcaaatattcagagagctacaatttaataagagttttaagtccgattatattgtgcagtactatggtatgtttaccgacgaacagagttcttcaatatacattgccatggaatatatgggaggaaaatcactggaggcaacgtataaaaatttgttgaaacgtggcggtagaataagtgagagggtgataggaaagatagcagaatctgtcttaagaggtttatcatacttacacgaaaggaaagtcatccacagggacattaaaccccaaaacattcttcttaatgaaaaaggggaaatcaaattatgcgatttcggtgtcagtggggaggctgttaactctttagcgatgacatttactggaacgtcattttatatggccccagaacgaatacaaggccaaccatacagcgtaacctgtgatgtatggtccttaggattaactcttctggaggttgctggagggagatttccatttgaatctgacaaaataacgcaaaacgtggctcctatagaattattgacgatgatcctgacgttttctccccagttgaaagatgagccagaactagacatatcctggagcaagacatttagatcttttatcgactattgtttaaaaaaagatgccagagagaggccttctcccaggcaaatgttaaagcatccctggattgtagggcaaatgaaaaaaaaagtcaacatggaacggtttgtaaagaaatgctgggaaaaggaaaaggatgggatataa

SEQ ID NO: 81466 - DNA, 753 bp, Saccharomyces pastorianus
atggcttcaatgttcagaccaccagaatccaataggagtcaccaaaagactccaaaattaacgcttccagtaaatttaattcaaaatgcgaaatccactaatgatgggcaacatctcaaccggtcaccgtattcgtcagtgaacgaaagcccatactccaacaatagcacttcagctacttccactacgtcatccatggcttcaaattccactttgttgtacaatagatcatctactacaactattaaaaatagaccggtaccacctccattgcctcccctagtactaacgcaaaaaaaagacggtatagaatatagagttgccggcgatagtcagctttctgaaagattttctaatttgcatgttgatataacttacaaggaactactatctagtgctccaatttccactaagttatccaacatagataccacttttatcaagaaagatctcgacacaccagaaggcgaggattcatacccctcgacacttctttctgcgtacgacttcagcagtagcgggagcaactccgcccctttaagtgcaaataacataatttcttgttccaacttaatacaaggaaaagacgtagaccagttagaggaagaagcatggaggtttgggcatctcaaggatgagattactacactaggaattctaggagaaggcgcgggtggttctgtagccaagtgccgattaaataaatggaaaaaaggtttttgcgttgaagacaatcaacactatgaatactga

SEQ ID NO: 81467 - DNA, 642 bp, Saccharomyces pastorianus
atggtcgaacaaacaggacacatagataaattcaagaaatttggacaactggatttcattgataacaatatagttgtaaaaacagatgacgaaaaggaaatattcgatcaaattgttgtacgagacatgacgttaaaaactcttgaagatgatctgcaagaggttcaagagatatcgctaccattattcaaaaaaaagctagaacttttggaagtatatttgggatggttagacaacgtatataccgaaatgcgcaagctggacgatgatgctgcaagccatgtggaatgtggtaaagaagattccaaggggacaaaaaggaagaagaagaaaaatagcagcaggagtagggctaggaaaaatatatgtggctattgttctacatacgagcgaataccctgctctgtggaagaatttgtcagagattttggaagtaatgaggaagccaccaaaatacatgaggtatgcacgaagtggaagtgtaacagacatttggattgggtgtctactaatcaggaacaatacctccagcagattgactctttagaatctatgcaagaaaggttgcaacatctgatacaggccaggaaaaagcaactaaatatacaatactacgaggaaattttaagaagaggtttgtaa

SEQ ID NO: 81468 - DNA, 639 bp, Saccharomyces pastorianus
atggccaccgattctggtaaaactattgacgttttcacaggcaaaccattggtgttcaagcatacatcatctagtacttctgtaggctgtaaaaagcaggaagaagaagaaggtgaactacataaatggggtttcttcgttcagcagcagaggtctttataccctgaaaatgaatcaacaaggcagacaccttttgcatcaggtgatacgcctatcaacacagaaacagctggtaagtcaacttcgtctccttcagtttcaacttctaacaatgaaactgctaccactagtttatttagcccagctaatcctaagattttaccaaaaattccatccggtgctgtcttaagatcggcaatcatgaaggctaaaggtattgattctatcgatgatttgattcagaatgttaactccaacaacatagaattggagaacatttgtggtgaatccattcagaatagcgcttcgacatttacaccaggcgtggattccgatgtatctgcgcccaataccgataaaggatccgtagaaacattgcctgccgtctcaactgacgacccaaattgtgaagtcaaagtcactgctacctatgacaaactattaaataatttgtcgatggagaggtcaatcagactttga

SEQ ID NO: 81469 - DNA, 2535 bp, Saccharomyces pastorianus
atgataactaacaccgagttcgatgtgcccgtagattggttgtataaaggtaagagtagacggaagacaaatacgaagccatcgaggccttctacgtcgccagcctcctcttcatctacgtcctcttcgaaaaacggagacaatagcacgagtggtaacaggtctagcaatgataagcctcgtgcgaggtcgtcatctgtatccaatgcagcactttgtaatactgagaaaccagatttgaagaggaacgatggtaatacctctgcatcagacactgataacataccgctacttactcctattaatagcggtaaccgaagcgattccgctgacattgatcatccggctaccgtagacgccatagaccttatagattatgatgacaacggctcaagtactcaatttgtaaggaaaaaacgttccacttctatatccaatgctgtggtctcgtccaaaccaagactggccaattctgccataaacgccaccgcatcttcttctgtcggcaagggaaagcacccgccaatttcttcaccatctaatgctactctcaagagaagcaactcgactagtggagaaaagactaaaaggtcaatttttggatctttgtttagcaaacggtctacctcgtcttcagcttccactgccaaaaaaccattacctgttgttaatactagcacgactgagagtgagtctggtggcactaaagcagttgcgactcctgattcacgggtgaaggagatatcatcaccaatgagaggagtggcaccaaccgctagcaagccaccgacacctgtactcccctcccctgcacttacagtaaaagacctatctacagtttcattgaaaagggtctcgtttgccgtcgataaattcgaatccgatcctccccaacaacttccttcaagaaccccaaaaaagggaaacatccttatccctgatgacatgataagcgaggttccttctatttccgtgggtatttccagtagcaaccaatcggccaagtcaaccaattccaacattaagggaccgttgtacactaagaagtctaaagaatatatactcgccctggaaaatcaaaagttggctttaagggaggctgctaagcatcagcaagaagctcattttgctgctaatagaatagcctttgaagtggccaattttaagactgcttcggatgcaggcggtaagcttactgaaaagtcatcagaaggcaccattacgaagcaaagagaagaggtgtcacctccaaatgttgaagctgatcgggagcttgagaataataaacttgcagaaaacctctcaaaagccggcattgataagcccattcacatgcatgagcactatttcaaggaacctgatcaagataagtaccaagacggtcattctattgaaaataacgaagttacgctggatgttatttacacaagatgctgccatttgagggaaattttacccatcccgtctaccttaagacaagtaaaggacaagacagctcccttgcaaatattgaagtttttaaaccctaagcctaccttgatcgatattctttccttttgtgatttcatcaccattgctcccattcacacgattgttttcgacaatgtagctttaaaccaggatatgttcagaataattatttctgctttggtaaactccacagttttggacaaattgagtttaagaaatgtacgaatcgaccaagatggatggaaattgctatgtaagttccttttgctaaacaaatcactgaacaagctcgacatttcccaaacgaaaatcaaatctgaccttgctgaatcactatatcgccataacatggattggaacttgtttactgacgtcttgtctcagagatctcacaaacctatagaagaattgttattcaatggtattcaatttagcaaaattccttactcgtgctttgcacgtttactgacatcctttgctacccaaaaaaactttccagaatcgggcatcaggcttggtttagcaggtgccactacttccaatatctctcaggattgtctgaaatttatcttcaattggatgtctcaatataacgtccagggtgtggatctagcgtttaatgatctgtccactatgattaagccaatggttggtaaactatctgctctatcatatgataacttaagatatttcattttgaacagtactaatatttcgacttcttatgatttagctttgctcttgaaatatctttctaagttgcctaacttgatttttttggatttgagtaatttgtcgcaatgctttcctgacattttaccctacatgtacaagtatttaccaagatttccgaacctgaagaggatacatttggatagcaataatttgacattaaaggaactagctgtcgtttgtaatattttgattaagtgcaaatcgctctcgcatgtgtcaatgactaatcaaaacgttgaaaacttctatctaatgaacggcacagattctcccgttcaacaaactaacacagacggcgacttggatagttcgagcacattggacgtttag

SEQ ID NO: 81470 - DNA, 342 bp, Saccharomyces pastorianus
atgtcagcggaatcgcttcggttaccgctattaataggagtaagtagcggtatgttatcagtgtctgatgcagaggtattaccatcgttcctcttcaaatctggtttctcagtattacaaagtgctgcattggatacagatgacgacctcgcacgaggcttatcattgctagacctgttaccactcgtgctattgtctccgtttttcgaagaggacgtagatgaagaggaggctggcgacgtagaaggcctcgatggcttcgtatttgtcttccgtctactcttacctttatacaaccaatctacgggcacatcgaactcggtgttagttatcataacctag

SEQ ID NO: 81471 - DNA, 1062 bp, Saccharomyces pastorianus
atgcaatatcagttgttaagcgaagacgggtatgaactatggggcatgcttcttcaaaatttttcatcccacgatcaagagtttgacgataagttcgttgaattggtgccatttctaaagtatggtattgagacacacacagagattctcccaactttacttgaaattatcaaaagttatgctctgattctgaatcctgtggattttttctctaacaacacatttcaagatatttttaaacaaatgtctaaatatcttttaaagttaagggaagattcatttcagttggttttagaaatctgggaaattttgatattatccaatgagtcggattacgaaaatctgttattgcaaaaattctatgaaaccggagtattatcagcattattcgatgccattttcctggaagaagctccttcatcttatttatgctcgcaaatcattcaaatcatcgctagaatatcctacgtgaatccagacgccttaatgacttttttagctacatatcatgacaatctaccaacttctaacgaaaatgcacgcatgccggaatcaataagaaaaattgtgtctaaggatcagacgtatgattccgttgtaaacaagcttttaaccggatggatagtatgttttagagatatctttgatcctaaattcaaaaaagttcacatattaggtatttcaagtttactaaggactggtttagttcctattttgactgagttttcatccatcgcatctttatggatcgaaatgctcgaagaaattaatgaaactaatcgtggggattgcgaaaaataccacttgaatgatattgttacagagcaatcaattgcattccatcctttaactgccgaacaattaagatatcatcaattatgcaaaaacaatgatccagtgcataacattagtttaaaagattttatttcccaatcaatggaatatctagaatcacatttaggagtagaaaggtaccaagaatttttgaagactattaaccctagtttactagagaacttacaaatgtttttatccatccagcctcaagaggctcgtccatga

SEQ ID NO: 81472 - DNA, 594 bp, Saccharomyces pastorianus
atgagttcgccattacatagattgtctcccacaggtcaatcagacgataggaaagtgacgagcccgctagatgataagctaaggaggcaattaagggaaggtaatacgcgactacctcctccaccattttccagctacgggatgccacccaccaaccgatctaatttggatagaataagaagaaggactagctcaccagtaagaactgataaatttgcatcacaaaatgtgatagatgaccaaagattagaaataaaatatttagaacgaatcgtatatgaccaaggcactgtcattgataatctaacatcaagaataacaagactggaatcattcatattgaattcgatctcagacagaggagataaaaattttgcctctctcgaacactcccgctctttttctgggtttccgaccaacaagacgtatggcttacaaatgggtggactgtatgagaatgatatgccctatcgaagaagtagcgacaacattaataaagaaggagcaagagaagatcgatcgtcacaaatccatattgaaaatgaaagtacggaggatatactaaaaatattgtcttcgtcttttcacaattga

SEQ ID NO: 81473 - DNA, 204 bp, Saccharomyces pastorianus
atgacattagtacaactttcagaagttgataaacaagagtgggagagtcaaatgaatgaacagctgaaagagttggaaaaaaaaaaaatagcggagctggaaaaattgaataaggtgctgcatgatagcgaagggaaagattttggaatggctgaactatgcactaggttaaaacttgactacagcttaatctttccacaatga

SEQ ID NO: 81474 - DNA, 414 bp, Saccharomyces pastorianus
atgcacaatcaggaagagtggctagacaaggacaaaactttggtgaacgaagaagaaaatacttgcatcaaccattcttatacaaaaaaggacactaataactatcgggtcggtaaaagcggtattaaggacttgaagaagcctacgaaccagaaggaaattgcgataaaaaatagggagttaacgaaacaacttactcttctcaggcaagaaaataatcacttacagcaggcttgtaaaattctcagcgaaaacaagatcattgagaacagaaaatccatagaaaaatggaggacaatttgtgagatggaactgtcttttattttaaattccactttaatcaaaatcaatagaatgggcggctataaagattttctagaacaagaaatggaggctaaaagagaagatggaata

SEQ ID NO: 81475 - DNA, 1359 bp, Saccharomyces pastorianus
atggaaaatatcaaacttgctagtttcaccaaacctactccagtacaaaaatattctattccaatagttaccaaaggtagggatttgatggcatgcgcacaaacgggctcaggtaagacaggtgggtttttgtttccgctcttcacggagctattcaggtctgggccctctcccgtacccgagaaagcacagagcttttattctagaaagggatatccatatgctttagtacttgcaccaactagagaattggctacccaaatttttgaagaagcaagaaaatttacgtatagatcttgggttagaccatgcgttgtttatggtggcgcgccaatcggtaaccagatgagggaggttgaccgcggctgtgacttattggtggctacaccagggcggctgaatgacttattagaacgtggaaaagtttctttggctaatatcaaatacctggtattggatgaggctgatagaatgctagatatgggattcgaaccccaaattcgccatatagttgaagaatgtgatatgccctctgtggaaaatagacagaccttgatgttttccgccacattcccagtagatatccagcatttggcacgcgatttcttagataattatatttttttatcagtaggaagagtcggttccacctcagaaaatatcacgcaaagaatattatatgtcgatgacatggacaaaaagtctgcgttgttagatttactgtctgcagagcataagggattgacattgatttttgttgaaacgaaaagaatggcggatcaactcacagattttttgatcatgcaaaatttcaaagctacagccatacatggtgaccgcacacaggctgaacgtgaacgtgccttatctgctttcaaagctaacgtagctgatatcctggtcgcaacagctgtagcagcgagaggtttggatataccgaatgtcacacatgtcattaattatgatttgccctccgacatcgatgactacgttcacagaattggtagaacaggccgtgctggtaacacaggcgtggctacttcattcttcaatagtaataatcagaatattgtgaagggtttgatggaaattttgaatgaagcgaatcaagaagttcccacgtttttaagtgacctgtcaagacagaattcaagaggtggaagaactaggggaggaggaggttttttcaatagtcgtaataacggttcaagagactaccgtaaacatggtggaagcggctcatttgggagtacgaggccaaggaatactggaacatcaaattggggttcgattggaggtggatttagaaatgataatgagaaaaacggttacggaaatagcaacgcttcatggtggtaa

SEQ ID NO: 81476 - DNA, 225 bp, Saccharomyces pastorianus
aaacgacggcagtgccagcttgcatgcctgcaggtcaattacaaatcatctggaaatagatgggtaaatggcaagcatataccggggcctaagaacgcgaaattagaagccgaactgtttggtgtacacgaggatcccgattaccattcatctggtataaagtttgataattacgatgatattcccgtagatgcatctggaaaagatgtcccgaacctatactag

SEQ ID NO: 81477 - DNA, 144 bp, Saccharomyces pastorianus
atgtataaaattccctccaatacgaaaccgcatcgcataagacagcctcaaaacgcaaatacaccaacttatgacgatagtgatatatcaatgatttctcatgtttcaagaaaacatacaacaagaagtggtggaagatggtga

SEQ ID NO: 81478 - DNA, 468 bp, Saccharomyces pastorianus
atgagcattgaatactacaaaaggaccggtcccgtccaaaagagtctacttgattacaacgctaagtaccattctgatctagacgatccaaatacttggaagaatgcggatttgatcattttggccttgcccagtacggcctctacaaacaatattatcaatcgtaaaagtttggcctggtgtaaagatggtgtcaggatagttaacgttgggagaggcacatgcatagatgaagatgtgctactagacgctcttgaatctggaaaagtggcaagctgtggtctcgatgtgtttaaaaatgaggaaacacgcgttaagcaagagttacttcgcagatgggatgttacagctttgccacatatcggcagcacagttgccgacatggtcataaagcagacactcatcacactcgagaatgtgcaggacatatttgtcgagggaggtgatggtaagtatgtgctcaactga

SEQ ID NO: 81479 - DNA, 339 bp, Saccharomyces pastorianus
atgtaccacgttgacaaatacggcatcaacgctgtcattgaaatggcaatgaaagccgtgcacccagaaacaaacggtgaaggtcccattatgtgctcctatgacgtcgatggtgtagacccattatacattcctgctacaggtactccagtgagaggtgggttgaccttgagagaaggtcttttcttagtggaaagattggccgaatccggtaatttaatcgctctagacgttgttgaatgtaaccctgatctggctattcatgatatccatgtttcaaacaccatctctgcaggttgcgccattgcaaggtgtgcattgggtgaaaccttattgtag

SEQ ID NO: 81480 - DNA, 588 bp, Saccharomyces pastorianus
atggaaacaggacctcattacaactactacaaaaatcgcgaattgtccatcgttctggctccattcagcggcggtcagggtaagcttggtgtcgagaagggccctaaatacatgcttaagcatggtctgcaaacaagcatagaggatttgggctggtctacggaattagagccctcaatggacgaggcccaatttgtgggaaagttgaaaatggagaaggactccacaactgggggttcctctgttatgacagacggtgtcaaggctaaaagagcagatttggttggtgaagccaccaagttggtgtacaactccgtgtcgaaagtggtccaggcgaacagattccccttgaccttgggtggtgatcattcaatagccattggtactgtatccgcggttttggacaaataccccgatgctggtcttttatggatagacgcccacgctgatataaacaccatagaaagcaccccctctggaaacttgcacggctgtcccgtgtcattcctaatgggtttgaacaaggatgtcccacactgtcccgagtcgctcaaatgggttccagggcaacttgagcccaaagaagat

SEQ ID NO: 81481 - DNA, 1272 bp, Saccharomyces pastorianus
atggcaaggggtgtttccatgttgaataagtcgtacagctcagtgggagttaatagaagtatattaaatgatagcgtgacggtccccatcatcgctaatcatacactggagatacttgggacgctgaaatttgaatatattattatcacaccatttgaacatccacaactgcccttagaaagaacagaaacgtactggaaatccttagtgtccactcgtgttataggacatagaggcctgggtaaaaataatcctaataaatcattacaaattggagagaacacagtcgagtctttcatcatggcagcctcattgggagcatcatatgtagagtttgatgttcagttgacgaaggataacgtaccagtggtatatcacgattttctcgtagctgaaacaggtgtcgatatccccatgcatgaattgacgctggaacagtttttagatttgaacaatgccgataaagagcacattcaacgtggagcaggtcactcatctcatcatgtaaatggagcagatacagcactacaaaaatatagagggcgttcggtagatgattcagacgttagtacattgaggagagcttgggattttcacgacaacgacccgaatgggaagtccaacaatgctcattggtctaacaatcgaatgaggctaaccaaaacatttaaaaagaacaattttaagggaaatgctagaggacattcaatagcttcatcatttgttaccttgaaagaactattcaagaaaatccctgccaacgttgggtttaacatagaatgtaagtttcccatgcttgatgaggcagaagaggaagagttagggcaaataatgatggaaatgaaccattgggttgacaccgtgttaaaagtagtttttgacaatgcgaatggtagggacatcattttttcgtcatttcatccggatatttgcatcatgctttcgttaaagcaaccggttattccgatcttgttcctgacggaaggtggaagtgaacagatggccgatttgagagcctcatcgttacaaaacggtataagatttgctaagaagtggaatttgttggggattgtatctgctgcagcacccattttaaaggccccacggttggtgcaagtggttaagtctaatgggctggtatgtgtcacttacggtgtggacaacaatgatcccgaaaatgccagtatacaaattgaagcaggtgtagatgccgtgatcgtcgatagtgtattggcaattagacgtgggttaaccaaaaagaatgaaaagtaa

SEQ ID NO: 81482 - DNA, 2322 bp, Saccharomyces pastorianus
atgaagttcggaaaaacctttgtcaatcatcgcattccagagtggtcaaatcaatatgttggctacaagtcgttgaagaaaatgattaaagaaattacaagacttcaagaagacatatatagggcacataacaagaatagctatgatgaaagcaggccaccaacaaaaatgagagattcatctaatagtgctcaaaattatttggactctccaaaaatccaaaagttattggcgtcgtttttctttgcagttgacagggatattgagaaggttgatacattttacaattcccagtatgcggaatataagaaaagatttgagagattgctttcttctaatcaattcaatgagataaaatcaacattagtggtcgatgccaacaaagaagatgcagtagcgcaaaccttactcacaagggatacgagagagatgaatatgcttttaaagggaacaagtcaagccagccgtctatcttaccataaagatgacttaattgaaattcagtctatcttagctgagttaagaaaacaatttagaaacttaaagtggtacgctgaactaaataagagagcttttggtaagattttaaagaaactggataaaaaagtcggcacgaatcagcaaatatcaactatgaaaactagaatcttgccgttacaatttgctaatgattctcttattaccaaagatttgagtttgctaaaaactatctgggaacaagtgacgttcaggataaattcttacgagagagtaatgaggagtacctcgccgaacgcaaatgctaatgataatacagaattctttaagattatttgcgtttttatagaagaagatgatagcaaaggattgattagagagctaacaaacctatattcggaattgtctttgattccaacaagaattatgataagtgttttaaacaaggcagcactgtctaaatcactggcatgtattgatgctatcttaaaggttattccgtctctaaatgactcggaagatattaacagaagaaattttttccatcatcacataattgcaatcgggaagttaatcagaaaacaggaaattttaagtaggaaaaagaagtcacaaccctcaaaatatactaataatgagggagaaattgtaacagatttaagaaccctgcatacgaccctatctgccccggcagaatcagatagcattacagaggaggaaaaaagttcggcctgtacactctcttatattttagaggagttaccaattcatttaagaccatgcctttttcagcatgataattacaagagaacgcccttgcattattcttgccagtatggcttatctgaagttacgaagttgattatcaagttaatgaaagaatggaatatctggaatgaaatccctattgatgacgtttccgcgttcggagatgccgaatcattgacacctttacatttatgtgtgttgggtgctcatcccaaaacaacagaagtcttattgcaatcattggatccgaacgtgaaattaaaaagttcaagtttgttacatttggccactgagtggaataactatccccttttacatgttctcctatcatcaaaaaggtttgatattaattatcaagacaacgaattacatgaaacaccgctatatcttgcttgtagattaaattttttcgaagctgctgtgtgtttattgtacaatggagccgaccttgaaataagagaaaaactttttggctggacagctatcttcgttgcagcagcagaagggtttacggacattgtaaagctcttgatagccaacaacgcgaactttgatattgaagatgaaggtgggtggacgccgatggagcacgcggtattgcgcggtcatttgcacattgctgatatggttcaaatcagagacgaactggtcacgcatccccattcacagttgaacagtggtagcgaagagaaagaaccactaaacgaaattagtgccggagaattaaatgagagaaatgaaaatggaaatggaggtaataaagggtccttgggaaaactggccggaccaataaagtcatatggacatagattcctggataataatgaatcactcatactaataacattgggaagtaatgacacaagaaacaaaagcccttcaatttcattaagcccggaagcactagcaaaagttattgggttggaaacagattgtgcattatcgttagtaatttcatgcaatgattcaattgataaatcttctgtaatcttagatttaccattagatgataatgtggacgcagtagacttcaaagtgccttccaaagttgattattctcatacattatatcttgat

SEQ ID NO: 81483 - DNA, 1833 bp, Saccharomyces pastorianus
atgtcatttttaaagttcgcttatagaaactcttggcgatactatagcaagtccacacggcattttcataaaatacctataagacagttcataatacctacgtcaattgctttttatttgacacaaaattcgtttccaaaacaaaattgtttgatatacaatgattctctaaaaccggatcccaaaggtgatacttttgaaatgggcctctacgtttcctcagaaaacgaattgcaggaaaagcttaaatctttcaggtctgctaagatcactgaatcacgaaataaattaataagatatctaagaatcttttggttcggttttaatgataatattgttgagcctgtatgcacgattttaaggtttttagaaatttcagctatttttttacctcttctcctattataccccatatcatggtttggtcataaactcaaaattacggacaccaatataactgaaactcgaggttcattgatttggtgtcaactactgcgtaaagcattggaattggctggcccgagtttcattaaactcggacaatgggcaggatcgagaaccgatatattctctcacgcactgtgtcatgagttgggtaaattgcatagtaacgttacagctcactctctaagctttactctggaaaaactttctcaagcattaaagattgacaagatcgaagatgcttttgatgaatttaatcgaacaccaattggagttgggtccatcgcacaagtttacgtgggtgaactatcccaaaagtacatcgataaatatgacaatatacaaattggtaaggatggaaatcgttggtgtgccatcaagatcttgcatccaaatgtaagatctcagatccggagagatttgaaaataatgaaattcttcgctgacgcaataaattggattccgactatggaatggctgtctttacccagcgaagtcgatcagttttccatattaatgaatattcagttggatctaagaattgaggcgttaaacctggaaagattcaatgagaactttaaaaattctattcaggtgaaatttcctaaaccatttctccccttgtcaaatagggatgttatgttcgaagagcatgtatatggtctttccatggaaaagtttttatctacgaagaagcaaattaacgacgttgaactttgtaaaaaagtcagtgatcccttcgttgacgcgtttctacaaatgctaattcttgatgattttgttcatgctgatttgcatccaggcaatgttataatcagatttgtgaagacgaacaaatacggcacaaacattatatcctccgaacttgaatcgtacagaataacgcacgacctgaggaagaagatagaggaggaccaagatcaggactttgttggaaaactgaagtctgtattaactaattacactccccaaatttgttttatcgatacaggaataattacagaattgaatgaaaaaaacagaattaatttcatagctctattcaacgcattggcccgatttgatggttatagagctggtgagttgatgattgagagatcaagaacttcagaaacagctattgataaggaagtatttgcgtttaaggtagaaaagctagtggataaagttaaacaaagaacatttacattgggaaccgtctcaattggcgatttactcgatcaaatgcttagtatggtaagatcgcaccatgttagaatggagtccgactttgtttccgtggtggtcgctattttacttctagagggtattggacgccagttagatccaaacttggacttatttgaaaggttcgtattctacgcatggattaacggttttaaagaataa

SEQ ID NO: 81484 - DNA, 633 bp, Saccharomyces pastorianus
atgcgacccctctgtttacacacaattgaagaggcttacactattgaagatatcgaagttgaagaacctattccattaccagaagatgctccagaagatgctgagcaagaattcaagaaggttactaaaactgtaaagaaggatgacttaaccatcgttgcacacacctttgccctagacgctaaaaagttgaatgaattaattgaaaaagaaaatgaaatgcttgctcaagataagctagttgctgagacagaagaccgtaagaacactcttgaagagtacatctacacattacgtggtaagttggaagaagagtatgctccatttgcttccgatgctgaaaagacgaaattacaaggtatgttgaacaaagccgaagaatggttatacgacgaaggtttcgactccatcaaagctaagtacattgccaaatacgaagaattggcttctctaggtaacattattagaggtagatacttggctaaggaagaagaaaagaagcaagctataagatctaagcaagaagcatcccaaatggctgctatggctgaaaagttggctgctcaaagaaaggctgaagctgaaaagaaggaagaaaagaaggatactgaaggtgatgttgacatggactaa

SEQ ID NO: 81485 - DNA, 1290 bp, Saccharomyces pastorianus
atgagtactccatttggtttagatttaggtaacaataactctgtcctggccgttgctagaaacagaggtatcgacattgtcgttaatgaagtctctaaccgttccaccccatctgttgttggttttggtccaaagaacagatacttgggtgaaactggtaagaacaagcagacttccaacatcaagaacactgtcgccaacttgaaaagaattattggtttggattaccaccatccagatttcgagcaagaatctaagcacttcacctctaagttggttgaattggatgacaagaagactggtgccgaagttagattcgctggtgagaaacatgttttttcagctactcaactagctgccatgttcatcgacaaagtcaaggacaccgtcaagcaggacacaaaggcaaatattaccgatgtttgtattgctgtcccaccttggtacaccgaagaacaacgttacaacattgctgatgctgctagaattgctggtttgaaccctgttagaattgtcaacgacgttactgctgccggtgtttcttacggtatcttcaagactgatttgcctgaaggcgaagaaaagccaagaattgttgcctttgttgatattggtcactcttcctacacctgttctatcatggccttcaagaagggtcaattgaaagtcttaggaactgcctgcgacaagcattttggtggtagagacttcgatttggctataacagaacatttcgccgatgagttcaaaactaaatacaagattgacatcagagaaaatccaaaggcttacaacagaattctaactgctgctgaaaagttgaagaaagttttgtctgctaatactaatgccccattctctgttgaatccgtcatgaacgacgttgatgtttcctctcaattatctcgtgaagaattagaagaattggtcaagccattgttggaacgtgttactgaaccagttaccaaagctttagctcaagccaaattatctgctgaagaagttgattttgttgaaattattggtggtactactcgtatcccaacattgaaacaatccatttctgaagccttcggcaagccattgtccaccactttgaaccaagatgaagccatcgccaagggtgccgcctttatttgcgccattcactctccaactctaagagttagaccattcaagtttgaggatatccatccttactctgtctcttactcttgggacaagcaagttgaggacgaagaccacatggaagttttcccagctggtttatccttcccatctactaaatga

SEQ ID NO: 81486 - DNA, 633 bp, Saccharomyces pastorianus
atgatttcattatcaagaacgccttccccatcttcttcggcattgaactcttcgaatactagcaatgcgtggaccacggtttcttctaagagcacaacccacatggcttccaccatgcctgtcgctggtaaccagtcaaagtcatatatcagtttggacacactgcgttcttctggggggttacctactgcaacaaaaactaaaatgagcgataagagtaaacaaattggctcatccactagtatcccgactttaaaggcccgtcaagttaaaccgtctcgcatccctgcctatcccggtaacgcttctgtctctaagcgtcaagaatttttgagatggtgccgatcccaattaaaactaaatacgggtgttcagcccgataatgttttagaaatgctacttagcttgcccccaggttcagaatccaaggaaattatcgcagataccatatattcctacagttcaacaatggacggtaggagatttgccactgatttcatcaaaaaacgtctagaatgcgaagaagaaattaatgaccccttgagctggagtgaagtattagctatgcctgaaggcagttccgaagactgggaatttcaagttgttggtaaaaagaaaggaaaaagattttga

SEQ ID NO: 81487 - DNA, 606 bp, Saccharomyces pastorianus
atgacttctgaagagcagaaaaggtttgcaaaggcagaactgatggcacaaaaattattggaagaacaacaaagacaagaagaagaaaaaaagagaagagaagaacagcgcaaattaaagaaggagaaaaaattgaagcaaaagcagaaaaaggaagaagagaagttaaaaaagaagaagaaggaagaaggaaaattagagaaagaaaagcaaaaagaattgctaaataacattttaactggagatacagaaacttcatcttccgaaaacaccgcaacttccataaccactaatttggcgccttgggctaacaagaaacccgagggtgctgtttataatcagatttcatctgctcttgaagatttgaagaaggagaactcgtccaagaaagaaaaaaaacctaatcgtactcagttagatcgtgagcaggcattaaaactacagaaagaaatattaagctcggcgcaaattccgaaaactcaaactggttctgcctggggtataaagccacagcaaccgatcaaagttgatattaaaggagaattgatgacagacaataccaaaattaacagtcagtctaaaattaacaaaggccaacaatggtga

SEQ ID NO: 81488 - DNA, 201 bp, Saccharomyces pastorianus
atgggaacaccgccacacgctggatttgctattggttttgatcgtatgtgcgctatgatctgtgaaactgagagtataagggacgtaatcgccttcccaaaaagtattaccggggctgatttggttgtcaagagtccaagtgtgatacctgaaagcattctggaaccttacaatatcaagtatagtaattcaaaaaaatga

SEQ ID NO: 81489 - DNA, 729 bp, Saccharomyces pastorianus
atgttggcccgttccagggtgtgcttgcagacaatcactagacggttggcagactttccagaagccaatgctattaagaaaaaatttctctttaggaaggacacctcgaccatcaaacagttaaaaggactgtccagcggccagaaaatagtactcaatggatggatagagcagaagccaaaaagagttgggaaaaatttgatcttcggacttttaagggactctaacggtgacattatccagttggttgataacaaatcgttgttgaaaggctttactttagaggatgtggttcaagccgtaggtatactctctttgaagaggaagctatcaaatgaggacgcagatgagtacgaattgcaattggaggatattactgtgttaaatgcatctaataaaaaaccagcgcaaatgcaggattttaaattgtcagccatatacccacctgagttccgctatttgcaattgagaaatcccaaatatcaagattttttaaagaagaggtcatctatctctaaggaaataagaaactccttcaacaatttggattttacggaggtcgagaccccaatgttatttaaagctaccccagaaggcgcaagagagtttctggttccaacaaggacaaagagatccgatggtaaaccatcgttttatgctctagatcagagccctcaacaatacaagcaactcttaatggctagtggcgtcaacaaatattattcaatg

SEQ ID NO: 81490 - DNA, 774 bp, Saccharomyces pastorianus
atgacctacgaacaagccatgacttcatatggtattgacaagccagatttgagagcgccagatttgaagattatcaatttaggcgagttcaatgcctttagtcatttgaacaaaaaattccccgtttttgaagtaattattctaagaaatgccttttcaaatatggaagagtacaaagaacgatggtcgtttctgacaaataacagtaattacaattatagagttccaatagtgcttccaattgaaaatgacgaacaagctaattcaaattggtttgagaattttcatgcaattgccacgtttgaaaacccacatttaataaccaaatttctgaaattgaaaaaaggtgacattgtatgcggttgtacgagagagccaaaccattccattttcgagaatcctactcccctgggaagattgagacagttggtgctacaaagtgagcatgggaaaaatatctatcatgctgtcaataaggacgttgcctcatggattgtggatttcccgttattttctcccgttataattgaagataagtctggtaagaaagaaaagcttgcatatccggagtacgaaaaggatagattatgttccacgcatcatccttttactatggtgaagcttaaagactacgaaaaactagaaaagacgccggaaaagtgcttgggtcagcattatgacctcgtagttaacggtgtggaacttggtggtggctcaacaagaattcacgatccaagattacagactatattttcgaagatatcctcaaaatag

SEQ ID NO: 81491 - DNA, 606 bp, Saccharomyces pastorianus
atgctaacgaactacttaggtgaagaaggagataactgtccattaaatgctgcagtcgctctctcaaacccatgggatttcgtacacacttgggacaagttggctcatgattggtggtccaaccatattttttctagaactttaacacaatttctaacaaggactgtcaaggttaatatgaatgagttgcaggtaccagagaattttgaggtttcgcacaaaccgacagttgagaaaccagtcttttatacgtataccagagaaaatttggaaaaggctgaaaaatttacagacatattagaattcgataatcttttcactgccccatcgatgggcctgccggacgggttaacatattatagaaaggccagttcgataaatagattgcctaatatcaaaatcccaactttaataatcaacgcaacggatgatccagttacaggtgaaaacgtaattccgtacaaacaagctagagaaaatccttgtgtgttgttatgcgagactgacttgggtggacatttggcttatctcgacaatgaaaataattcctggttaacaaagcaagctgccgagttcttgggtagctttgatgagttagttttataa

SEQ ID NO: 81492 - DNA, 609 bp, Saccharomyces pastorianus
atgtttcgctcgggttactatccaactgtcactcctagccattggggctataacggcaccgtcaaacatgtactgggagagaaaggaaccaagtctttggctttcagagattctaagcgccaaattcctcttcatgaattcgtaaccaaacacgtgcctacactcaaagatggtgcaaattttaggttaaacagcttgcttttcacaggttacttacagaccctttatttgtcagccggtgatttttccctaaaatgtcaggtattttatggaagagagattataaaattttctgatggaggggtctgcacttcagattgggttatgcctgaatgggagcaaacatattcattaaatgctgcaaaggctagttttaacgagaaacaattttcgaacgatgaaaaggccacccatccaaagggttggcctcgttttcacccaagaactagatatctatcctctgaggaacttgataaatgtcattctaagggttattcttaccctttagtggtagtacttcatggtcttgcagggggaagccatgagcctctcatcagggcattatctgaagatctatcaaaagtcggtgacggtaaatccaagtggtag

SEQ ID NO: 81493 - DNA, 372 bp, Saccharomyces pastorianus
atgtccgtagatgacaaactagattacgagaacgtccccagcgtaattttctcacatcctgaagccggttccattggtatttctgagaaggaagccattgaaaagtacggtaaggagaatataaaggtctacaattccaaatttaccgccatgtactatgctatgttgagtgaaaaatcacccacaagatataaaattgtttgtgcgggaccaaatgaaaaggttgtcggtctgcacattgttggtgattcctctgcagaaatcttgcaagggttcggtgttgctataaagatgggtgccactaaggctgatttcgataattgtgttgctattcatccgactagcgcagaagaattggttactatgagatga

SEQ ID NO: 81494 - DNA, 963 bp, Saccharomyces pastorianus
atgctttctgcaaccaaacaaacatttagaaaactacagataagaactatgtccacgaacaccaagcattacgattacctcgtcatcgggggtggctcagggggtgttgcttccgcaagaagagctgcatcttatggtgcgaagacattactagttgaagctaaggctcttggtggtacctgtgttaacgtaagttgtgttccgaagaaagtcatgtggtatgcttctgacctcgctactagagtatcccatgcaaatgaatatggattatatcagaatcttccattagataaagagcacttgacttttaattggccagaatttaagcagaaaagggatgcttatgtccataggttgaacggtatataccagaagaatttagaaaaagaaaaagtggatgttgtatttggatgggctagattcaataaggacggtaatgttgaagttcagaaaagggataatactactgaagtttactccgctaaccatattttagttgcgaccggtggaaaggctattttccccgaaaacattccaggtttcgaattaggtactgattctgatgggttctttagattggaagaacaacctaagaaagttgttgttgttggtgctggttatattggtattgagctagcaggtgtgttccatgggctggaatccgaaacgcacttggtagttagaggtgaaactgtcttgagaaaatttgatgaatgcatccagaacactattactgaccattacgtaaaggaaggcatcaacgttcataaactatccaaaattgttaaggtggagaaaaatgtagaaactaacaaactgaaaatacatatgaatgactcaaagtccatcgatgacgttgacgaattaattttggacatattggagcgtaaatctccattctatggtagtgggttttcagaaatatgtatggtagtaaagtctgaacgtctccatgatccataa

SEQ ID NO: 81495 - DNA, 126 bp, Saccharomyces pastorianus
atgtacgacttgagaagacgtaaagcagttgaaaacgaagaacgtgaactgcaagagaatcctacgtccttttacaatagaccctctgtttttgatgaaaatatgtactccaaatacagcagttag

SEQ ID NO: 81496 - DNA, 1278 bp, Saccharomyces pastorianus
atggatttcacttggtatgacgcagaatactcatcggcccagaaaggattgaaatacacgcaacatacgttagcatttgaaaagtcttgtactttgttcaacattgctgtaatctttacccaaattgcgagggagaaaatcaatgaggactacaaaaactcaatcgcaaatttgacaaaagctttttcctgttttgaatatctatcagaaaattttttgaactcaccttcagtcgatcttcagtcagaaaacactaggtttctggctaatatttgccatgcagaagctcaagaattgtttgtcttgaaattattaaatgatcaaatatcatccaagcaatatacattaatcagtaaactttctagagccacgtgtaacctctttcagaaatgtcacgattttatgaaagaaatagatgacgatgtggccatttatggtgaacccaaatggaaaacgacagttacttgcaaactgcatttctacaaatcgttaagcgcttattatcacggtttacaccttgaagaagaaaatagagttggcgaagcaattgcttttctcgatttttctatgcaacaattgatttcatcccttccattcaaaacgtggttagtggaatttatagactttgatgggtttaaagaaactttagaaaagaaacaaaaggagttgattaaagataacgattttatatatcatgaaagcgttccagccgttgtgcaggttgattccattaaggcgctcgatgcaataaaatctccaacatgggagaagatattagaaccatatatgcaagatgttgcaaataaatgtgactctttgtacagaggaattattcccctagatgtctatgaaaaggaaagtatttactcagaagaaaaagcgacgctgttgagaaagcaagttgaagaaactgagacagcaaatttggaatattcttccttcatcgaatttacaaatctacccaggctcttgagtgatttggaaaaacaatttagtgacggaaatattttctcgaatacggatacacagggacaattgatgagagaccaaattcagacatggtgtaaatttatccaaacaaatgaatttagggatatagaagaacagatgaacaaaattgttttcaaaaggaaacaaattttagaaatcctttctgccttacccaatgatcaaaaagagaatgttacaaaactaaaatcttctttagtagctgcttcaaactcagacgaaaaattgttcgcatgcgtaaaaccacatatgtcgagatcaatctattga

SEQ ID NO: 81497 - DNA, 408 bp, Saccharomyces pastorianus
atgaatgatctacaggcaatggacagagcacatagaattggtcagaaaaaggttgttaatgtttacagaattattacgaaaggtacgcttgaagaaaaaatcatgggtttgcagaaattcaaaatgaatatagcctctacagttgttaatcagcaaaacagtggattagcatccatggatacacatcagctgcttgatctcttcgaccccgataacgttacctcacaggacaatgaggaaaagaataatggcgattcccaagcagccaagggcatggaagatattgccaacgagactggtttaactggcaaagccaaagaggcccttggtgaattgaaagagctatgggacccatctcaatacgaggaggagtataatttagacaccttcatcaaaactttacgataa

SEQ ID NO: 81498 - DNA, 156 bp, Saccharomyces pastorianus
atggtcagattggactctgagaagcacattgactttgctccaacatctccattcggtggtgctagaccaggcagagttgctagaagaaatgctgcaaggaaggcggaagcttctggtgaagctgctgatgaagctgatgaggccgatgaagaataa

SEQ ID NO: 81499 - DNA, 444 bp, Saccharomyces pastorianus
atgttccaacgtgacttcagaaagcatggtgccgttcacatgtccacctacttgaagatctacaaggttggtgacattgtcgacatcaaagccaatggttctatccaaaagggtatgccacacaagttctaccaaggtaagaccggtgtcgtctacaacgttaccaagtcttctgttggtgttatcatcaacaagatggtcggtaacagatacttggaaaagagattgaacttgagagttgaacacatcaagcactccaaatgtagacaagaatttctggaaagagttaaggccaatgctgctaagcgtgctgaagccaaggctcaaggtgttgccgtccaattgaagagacaaccagctcaaccaagagaatcccgtattgtttctactgaaggtaacgttcctcaaactttggctccagttgcatacgaaactttcatctaa

SEQ ID NO: 81500 - DNA, 276 bp, Saccharomyces pastorianus
atgcaattaaggcaagcacatagtaaactacttcaagtcttgagggaccgcaatgctaaaatagaagaggaacaacgtcgtgaagtggcggtcgcaaccgctgctgccatgatgactagaacgccatcaccaacaggaaaatccgtcggagatgaagctacaagcaacaacatgcatagtagcagcgcaattagaaatccaaatggaccaaccgttgatcctgaagaaggaaagtacattcaagagctggtgaacactataagggaattacaatag

SEQ ID NO: 81501 - DNA, 180 bp, Saccharomyces pastorianus
atgaaagatctccagagaaaaagctcagtacgaaggcaaatcacgaatgaagacgatgaacggtatggggaggacagcatccatgagctacccaggacaataccacatgtaaatccctatataagaaatacaggattcaggccatcttattcatcccaaattacttcgacaatgagtcta

SEQ ID NO: 81502 - DNA, 120 bp, Saccharomyces pastorianus
gttagctataacggagttgccaaattccggagttatagcgtagatataccgctacagacacattacagactggaagtacggcctataatcgacagacaagactattgtggagagaaatag

SEQ ID NO: 81503 - DNA, 285 bp, Saccharomyces pastorianus
atggattatattgaaacggaatgtgatcgtggcataaaactcggcaggtttactaatcctcaacaaccgagggaggatatacggaagattttagtaggggacctagaaaagttcaggataaataacggtctgactctgaattctctatcattgtactttagaaatttaacgaaaaataacaaggaaatttgtatttttgaaaactttaaaaattggaacgttagatcaatgacagaagaagagaaattaaagtattgcaaaaggcaacataatacaccatcttaa

SEQ ID NO: 81504 - DNA, 2007 bp, Saccharomyces pastorianus
atgtcagaaacttttcaagggacaaataacaggataaaacgtaatgtcaggacacaaagtgtgccatcaacttcctataataatggcaaagaatcatatggaccaaatactaaccaattaaatgccctactttctcaattggaacagcaaacaagtgttgatagtaccagcacgagctcaaacttttattccattgcacaatatattttacaatcatacttcaaggtcaatgtagattctctaaactctctgaaattggtggatttgatagtggaccaaacttaccctgattctttgacgctgcgaaagctgaatgaaggagcaacgggacaaccatacgattatttcaatacagtttctcgtgatgctgatatctccaagtgtccaatttttgcgttggccatattttttgttatacgatggagccacccaaaccctccaatttcaattgaaaattttactacagtaccgttgctagattcaaactttatttctctaaattccaatcctttactatatattcaaaatcaaaacccaaacagcaattcaagtgttaaagtttcaaggtcacaaacgtttgaaccttccaaagagttgatcgatttggtatttccatggctgtcttatttgaagcgggatatgcttcttattgataggacgaattacaagctttattctctctgtgaactatttgaatttatgggcagggttgccattcaggatctccgatatctgagtcaacatcccttattactacccaatatcgtaacattcatttcaaaatttattcctgagttattccaaaacgaagagtttaaaggaatcggttcaattaaaaattcaaacaataatgccctgaacaatgttacaggaatagaaacccaatttttaaatccatctaccgaggaagtgagtcaaaaagttgattcttactttatggaattatcaaaaaaattaactacagaaaatatcaggttaagtcaagaaataacacaactaaaagcagatatgaactcagtaggcaatgtttgtaaccaaattttgcagttgcagagacaattgctttcaggaaatcaggcgatcggatcaaagtccgaaaatattgtgtcttccacaggtggggggatattaatactagataaaaatagcatcaattcgaacgtactgagtaatttggttcagtcgatagatcctaatcactccaagcccaacggacaagcccaaacacatcaaaggggtccgaaaggacaatcacatgcacaggttcaaagtactaatagccctgcgctagcgccaattaacatgttcccgagcttaagtaattctatacagccgatgcttggcaccttggctccgcaaccgcaagatatagtacagaagaggaagctaccgttaccaggttcaatagcctctgcagcaacaggcagtcctttttctccatcacccgttggtgagtctccctatagcaaacgctttaaactagacgataaaccaactccgtctcagacggctcttgattccttacttacaaaatccatttcaagccctagattacccctttcgacgttggctaacacagctgtcacggaatcttttcgctcacctcagcagtttcagcattctccagattttgtagttggtggtagctcaagttcaataacggaaaataactctaagaaggtaaatgaagattctccatcatcttcttcaaaactagctgaacgacctcgtcttccaaacaacgactccactactagcatgcctgaaagtcccaccgaggtagctggtgatgatgttgatagggagaaaccgccagagtcaagtaagtcggagcccaatgataacagcccagaatcgaaagatcctgagaaaaatggtaaaaacagtaatccgcttggtacggatgctgacaaaccagtaccaatttctaatattcataattctactgaggctgcaaattcaagtggtacagtgacaaagacagctccatcatttccgcagagttct

SEQ ID NO: 81505 - DNA, 861 bp, Saccharomyces pastorianus
atgaatttgcccaaagaccagctggccatagtttcgcaaattgttgagctcttgcataattccagccttttaatcgacgatatagaagataatgctcccttgagaaggggacagaccacttctcacttaatcttcggtgtaccctccactataaacaccgcaaattatatgtatttcagagccatgcaacttgtatcgcagctaaccacaaaagagcctttgtatcataatttgattacgattttcaacgaagaattgatcaatctacataggggacaaggcttggatatatactggagagactttctgcctgaaatcatacctactcaggagatgtatttgaatatggttatgaataaaacaggcggccttttcagattaacgttgagactcatggaagcgctgtctccttcctcacaccacggccattcgttggttcctttcataaatcttctgggtattatttatcagattagagatgattacttgaatttgaaagatttccaaatgtccagcgaaaaaggctttgctgaggacattacagaggggaagttatcttttcccatcgtccacgcccttaacttcactaaaacgaaaggtcaaactgagcaacacaatgaaattctaagaattctcctgttgaggacaagtgataaagatataaaactaaagctgattcaaatactggaattcgacaccaattcattggcctacaccaaaaattttattaatcaattagtgaatatgataaaaaatgataatgaaaataagtatttacctgatttggcttcgcattccgacaccgccaccaatttacatgacgaattgttatatataatagaccacttatccgaattgtga

SEQ ID NO: 81506 - DNA, 351 bp, Saccharomyces pastorianus
atgctagctgagaggaaacctccatttagccaccccagtcacagcggcactgcctaccacaatgacatcatccatgagatagcgaatttgcattctattaacctggtagatttgattaatttggaagtatataataacaattgccatacaaacaacacagcgttgcaaactacggcgaattcgctgacacttaatagcattatcaaaaagcttgacaagccaatactgaaagaaagaaataattctctggtatggccccataaaagcagatttaaagcaaaaaggaaccaaccttcgcctggccaatctttaattaacaatacagatataactctctacaacgatgtatag

SEQ ID NO: 81507 - DNA, 429 bp, Saccharomyces pastorianus
atgaactacatcgatatcggtaagaaagaaggcgccaagatcttaactggtggcgaaaaagttggtgacaagggttacttcatcagaccaaccgttttctacgatgttaatgaagacatgagaattgttaaggaagaaatttttggaccagttgtcactgtcgcaaagttcaagactttagaagaaggtgtcgaaatggctaacagctctgaattcggtctaggttctggtatcgaaacagaatctttgagcacaggtttgaaggtggccaagatgttgaaggccggtaccgtctggatcaacacatacaacgattttgactccagagttccattcggtggtgttaagcaatctggttacggtagagaaatgggtgaagaagtctaccatgcatacactgaagtaaaagctgtcagaattaagttgtaa

SEQ ID NO: 81508 - DNA, 708 bp, Saccharomyces pastorianus
atgactaagctacactttgacactgctgaaccagtcaagatcacacttccaaatggtttgacatacgagcaaccaaccggtctattcattaacaacaagtttatgaaagctcaagacggtaagacctatcccgtcgaagatccttccactgaaaacaccgtttgtgaggtctcttctgccaccactgaagatgttgaatatgctatcgaatgtgccgaccgtgctttccacgacactgaatgggctacccaagacccaagagaaagaggccgtctactaagtaagttggctgatgaattggaaagccaaattgacttggtttcttccattgaagctttggacaatggtaaaactttggccttagcccgtggggatgttaccattgcaatcaactgtctaagagatgctgctgcctatgccgacaaagtcaacggtagaacaatcaacaccggtgacggctacatgaacttcaccaccttagagccaatcggtgtctgtggtcaaattattccatggaactttccaataatgatgttggcttggaagatcgccccagcattggccatgggtaacgtctgtatcttgaaacccgctgctgtcacacctttaaatgccctatactttgcttctttatgtaagaaggttggtattccagctggtgtcgtcaacatcgttccaggtcctggtagaactgttggtgctgcttga

SEQ ID NO: 81509 - DNA, 813 bp, Saccharomyces pastorianus
atgccctcggcgggcatcatgaccgccatgaacccttacatgcccatgaatcgctacataatgtcaccatattataatccgtacggtatccctccacctcacatgctgaacaagcccataatgacaccctacgtgtcgtatccatatccaatgggaccgcggacctccattccttatgctatgcaaggtggcaacgctaggccctacgaagaaaatgaatatagtgctagcagttacagaaacaagagggttaacgactcatatgattcgcctttgagtggcaccgcttccactgggaaaaccagacgatccgaggaaggctcaagaaattctagcgtaggatcaagtgcgaatgccaatcctacgcaacagcgcgcggatctacgcccagcagatatgatacctgctgaagaataccactttgaacgggatgcattactctcggccaacgcgaaagctagaagcgcaagcacaagcacaagtacaagcacaagcacaaaccgggacaggagttcatggcatgaggcagaacccaatgaagacgaagaagagggtacggacttggccatcgaggacggagcggtccccactcccacttttactacgttccagcggacctcgcagccgcagcagcaattacctagtcttcttcaaggcgaaatccgactctcatcgcatatttttgccttcgagttccccctgagctctagcaatgtagacaagaaaatgtttatgagcatatgtaataaagtatggaatgaatcaaaggagctgacaaaaaaatcatcatcacaccacagaaccggaaaatag

SEQ ID NO: 81510 - DNA, 513 bp, Saccharomyces pastorianus
atggccgtatcagcccgtttgagaacgactgccgaggatacatccattgctaaatcaacacaagatccaattggtgatacagaaatcagtgtagcaaatgctaagggcagcagcgatagcaacattaagaattcgccagacggaaacagcgttggtcaggagtcggagctagagcatgtccctgaggaggatgactctggtgacaaggaagcagatcatgaggattctgagacagccactgcgaagaagaggaaagcccaaccattgaagaatccgaagaaatcattgaagaggggtagagtcccggcgcctttgaatttatcggatagcaacactaatacacacggtggtaatattaaggacggcaacttggcttcgtctaactctgcacattttcctcctgttgctaatcaaaacgtgaaaagcgcgcccgcacaagttactcagcattcaagttccagccccgtgtacaatacttgggaaaggccagttctagacaatctatacaagtga

SEQ ID NO: 81511 - DNA, 1983 bp, Saccharomyces pastorianus
atgggacttctgtacgagaacaaagataaaaaatataatttattgacaaaaaaccactggagttgcaatgatgactccatcattttactggatgttgatcatgtctatcaagtaagcacctcgaacggggcactattgaagttaatcacagattcgtcgtggcacaaggtaacgatctcatctagaggatttatttgcctttataatatgaaggacaataaactgcagattttcagagatccagcaagaatactaatggaacacaacttggattctacaccagatgatatatgttggtgtggcaatgataccgttgcttgttctttcgaggacgaaatcaaattatacggcccagatggtttgtatgtaacattttggtacccttttactgtaactaacctaagggcagaggttgatgggttgaaggttattaccactgaaaagatttactttctatccagggtacaacctcagacttctaatatatttagaattggctcaactgagcctggtgcaatgcttgttgactcatttagtttactggaggatcatgcacccaaagcaattgaaatattaaagaattttgtcctagagaagggtgtactggactgtattgctgctgcaatagacgaatttgaacctaaactacagaagatgttgttgaacgctgcatcttatggaaaagcttctttgcagtacaagtcatttgacgctagtatatttgtgaatgcgtgtaatacgataatattattaaactgcttcagaagttttggtatttttttgactgtggaggaatacaggtgtatttctttgaaaggtgtcattgataggctgttgacgtatcacagatattatgagtgcatacagatatgcaaattggccaatgaacgatttctgttaggatacgtgtttactgagtgggcaaaggataaaatcaagggtagtcctgacatggaagatgatgagttactagagaaaatcaaatctcgactaagtgttatagatatgacggatacattacaaatggtagcagttgcgaaagttgcatatcttgaaggaaggttccagttatcccgtaatttagctttattagagaaaaacgaagaagctagaattgagcaactgtataatcttgatgatgatagtatagcgctaaaggagtgtatcaaagtacaaaattacagtctgacaatttcattactgattgcactttccaaaaagctgacaaactctcaactgacgaagcttttgatcattgatatgttcaacaatcccttatatctctattatatgagaatggataaagcatacttgtacgatttttaccgccaaactgacagatttattgacttggctcacgtattactgcagcagggaaaagaacagcaatctttacacagctttttaccgcaaattaaggacctttatagccaagttcaaaacagtgaagtggtcaacaatacaatagaacaacttcaaagacaggaaaagttgtggatataccaagaatcattaggcaaaagatttgctatatcattcactaatatgactttagatcaaacgctttcgaagttaatagaaacagggcaagataaacaggtgaaagaaatagttaaaaagttcaaaataagcgaaaaaaagctgtatcacctgaaatgtaaaacgttagtcgaagctaagaagtttgacgaactactacagtttgctcagtcgcggaaatcaccaattggttacatgcctttctacacatacttaaaaagcagaggccatatggataaagctagtccttatgttaatatgatacctggcctttcgtatcaggaaaagaaaaagctttatgtggagtgcaggggttttcgtgatgcaattcaactagcaggaaaggaaaaagacattccaggcttaaaggagatatataatattataccacctaatgagccggaattaaaggcattagcaaatgaaactatgagcaggatatag

SEQ ID NO: 81512 - DNA, 390 bp, Saccharomyces pastorianus
  modified_base (332)..(332): a, c, g, t, unknown, or other
atgaaaaaccctagcttcgactgggaaagattgaaagacgtattttatagaagcagagccattggcgaattaaaatggccaactcagtacgaggagttcaaatgtgccttgtcattaactgttatcgcggttgaaattcaagactttatacaagtatacaattattttgggcagctgttaggcaagataaatttgcaaagaattcatgaggatataataaagtttgagttcgataaagacgagaagctgatattggtcacgaaaagctccatcaaaattgtgaaaggttggtcgccactgacgatagaaagtgtcccattacaggacccaancattgatactatctgggactatcacaatggaatcatgttgctagcaaaatctcgtgat

SEQ ID NO: 81513 - DNA, 483 bp, Saccharomyces pastorianus
atggtccaagaagtatggaagtatataccagaaggatggttacaaggacaagaacatatagacattaatccgatgcgtggaaaatggccgtttttggactcaaatacggaaatcgtcacctcctttgaaaactttgaactaaaaattctaaaacagttccaggaggaattcaagaggttaagtctagaagaaggtgtcaccaaaacaacacatagtcacgttaccattttcaccaagcatcacctcccattcagttctgacgagctttgcgacatattgcaatcatctgctgttgatatattgcaaatggacgataataataacagtctaccaactattgaattgggaagcggaataaacgttcaaatattggttgaacgaagcaaaaggcacaactgtcccagatgttggaaggccaactcagccgaagaggataaattgtgtgacagatgtaaagaagctgtggatcatctcatgtcttga

SEQ ID NO: 81514 - DNA, 537 bp, Saccharomyces pastorianus
atgaattcagaaattttggcacatgccatagaaaaaatcaaacaaaaaggaattaatgcatggtttgacgataaagataatgacatgaaagaatggttgccagaaaaatatcacgacgtagcgcatgaatactgtcgttctcaagatactatggatgtgtggtttgatagtgggtcgtcatggagagtgatcaaagacttttatgaaaaaagcttaaagttgtcaaaactcccatcccccctgtaccaagtttgtctagaaggatctgatcaacatagaggatggtttcaaagttcactgctaacaaaagtagcatcaagtaatgtccctgttgcaccatatgaagaagtgattactcatggttttaccctagatgagaatggtctgaaaatgtcaaaatctgtgggaaatacaatttctcccgaagcaataattcgaggcgatgaaaacttaggcttaccagctttgggtgttgatggcttgaggtatctgatagcacaatcgaatttcacaactgatatagttgctggcccgaca

SEQ ID NO: 81515 - DNA, 567 bp, Saccharomyces pastorianus
atgctttaccttcaaaatttagaaataattcctacagtgctcattaacaacatgcaggagggaatcgaatcgactcttctcaaagaagacaaatttttgagacttgatgaagagtctttaaatgaattcgagaaaatcgtgaggtataatttacaaagtgtaatattgataactaagttctgcttgagtaacatttttccaaaggttcaagctgaagctcaagaaaaagcaaaggggttctatattgtcaacatatcatcggtattgacgttaaaaccgtgcaaatcaggaacacattttattacatcgaaatgtggtataaactctttccacgatggaataacctcagagcttaaattgaaagatagtaatttgaatgtaaaaacgctgattgcatatttacccagttttgaaagtgaagcacgttggaagagactttccccgagtatctcgaaacatctcgtccactgtctacttgagggaagatatggtgatacaattctcgaaagcaaaagatcaattggtgatattcttttgataactggtttcaaaagctcttttacttaa

SEQ ID NO: 81516 - DNA, 909 bp, Saccharomyces pastorianus
atgaacagatttaagcagttagaaaagcttggcaatggtacgtatgccacagtgtacaagggactgaacaaaaccacaggggtatatgttgccctgaaagaggtaaaactggattcagaggaaggtacaccctctacggccatccgtgagatctccctaatgaaagaattgaaacatgagaacattgttagactttatgacgttattcacacagagaacaagttgactttggtttttgaattcatggacaacgatttaaagaaatacatggattcccgcaccgtgggcaacacaccaagagggctagaactaaacttggttaaatacttccagtggcaactactgcaagggctggccttttgccatgaaaacaagattctccaccgtgatttaaaacctcaaaacctattaatcaacaagagaggccagttgaaattgggtgatttcggtctggcccgtgctttcggtattccggtcaacacattttcaagcgaagtcgtaacgttgtggtaccgtgctcctgatgtgctaatgggttctaggacgtactccacatccattgatatatggtcatgtgggtgcattcttgcggaaatgataacgggtaagcctttgtttcctggcaccaacgacgaagaacaactgaaattgatcttcgacaccatgggcactcctaatgagtccttatggcccagtgtaacaaagttacccaaatacaacccaaatatccagcaacgaccaccaagagacctacgtcaagtattgcaaccacacaccaaagaaccgctagacgggaatctcatggatttcttacacggactcttgcaacttaatccggatatgaggctgagcgccaagcaggctctgcatcacccttggtttgcagagtactaccaccacgcttcataa

SEQ ID NO: 81517 - DNA, 1611 bp, Saccharomyces pastorianus
atgatgacgaatacagatgatacagatggcgctcacaacgttgacataacaaatccagcagagtggtttccggaggcaagaaagattagaagacatataatcatgcacattgggcccacgaattcaggcaaaacttatagagcgttacagaaattgaaatccgtggaccgtgggtactacgcagggccgttaagactgctagcaagggaagtgtacgatagatttcatgcagaaaagataagatgcaatttactgactggagaggaagttattcgtgatttggatgatagaggaaattcagcagggctgacatcaggcacagtagaaatggtgctaataaatcaaaaatttgacgttgttgttcttgatgaaattcagatgatgtctgatggggatcgtggctgggcttggacgaacgcgcttttaggtgtcgtttccaaggaggtccatctttgtggtgaaaagagtgttctacctttggttaagagcattgttaaaatgactggcgataaattaacgattaacgaatatgagaggttaggaaagttaagtgttgaagaaaaacctatcaaagatggcatcaaaggtttgcgcaaaggagattgcgtcgttgcgttttcaaagaagaaaatattggatctcaagctaaagatagagaaagacaccaatttgaaagttgctgtaatttatggctctttgccgcctgaaacacgtgttcaacaagccgccctattcaacaatggagagtatgacataatggtagcatcagacgctattggtatgggtttaaacctgtctattgacagagttgtattcacgacaaatatgaaatataatggtgaagaactaatggaaatgacttcttctcaaatcaaacaaataggtggtcgtgcgggaaggttcaaatctagatctgcctccgggggtgttcctcagggttttatcaccagtttcgaatcaaaagttttgaaaagtgtaagaaaagctattgaagcacctgtggagtatttaaaaactgcggttacatggcccacagatgaaatatgtgctcaactaatgacacaattcccaccaggaacgccgaccagtgtcctgctgcagactatttcagatgagctagagaaaagttctgacaacctgttcacgttatctgatttaaagagcaaactgaaagttattggcttattcgagcacatggaagatatcccatttttcgacaagctgaaactaagcaatgcgcccgtgaaggacatgcctatggtcacaaaggcgttcaccaaattttgcgaaacaatagcaaaaaggcatacaagaggtctactgtcataccgattaccttttaacctactggactacaattgcataccgaatgagagttattcattagaggtttatgagtcactgtacaacatcattactctatacttctggctcagcaacaggtacccaaactacttcattgacatggaatctgctaaagatttgaagtatttctgtgagatgattattttcgagaaacttgatcgattaaagaagaatccttacgcacataagccctttggttctacaagaggtcacctctcatcttcgagaagaagattgcgtacataa

SEQ ID NO: 81518 - DNA, 132 bp, Saccharomyces pastorianus
ttgggttgttctggtgctagagtggttgttacactgctatccatcttacagcaagaaggaggtaagatcggtgttgccgccatttgtaatggtggtggtggtgcttcctctattgtcattgaaaagatatga

SEQ ID NO: 81519 - DNA, 816 bp, Saccharomyces pastorianus
atgtctcagaacgtttacattgtatcgactgccagaaccccaattggttcattccagggttctctatcctccaagacagcagtggaattgggtgctgttgctttaaaaggcgccttggctaaggttccagaattggatgcatccaaggattttgacgaaattatttttggtaacgttctttctgccaatttgggccaagctccggccagacaagttgctttggctgccggtttgagtaatcatatcgttgcaagcacagttaacaaggtctgtgcatccgctatgaaggcaatcattttgggtgctcaatccatcaaatgtggtaatgctgatgttgtcgtggctggtggttgtgaatctatgactaacgcaccatactacatgccagcagcccgtgcgggtgccaaatttggccaaactgttcttgttgatggtgtcgaaagagatgggttgaacgatgcgtacgatggtctagccatgggtgtacacgcagaaaagtgtgcccgtgattgggatattaccagagaacaacaagacaattttgccatcgaatcctaccaaaaatctcaaaaatctcaaaaggaaggtaaatttgacaatgaaattgtacctgttaccattaagggatttagaggtaagcctgatactcaagtcacgaaggacgaggaacctgctagattacacgttgaaaaattgagatctgcaaggactgttttccaaaaagaaaacggtactgttactgccgctaacgcttctccaatcaacgatggtgctgcagccgtcatcttggtttccgaaaaagttttgaaggaaaag

SEQ ID NO: 81520 - DNA, 432 bp, Saccharomyces pastorianus
atgacgcatattataaggaatgaaaacctatttttgagcgatttatcacatttttctgcagaccaagaacaacaacaacaacagcaagtccaagaacaagaacaggaacaaaaacaaggacaaatacaaaagcaggaacaagaacaacagcagcaagaggaggaagatgctgaaccggagagtgatattccatcaacgtataatagtgacggaagtatggaaaagtatgaatacactaacaaccacaataatagtacctttttaacttcctcaatggacagtacaccttaccaatctgatatcgatgacgttagtgcttccaaagattgcaaattccaacaagatacattaagaaataggctattatgcttacaaatgaatttttctactttaacagacggtccaaacgagaaatggttaccaaattattga

SEQ ID NO: 81521 - DNA, 1086 bp, Saccharomyces pastorianus
atgctgtcagactgcttgctgaacaatttcagaataacggctcaaatagggtcgggtgcgtacgggctagtgttccatgtggtggatatactgacgagccgtgaatatgcagtgaaaacggtcttcaaatcttcctcgatggatgagttttataataagaacggtttgaacaacaactctcaagtggcgcgaaccactcttctgcaaacgcaactgtatcattttttcaaaagtttccaaaaaaaattgttcttaccttccgttgatctagactcgatattacagttgactgagaatgaactaaataggctaccacactacagggagattgccttccaactaagagtgcagtctcacggcaatatcgtgaagattcaccaagttttagaatcttctattgccacttttatagtgatggattattacgacagggaccttttcacctcgatagttgacgataagcattttgtaaatgatggtattttgattaagaaagtttttctgcagctttgctccgcattagatcactgtcatcgtctcggtatatatcattgtgatatcaaacctgaaaatgtcctactggatcgcaatgacaacgcttatctttgtgatttcgggctttccactaaatctaaatatctagctccaaatgtgtgcgttggcagttcatattatatggctccagaaagaatattgtattgtttgaataccaccaccaacggcatacacgtcgacgaatgctgttcgagcctccctacggatacaggagatatatggtctctaggcatcatcctaattaatttaacttgcataagaaacccatggttaaaagctcaccagaaggaggataacacatttcatcattttgctaacgataataatgtcctgaagaaaatccttcctatatcagatgagctgttcacagtgtcgacgaaaattctacaactaaatccatacacaagaatagacatgaaaactttgatgtccgaagtttcctctcttacttctttcaccagggaagggcccttgtctcaagttccaatccctatcgagcgaagtttacatgacgcatattataaggaatga

SEQ ID NO: 81522 - DNA, 99 bp, Saccharomyces pastorianus
atggtcggaacaaaagggcagtatacagggccggcagtaccttctgttcctaccacaaaccttaacgatatcggtgaccctactaaaactgtgcaatag

SEQ ID NO: 81523 - DNA, 1017 bp, Saccharomyces pastorianus
atgctttccaagttgattagagagaatgcaagtctgtcccatcactttgaaacgaatgaagatctttctcactacaaaaatttagctgaaaggaagttgaaactttcaaaattacgaaaatctaataccagaaatgcgggtgggcagcagggattccataatcttactcaggatgtcgtcattgtggatacacgtgagtttaatgcctcattaccaggcttactctaccgatatggcataagggttattccttgtatgttgacagtcggcgattatgtgataactcctgatatttgtctcgaaagaaaatcgatttctgacttaattgggtcattacagaataacagattagccaaccaatgtaaaaaaatgttaaaatactatgcatatccgacactattgattgagtttgatgaaggacagtcgttttctttagaaccttttagtgaacgtagaaattataagaataaagacatatcaactgttcatcctatatcaagcaagttatcccaggatgaaattcagctaaaactagccaaattagtattgcggtttcccactttaaagattatatggtcttcctcacccctgcaaactgtaaatataatcctagagttgaaattaggacgtgagcaacctgaccctagtaatgcagttatattgggaacgaataaaattagatcggattttaatagcactgcaaagggcctgaaggatggtgataacgagtctaaattcaagagactgttgaatgttcctggagtgtcaaaaattgattatttcaatctccgcaaaaagatcaagagcttcaataagcttcaaaagctctcatggaatgagattaatgaatttattaatgacgaggatttgacggatagaatatactacttcttgagaacagaaaaagaagaacaagaacaagagtcaacagatgaaaatcttgaatctcctggtaagaccactgatgataacgctttacatgatcatcataatgatgttcctgaagcacctgtgtaa

SEQ ID NO: 81524 - DNA, 1305 bp, Saccharomyces pastorianus
atgtctcagatacagtttggcttgatggaatgtttgaaaaaatgtattgctgagttaagcagaaaaaatcctgaactagctctggactggtggaatatggaaaatgtcctggatataaactttatcaggtcaattgactcggtgatggtgccgaactggcaccggatttcttatgaatcaaaacaactggttaaggatataagattcctacgccaccttttaaagatactcgtaacttcagacgcagttgacttttttggagagattcaattaagtttggatgccaataaaccgtcagtatcccgaaaatacagcgaatcaccgtggctattggtcgatgaggcacaattagtcatatcgtatgcgaagaaaagaatattttacaaaaatgaatatactttagaagaaaatccaaaatgggaacaacttattcatatattacatgatatttcacatgagagaatgaccaatcaccttcaggggcctactttagttgcctgttccgacaatcttacatgtttagaactagcaaaggtcttgaatgcctcaaacagaaaaagaggagtacgtcaagtgcttctgaataaattgaaatggtacagaaaacagagggaggaaacgaaaaaattggtcaaagaagtgcaaagtcaggacacttttccagagaatgcaacattaaatgtaagctcgacattttccaaagaacaagtgaccacgaaaagaagaaggacaagaggtgcttcacaagttgcggccgttgaaaagctaaggaatgcaggtaccaatgtagatatggaggtggtttttgaggatcataagttatctgaagaaattaagaagggaagcggtgatgatttggatgacggtcaggaagaaaatgccgcaaacgattcaaagatttttgaaatacaagaacaggaaaatgaaatccttatcgatgatggggatactgaatttgacaacggagaattagagtatgtgggcgaccttccgcagcacatcacaactcatttcaataaagatttatgggcagaacattgcaacgagtatgaatatgttgatcgtcaggacgaaattttaatctctacgtttaaaagtctcaatgacaattgctcattgcaggagatgatgccctcttacattataatgtttgaaccagatatatcgtttatcaggcagattgaagtttataaggccatagtgaaggatttgcaaccaaaagtatacttcatgtactacggtgaaagtattgacgagcaaagtcattctgactgctatcaagagagaaaaagatgcttacacaaa

SEQ ID NO: 81525 - DNA, 210 bp, Saccharomyces pastorianus
atggaagaaagtaagcatacaataggagaagactttgatttgattcatttagattgtccgcagcaaccaaatggctacgactgtggaatatatgtttgtatgaatactctctatggaagtgcagatgcaccattggattttgattataaagatgcgattaggatgagaagatttattgcccatttgattttaaccgacgctttaaaatag

SEQ ID NO: 81526 - DNA, 987 bp, Saccharomyces pastorianus
atggtgggtgccgggatatccacttcttgcgggataccagacttccgatctccgggaactggcctgtaccataacttggccaggttgaagttgccgtaccctgaagcagtgttcgatgtcgattttttccaatcggatcctttgccattttacactttggctaaagagttgtatcccggaaatttcagaccttccaagtttcactatcttttgaaattgtttcaagacaaagacgttttgaagagagtatatacccagaatatagacactttagaaagacaggccggtgttaaggatgatctgatcatcgaggcccatggcagttttgctcactgtcattgtatcggatgtggtaaagtttatcccccacaggttttcaaatccaagctggcagagcatcctataaaggattttgtcaagtgtgatgtgtgcggtgaactggtaaagccggcaatagttttttttggcgaagatctaccggattccttttcggaaacttggttaaacgattcagagtggcttcgtgaaaaaatcacgacgtctggaaaacatcctcagcagcctcttgtcatcgtcgttggcacctcactagccgtttatccctttgcgtctctgcccgaggaaattcctcgaaaggtaaaaagagttctgtgcaatttggaaacggtgggcgattttaaagctaacaagaggcctacagatttaatagttcatcagtactcggatgagtttgccgagcaactcgttgaagaattaggttggcaagaagatttcgaaaagatacttacggcccaaggtggaatgggggataactctaaagagcaattacttgaaattgtacatgatttagagaatttgagtttggatcaatctgaacatgagagtgcagacaagaaggataagaagctacagcgtctcaatgaccatgacagcgatgaagatggagcaagcaactcctcttcttcacaaaaagccgctaaagaataa

SEQ ID NO: 81527 - DNA, 84 bp, Saccharomyces pastorianus
atgagaggaagagtaaatcaaggtaacaagattggcaaacataataagaaaggtccaaagttcaaatctagaaaaaaattatag

SEQ ID NO: 81528 - DNA, 3306 bp, Saccharomyces pastorianus
  modified_base (2065)..(2125): a, c, g, t, unknown, or other
atggatcaagacaaagttgcttttcttttagagctggaggacaagctggctaaaattcgttcccaagtaaactctaaattggagaatcaaaagcatattgctataatattaactgccgttgaggaaaatattgcaggtcaagctacaaatgatgtttcaaaaaacattgtaaattatatcatttcctttatgtcactattggatcaagcagtagacccatctactcatgaaataaaagatattcaattggcttcctcatctacatatcttctagatctgatatttcattattcgcctaaggtattattaagatcgaagttttctgaaatcctaacgaaaattgccccatgtatcactgcagaaaaggctaatgctcctctaattagagctgctattggttgtttagaatctcttcttattgctcaagatgcacaagcctggaacaatacttatgatctaaacgtcactccaaaaagaggtttgcagggtatacttgaactttcattagatgtaagaccaaaagttagaaagagagcgctagatgcagttcatgcggtcttattgaaccctcctgttgcaccaactgcagagcatgtagcggcagtttttgtagcagatttctgtgacaagcagttagcaggtattttgaatgatctctcgaatttatcaaataaacaattgaaagcacagaaaacaaaggaagacattaacgctagtgtcatgcgctctctaaggttgattacttcagtcgtctctactggacagtggccatcttcacagattgagcctctttgtgatgtactattgggagtcaccaaaagctcagagcaatatctcgtttctgcatcatttgaatgttttgaaagcatgttcaaaacaatggcagaaactaccatttcttctggattggctgaaaataaatacctaagagtcttggataccatttttgcattaaaaccctcaaatgtcgatacgttattaaccaagtcctggattgctgtggtcattaagggtatgtccacttacgcaacacatcaaccactgaaagcgctacgtaaaattcctggtgtatttcacattatgtccacatatttagctagtgaaactccagaagtgtaccaagctgcctctcaatgtcttatctcaatcctttctgagtctgttaaagatgatttgttattgtatacaccaagtgtggatgagaaagttttcaaaaacgtagatgaaatcatctctcaaattgcgaaaacatttatcgacttattatccattagatattcccattgttccagagaaattcttaagattttggtggcagcattcaacaaattcagatatagatctaatcctcactttttaaaatcactgaaaatagtcgatacatggagagtaaatgaagaacagtttatggatttgagaaatgaaatcgaattagtaatcggagcctccatttctgctatgggccctgaagtgatactcgcagaagcacccctgaatttagacaatccatcttccgaaagacctggcagggcttggttgttaccgcttattagagattatacgaaaaatgcgaaccttgcaacttttcaaaacgaattggcaccatacattaaaagttttcaatctaagttcgataaagtcccggaagaatctattcaattgagagtttttcaaactattgttgaccaaatctggtctacacttccacggttttgtgaactcccaatggacttgagggaatccttcactgacgaatttgcctcagaactatcttctttattatacagcgaggttgagttaagaactacaatttgtcatgctttaaaggtattggcagaaagcaatgtttcatatgccgaagactcctcttctcacaacgttttattgttgcaacgtttccccatttctgaagctcaaaagaatatagaatacctttcaaccaaatcaacgaatcttctagcagttttgttcaatgtttatactcaaaccactccaaatgcaaggagttatattttggaaacgattgatcaatatttaaagattacttcaaaggaagatttggagnnnnnnnnnnnnnnnnnnnnnnnnnnnnnnnnnnnnnnnnnnnnnnnnnnnnnnnnnnnnnatgtgaacaaagaaaagaaaaagcctcaattgacagcgacactattggacttaatcatatgtatgataacatacttacctgtctcgtcttattctgctttattctcaatatttagcctcaccgtaaattctgctgacgcgctaattcaaaaaagagcttatagaattattacaaagctttctgagttgaaatcgggatcaacagctgtcgcccaattcatttcggatattgagaatgtcatggtagatagcgcctcctctgttcaaacatctgctaaagctgcaagactaacagcaattaaaaccatagtagaattattacctttagatcatcttgatttcattgttagaaccgtcgctgaggttattttgagtacaaaggatgtgaatgaaaaatctagagagaccgcttttgatactttaatttgtatgggaagaaaaatgaatgagccaaatggtattatcaaattatcccaaataccaggttatgatcctaccactccagatcaatcgtcgtcaatatcagagttttttaagatcatttctgccggtcttattggtgaatctcaacatatggttagtagttcaattacgggttatgcttgtttagtttttgaattcaaaaatgaactcgattccggtatactaatggatatatatgacaccattgaattgtacttaacttctaactctagggaaattgtaaaaagcgccattgggtttaccaaggtttgtgttttggggcttccagaagaactgatgaggccaaaggtgccagagttacttctaaagttattaagatggtctcacgaacacactggtcatttcaaagccaaagtcaagcatattattgaaagattaataaggagatttggatatgactacattgaagccaacttccctgaagaagataggagattattaacaaatataagaaagatgcgcaataggaataagcgtaaagatgaagaagttactactggagttagtgatgtagctgccacaaagggttcaagatttatgtctgcattcgatgaagctgtttatgggtctgatgaagaaaatgataatggatcagatcaggaggaaaatgttgctggtggcaaaatgaagaatggggccaagcaatttattgtagaatccggtgacaacccactagatttgttagattctcaacactag

SEQ ID NO: 81529 - DNA, 489 bp, Saccharomyces pastorianus
atgattgaaagagcttccaaaaaagaatctcaaaatgtaccggctttaccacatattgcaggctataaatcttccattctaagccgccatcaccacactaccataacaaacgaagataggatgccttcggcgatgaccccaagagatgaggatgccttaacagagacccaagaaaatccatttgtaactagcaaactgccgataatgagaaaagaaaataggttagaaaatataaccctttcctttgaggatgaggagcttgaatcacttggcgaagtggaaggccctaaccaaaagtctcaagaaaataacaatgaggaaagttttaaagagaacaataaaagtttaacagagtctcctcatggtgatgaccgtgacatatcaatgtttcaattcgactcaaatgttgatactaaatgggcagagcaggaagatatggacagcacatttcaacgtcgaacctcactagattatgggggttacttttaa

SEQ ID NO: 81530 - DNA, 906 bp, Saccharomyces pastorianus
atgcttctagaaccaagtaaaccttttgagtcaatactaaatcaagcaaaatgtgtagtccttgcaggtgggacaatggaacccatgtcagagtttttgtcgaatttgctacctgaagttccttctgaagacattacgaccttgtcgtgcaatcatgttataccgaaagagaatttgcaaacttatatcacaaaccagcctgagcttgagttcacattcgaaaaaagaatgtctccctcccttgtaaataatcatctttttcaattttttgttgacctgagcaaagcagttcctaaaaagggtggtattgtagctttttttccaagctatcagtatttggcgcatgtaattcagtgctggaaacagaatgacaggtttgctacattaaataacgtgaggaaaatattctatgaagcaaaagacggcgatgatattctatctggatattctgattcggtagcagagggaagggggtctcttttgctggctattgttgggggaaaattatcagagggaataaattttcaagatgatttatgtagggctgtggtgatggtgggcctgccgttcccaaatatttttagtggagaactaatagttaaaaggaagcatttggccgctaaaataatgaagtcaggcggaacggaagaggaagcttcacgagcaacaaaggagtttatggagaatatttgtatgaaagctgtcaaccaaagtgttggacgtgctatacggcatgcaaatgattacgcaaacatttacttgctcgatgtgcgatataataggcccaatttccggaaaaaattgtcacgttgggtgcgagattctatcaattccgaacatacaacacatcaggtcatttcttcaacacggaagtttttttcaatgcgcagcctgaattcacgctaa

SEQ ID NO: 81531 - DNA, 1551 bp, Saccharomyces pastorianus
atggacaaaaaggaatattcggagactttctatcatccttataagccctatgatattcaggtacagttaatggaaactgtatacagagtgctatccgaagggaagaaaatagctatcctggaaagccccactgggacaggcaagacgctgtccttaatctgtgccacgatgacttggttgagaatgaataaagcagatattttcacccgcatggaaactaacatcaaaacgaatgaagatgatagtgaaaacctaagcgatgacgagccagactgggttattgacacttatcgaaagtctgttttacaagaaaaggtggatttgctaaatgattatgagaagcatttaaacgaaattaacacgaccagttgtaagcagttgaaaactatgtgtgatttagataaagaacatggaagatataaatcagttgatccattaagaaagaaacgcaaaggcgctaggcaccttgatgtatcacttgaagaacaagattttattccgcgcccctacgaatcagattctgaaaacaatgatacctccaaaagcgcaagaggaggaagaatatctgataaagattacaaattgagtgaactaaattcacaaataataacacttttagacaaaattgatgggaaggtttcgagagatccaaacaatggcgatcgctttgacgttacaaatcaaaatccagtgaaaatatattatgcatcgagaacttattcacaattaggtcaatttacttctcagttaagattaccctcgttcccatcatcctttagggataaggtcccagatgaaaaggtgaagtacttaccacttgcttcgaaaaagcagctttgtattaatccaaaagtgatgaagtggaaaacattggaagctatcaatgacgcatgtgcggaccttagacatagtaaagagggatgtatgttttatcaaaatacaaacgaatggcgtcattgtcctgatacgttagctctcagagatatgattttttcagaaattcaagatattgaagatttagttcccctgggaaaatctttgggaatttgtccctattacgcctcgagggaggcacttcctattgcggaggtagtgactttgccatatcaatacttactttctgagtccacccgttcaagtcttcaaataaaccttgaaaattctatagtaattattgatgaggctcataatttgatagaaacaataaattctatatattcctctcagatctcgttggaggacttaaagaattgccataaggggatagtaacttatttcaacaaatttaagtccaggctcaatcccggtaacagagtaaatctattaaagctcaattcacttttgatgactctgattcaatttatagttaaaaatttcaagaagataggacaagaaatagatcctaacgatatgttcacaggaagtaacatcgataccctaaacattcataaactattgagatatataaaagtctccaaaattgcttacaaaattgacacgtataacccagcactaaaagaggaagaatcgtccaaaaatgaaatcccataa

SEQ ID NO: 81532 - DNA, 1101 bp, Saccharomyces pastorianus
atggtcgtgaagaatttagatttgactaaaagacaaaaccaacagaaaatatgtggtaaatttacaacttgcgaaagagactcattagctaatgtactggagcaagaaagacacaggtcaacaattacggagccattggctaattggctggacgattatttcatgtttttaaatcctcaaaacgaccagtgttgtagattaaagaagggaacagatgaggtttgtcctccctcttttccaagtagacgttgtgaaacttgtttccagcagggttcttggaattacaacatgtcagggtttcctgagggcaaggacttcatggaatacctaagcatatggattaatgcgcctagtgacccctgccctctaggtggtcgtgcgccatattcgactgcgttagtttataatgaaacgagtgtgtctgcgtcagttttcagaacagctcatcatcctttgagatcccaaaaggactttatccaggcgtatagtgatggagttaggatatcaagttctttccccgaactagatatgtttgcatactcgccgttttacattttttttgttcaatatcaaactttggggccattgacgttgaagctaatagggagtgccattatcctaatttttttcatttcatctgttttcttgcagaatatgcgcagctcattcttactggctttggtcgttaccatgattatcgtagatattggtgctttgatggccctactaggtatctcactcaacgctgtcagtttagtcaatttaattatttgtgtcggtttgggtgtcgagttttgtgttcatattgttagatcatttacagtggtccccagtgaaaccaagaaagacgcaaactcaagagttctctattccttgaataccataggtgagtccgtcatcaaaggtataactctaaccaaattcattggagtttgtgtacttgcattcgcccaatcgaaaatatttgatgtattttactttagaatgtggtttacactaatcattgtagcagcattgcatgctctcctatttttacctgctttactttcattgtttggtggtgaaagctatagggacgattccatcgaagcagaagattag

SEQ ID NO: 81533 - DNA, 981 bp, Saccharomyces pastorianus
atgaatgtgctatggattatagcactagttggccagctgatgcggctcgttcagggaacagctacctgtgccatgtatgggaactgtgggaaaaagtcagtatttggaaacgaattaccttgccctgtgccacgtagttttgaacctcctgttctttcagatgaaactagcaaacttttggttgaagtttgtggtgaagagtggaaagaggtccgttatgcctgctgtactaaagatcaagtggtagcactgagagataacctacaaaaggctcaacctttaatttcctcatgcccagcatgcctcaagaattttaataacctgttctgtcacttcacttgcgctgctgaccaaggaaggtttgtcaatattaccaaggtagaaaagtcaaaagaagataaagatattgttgcggaattagacgttttcatgaattcgtcttgggcatctgaattttatgactcatgtaagaatattaaattttctgctaccaacggttatgcgatggacctaatcggaggtggtgctaaaaattacagtcaattcttgaagtttttgggggatgctaaacctatgcttggtggatccccctttcagattaattacaagtatgatttagcaaatgaagaaaaagaatggcaggaatttaatgatgaggtttatgcttgcgatgatgctcaatataaatgtgtgtgttctgattgtcaagagtcttgcccccatttaaaacctttaaaagatggcgtgtgtaaagttggccctctgccatgtttttccctttctgttctgatcttttacacaatctgtgcactttttgcatttatgtggtattatctctgtaaaagaaaaaaaaacggggcaatgattgtggacgatgatattgttccagaatcaggttccttagatgaatcagagacgaatgtattcgaaagtttcaataatgaaactaacttacataatggtaaactcgctaacctataa

SEQ ID NO: 81534 - DNA, 723 bp, Saccharomyces pastorianus
atgatgtttttatatgctacatgggccttgaggagaaaggatgggaaaactaggttgttacttggaatatctggtttactcatagttttggcttctattgtttgtgcagccggatttttaactctttttggtttgaagtcgacattgatcatagcagaagtaataccgtttctaattttagcaataggaatagataatattttcttgattacacatgagtatgatagaaattgcgagcaaaaaccggagtattcaattgatcaaaaaataataagcgctatcgggagaatgtctccttccattttaatgtcattgctatgtcaaaccggatgcttcttgatagctgcatttgttacaatgccagctgtccataattttgctatatattccacagtttctgttatattcaacggagtattacagctaacagcgtatgtgtccattttgtctctctacgaaaagagatccaattataaacaaattactggaaatgaagaaactaaggaatcatttttgaaaacgttttattttaagatgttaacgcaaaagaggctcataatcattatcttctcggcttggtttttcacatctctggttttcttaccagaaattcaatttgggctagatcaaacattggctgttccacaggattcctacctggttgactattttaaggatgtttatagcttcctaaacgtaggaccaccggttacatggtcgtga

SEQ ID NO: 81535 - DNA, 480 bp, Saccharomyces pastorianus
atggcaacaccaaaaattttggggcagtcctacagtatatcaaagactttaaaggttagtgaaggatttggattgcggacaacttattggagacaagcagactcaattttcaaatttggtagtcctaatacgctatcagaaaagtcaattgaaaaagcaagaaaattgttgggcaacctgattgcttccgagggtgagttctcttggaaaatttggaaagaaagtgattcttcacaaaaaaaaatactacgttttttgggttgtatccccactactttacgctgcaccaatacagcacaagatcatcagaagcccacaaacctaccctcaaacatttccctgaaaaaaagagaatatcgaaatcgggttaaagcaatagccacaaaggctgctttggaaaaaagaatggcgtatatcaaagacaatgatgtagctttcaaaaaagagctagtaaagaggagaatagttggggaggtttga

SEQ ID NO: 81536 - DNA, 1362 bp, Saccharomyces pastorianus
atgaatacattaaggtgtttgacacaagcactatccaaaagtgggagagaagctccaaaactatatcagaaagtaatatttccaggcctgttcagagagggtataccaattgcaaatgtcaagaaagttgatgaaaaaataatagatagcccaacatcaacgtcagttaatggagaggcaaaaaaaatagtacggcatggtgtgaagtatgaaagggagcaagttaaggaatacctttcaagcctgccgactttaacgctttctaggaaacaaattagggatgactatgatgaggaacgtgcaaaacgaatgtatatgttctctaaacaaacgaattcctcgaataaattccagaaacttcttacagcaaagtctcaagagtttactagagaactattgacgctactgatagattgcacatcgaatgagaagaattcagggccagaacgcttcactcgtaagtttcttaagtttagtaatgacgagatccctcctctccctgacttttcaaagaaccctcaattgtttgaaaattatattggaatactaagtcatacaaagttcaattttcgttcatcttccaaactaaatggtattgtgcgtaagatgctgcggcacctacttcatccaaccaataagacgactctgccgttgcgttctgctcaagtttataatgactcaatatactttttcagtgagcacttcgactttgcgtcttgtagagaaatatttgcacaaatgaaggctgaggggactaaaccaaatacagtcacttttaatcttttactgcgtaatgtagtgaaaaactcgcatattagaaaaacgaagcaccctgacgatgaggtccttttttatcttagaagtatgcgtaatcatggagtttttgcagatgtaataacttggacgacatgttataactttcttcgtgatgaagtttcgagacaattgtacattgttcaaatgggtgaacatttaggaaattttaacgtaaattttgtttatactgtgctaaggaacggagattatagagcagaggactgtttaaaagttttagcagcaaattcactaccgatttcccgtaagacgttctatttgtgcatagaacgactactaaacgaggaacaacttgaaaccgcatctaaattacttgactatggttttcagcacttgaaaagtaattttaagttagactcggaggcaatgaatcatttcatgcgggtatttgctaataagggaagaagtgatttggcattcctttgctataatacttgtcgtaagatttacaaaattaaacctgattctcagacgttcgaaatgttatttaaagcgttagttagatggcaacaccaagatttgggcagt

SEQ ID NO: 81537 - DNA, 702 bp, Saccharomyces pastorianus
atgagttgggtgaactacaggaccagttcatcgaataaatatgatcaatacagagtcacattaaaatcaattaggaacattgaagcctctgttcaaccttcgagagatcgtaaggaaaagatcacagatgaaattgcccatttgaaatataaagatcctcaatcaacaaaaatcccagttttagagcaagaactagttcgtgccgaagctgaatctttggttgcggaggctcaattatcgaatatcacacgtgaaaaattaaaggctgcttatagttatatgtttgattcattaagagagctttctgaaaaatttgccctgattgctggatacggaaaggccttattggagctgctagatgactctcctgtcactccaggtgaagctagaccagcgtacgatggctatgaagcttctcgccaaattattatggatgctgaatcggccttggaatcttggaccctagacatggctgcagtcaaaccaactctttcatttcatcagaccgttgatgacgtctatgaagacgaagatggtgaagaagaagaagaacctgaaatccaaaatggagatatccccggtcaagtagtcgaagaagaggaagttgaatggactactgaagttcctgtagatgatgaagcccatgaggccgatcatcatgttagtcaaaacggtcatacctccggttctgaaaacatctga

SEQ ID NO: 81538 - DNA, 363 bp, Saccharomyces pastorianus
atgcacagaacttactctttaagaaatcaaagagctccaacggctgctgagctacaagctcctccaccaccaccatcctcaacgaagtccaagttcttcggaaaggcctctattgcgtctagttttagaaaaaatgcggctggtaactttgggccagagttggctcgtaaattatctcaattggttaagactgaaaaaggtgtccttagagctatggaagttgttgccagcgaacgccgtgaagctgcaaagcaactgtctctatggggtgctgacaatgatgatgatgtttccgacgtaaccgacaaattaggcgtcttaatatatgagttgggtgaactacaggaccagttcatcgaataa

SEQ ID NO: 81539 - DNA, 984 bp, Saccharomyces pastorianus
atgcaccctatgacccaacttgcaattggtttagcatcaatgaacaaaggatccctctttgctacaaactaccaaaagggcctcataggaaagatggaattttggaaagatactcttgaagattcgctaaatttaattgcttcactcccgctgctgactgggagaatttattcgaacattacaaatgagggacacccattaggtcaatatagtgaggaggtggattggtgtacaaacatatgttccctgctcggcatgacaaatggaacgaactcttctaatacatgcaaccttacttcccagcaatccctggacttcataaacttgatgcggttatataccggtatacatgtagaccatgaaggtggtaatgtttctgctcacaccacccacttggttggaagtgcgttgagtgacccgtatctcagctattcatctggaataatgggattagcgggtcctttgcatgggttagcagcacaagaagtagtaaggtttctcatagagatgaactctaatatttccagcattgcacgagaacaagaaatcaaagattatctttggaaaattttgaattcaaaccgtgtgatccccggttatgggcacgcagttttgcgtaaaccggatcctcgatttacagcaatgcttgaatttgcgcaaaagaggcctattgaatttgagaacgacaagaacgttttgttgatgcaaaaattggcagaaatagcgcctaaggttttgttggaacacggaaagagtaagaatccatttcccaatgttgactctgcatcggggattttgttttatcattatggaatcagggaattattattctttaccgtcatttttgggtgttcaagggccatgggacccttgacacaacttgtttgggatcgcattctaggtttaccaattgaaaggcccaagagtttgaacttggagggtctggaagcacttaccaaagcaagcaatgttaacaagttgtaa

SEQ ID NO: 81540 - DNA, 489 bp, Saccharomyces pastorianus
atggtacaaaggcttctaccgggcgcacatatatgcagaaggtccttcaattcgtctgcaattataaagtcttctgcattgactctcaaggaagcattagaaaacgtgatacctaagaaaagagatgctgtgaagaaattgaaggcctgttatggcagcacgtttgtcggaccgattaccatttcatcagttctaggtgggatgagaggtaatcagtcaatgttttggcaaggaacatcattagatcccgaacatggcattaaatttcaaggtttaacggttgaagaatgtcaaaatagattacctaatacaggtattgatggcgataatttcctgccagaatcaatgttatggctgttgatgacaggtggtgtgccaactttccagcaagctgcttctttaaggacagaattgggtattcgtggaaggaaattgccaattatacagagaaagtttggtcagttacccaaagatatgacccttatgacc

SEQ ID NO: 81541 - DNA, 1113 bp, Saccharomyces pastorianus
atgaatttgagtaaccctttaactcgtcctagacgtaagctaataccagatctttttagtgcatctctaatagtggcaatgttgggtttttttgaatctacgaccgcgtcgaaatctcttggaacaacttacaatcttaccgtttcctctaatagagaactagtagctttaggattcatgaatattgtcatctcattattcggtgctcttcccgcattcggcggatatggaagatccaagatcaacgccctatcaggagcacaaagcgtaatgtcgggagtgtttatgggtgtcatcaccctaatcacaatgaatttacttcttcaattcgtacattatattcctaattgtgttttatccgtcataacaaccatcatcggaattagtttattagaggaagtgccaggcgacataaagttccatttgcgatgtggtggctttagtgaactatttgtttttgctgttaccttctgcactacaatattttactcaatcgaagcaggaatatgcatcggatgtgtctattcaattataaatattataaagcattcagcaaagtcaagaatccaaattctggctagggtagcgggaacgtcgaactttacgaatcttgacgactacatgatgaacatgaaaaggaactctctggatgttgagggcacagaagaaatcgagggatgcatgattgttagaatacctgagcctctcacatttacaaacagcgaagatttaaaacagagacttgacagaatagagaggtacggttcgtctaagatacatcctggaaggaaatcacttcgctcgaaggattccataaaatatgtcattttcgatttaggtgggatgacctcaatagattcttcagccgcccaagtgctggaggaaattatcactagttacaagaggcgcaatgtctttatttaccttgtcaatgtatctataaatgacaaagtaagaaggcgattattcaaagcaggtgtagctgctagtgtggaaagagcgcaagcaaataacaacgaaaataatactagcaacacatttagtgatgcaggagagacatatctccgtacttcgatagcattgatgcggctctttatgaaattgagaaaatga

SEQ ID NO: 81542 - DNA, 1065 bp, Saccharomyces pastorianus
atgacatcaaataattcgttattggggcgtggaaggatgtcatattcctctaccgctccaccaagattcaaaagatcagtcgaccagcgtgacactttctcggacaattttgattatgataaggattcatccaatcgaggcaggacctatattgcagcatctaattcaactactggggtacccccacccaacaactcaagatcaggatgcaccaataatacaaataatacaaataatacaagtaatacaagtaatacgaacaataatgatagcgttgatgagaatacagtgtttgaaactgtaccttattacctgccctgcttttcatggcttcctgagtacactttcaataaactgtggggcgacgtaatcgcaggtatctcagtagcgtcatttcagataccacttgcgctatcgtacacaacttcaattgcacatgtcccacctttatgcggactatattctttggctattagcccatttgtctatggtatcttaggttctgttcctcagatgatagttgggcccgaaagtgcaatttccttggtcgtgggacaagcagtcgaatctataacactacataaagaaaatgtttctctaattgatatttcaacagtaataacatttgttagtggcactatcctacttttttctggtatttccagatttggtttccttggaaatgttcttagcaaggcacttctacgaggtttcataagttcagtaggactggttatgataatcaactccttgatttctgaattaaagctagacaaatttttagtaagcttgcctcaacactaccatacccctttcgagaaaatacttttcctcattgattatgcaccagcacaataccatataccaacggcaatattcagcggatgttgcttgattgtcctctttttaacgcgtctactaaagaggaaattaatgaaatatcacaagagcgcaatattttttccagatatattattggtggtaattgtcactattcttatttccatgaaatttaatttaaaacacagatatggtatatctatcattggcgactttaagcatgga

SEQ ID NO: 81543 - DNA, 642 bp, Saccharomyces pastorianus
atggaaaatgataatttacttttaaaccttgaacaaattaatgaggatttggaagatgggcactatattgaagaaaactctcaaggtaacatcctagattttaatttgaatctacctccttcaagttttggaagaagtcataccagaaactcaaccaggtctagtggtttcaatgaagatatagttggtgccctcagaaggagagtcgggccatctgaacagaattttgccgaggaagacgattccagcaacagttgtttttctgatggctctcagcaaaattttcagcaggagaaaacaaattttcaagacgtcattctggattatcaaactaaaaaattctacgattacatcaaagaaagatcaattgttgtcggaagaacaacgcgctccaatccgcctttcaagagaaagatgctgttggttgacatcatcccaagccgcatgggcgaagctgaaacgggagctaactttgatgatgtagaaagaggtgtcagcagacagatagccgccagtgccttcctatccttactgaatttggctacgaaagggatggtcaagttgaacgaatatcctgttgcagatgcggtaactaaagatcttaaactgagaagagaggacgaaataattgtatatgcctga

SEQ ID NO: 81544 - DNA, 1209 bp, Saccharomyces pastorianus
atggcacctctttcgttgaactttaaagatgacaagaaatataagggcctcacaacagtgtggttgctttctgcgttgggaaattccattgtaaaggaaagtaacaattattattcaaacaaaagcaactccactggaaacatatcttcatccaccgttaagaaaaaagacatcgtaaatatttccataccaaaaacatgtgatgaaattcaaaatttcgaaaatgatttttctcttagatacatttctaatcttttatatggagtgacaatttgctataataaaaaaaccgagtatgtgttgaatgacctaaatcacctgcttgtgcagttacaaaaaaatgatgtatacgcttttaaggccaaaaataagtctacgaggattaatggattgaatagtaataacagtattataggaaacaaaaacaataattacacctgggaagaatgcgtttttttcgatgacgatcccttatatgatattactaaagttcccgcactggagtttcttaacactaccctccaagataatgtatcttttattgaggaagctaaatcaataaggagacaagactacatcaatgagttaagtaattctaacaggttcgagcttcatggggacatgactaactcagacgcgcaaagtaatctaggatctaacgttagaaattcttttccgctggatgaaattcccgttgatgtggactttaacctggacttagatgatatagtgagccatcaggggacacctttaggctctcactcaagttcacagaaggatggaaacgatttcaagtttaattatcaaggagatgaattggtgttgaattttgagaacgataatgaaaataacagtaatggaggagaagatacatcagttgaaaatgaagggccggtagccaatctcaaagactacgaattggggttggaagcgcaggcttctgaagaagaaaacgatcttcaacagaaagttaataccagaatgcaaagaggacatcgcgccgatgtaggtgggcaattttctaaggtacaatttgatgccaaaacgagttatccaaatgaagttctcaaattcaaccatggaaattacagccacttaatggaaaaaaacaggattagaaaactaaccggccaaaattttctcacctctaacataagtagtttggtaaggtcatgtggtgaggaagaattttatcaacaaattggttaa

SEQ ID NO: 81545 - DNA, 255 bp, Saccharomyces pastorianus
atgaagtttttcaggaaactgcctgatgtgatgggcacatatgaagtcataaaacaccttgataaaatagtccttttcaaagcctgcacctcttgcagtagaagaaaccaaaaaaatggaaagtgccttttctcgagaggatttacaaaatctgatatgaacgtattttccaagataaatagtaaacttaaagacaaaagtatcttcgagatgactgtcgatgattatgttgccgctggcttccaaaccctttag

SEQ ID NO: 81546 - DNA, 1851 bp, Saccharomyces pastorianus
atgaatggtaaaattattggctggttctctcatgaacaaggtaagatcattgcggatacattgagatattggaaagttgaaggcaagacgcctgggttaccgattgatctagaaattggatatgttcctccctcaactcgtggtcaatatccaggtctctacctatttggtggtcattccaggatgctgcgtcctgttcgttacctgcctttggataaagaagacattgttggaccttttgagcaagtgtacatgaacattgctgtcactcctcaagaaattcaaaataacgttcatacacacgtagaatttacgcccacaaatattctttctattttggctaatttgactccattttctgatttcaaccagtctccaagaaacatgtatcaatgtcagatgggtaaacaaacaatgggtactccgggtgtagctttgtgccatcgttccgacaataagctgtataggttgcagacaggtcaaacgcctatcgtgaaagctaatttatatgatgattatggcatggataactttccaaacgggtttaatgctgttgttgcggtcatctcgtatactggttatgatatggatgatgcaatgattataaacaaatcagcagatgaaagaggtttcggttatggtactatgtataagactgagaaagtggatttagcacttaacagaaaccgtggtgacccaattacacagcattttggtttcgggaatgacgaatggccaaaggagtggctcgagaaattagacgaggatggtttgccatacattggcacttatgttgaagagggtgatccaatctgcgcatactttgacgatactttaaataagaccaaaatcaagacatatcactcctctgaaccagcatatatcgaagaggtaaatttaatcggtgatgaatccaataagttccaagaactacaaactgttagcataaaatatcgtattagaagaacgcctcaaattggtgataaattttcttctagacacggtcaaaaaggtgtttgttcaagaaaatggccaaccattgatatgccttttagcgaaacaggtatccaaccagacatcatcattaaccctcatgctttcccttcgcgtatgaccattggtatgttcgtcgaatctttagcaggtaaagcgggggcattgcatggtattgcacaggactctacaccttggatctttaacgaggacgataccccagccgattactttggtgagcaactggcgaaggcaggttacaactaccacggtaatgagccaatgtattcaggtgctactggtgaagaattaagggcagatatttatgttggtgttgtttactaccaaagattacgtcatatggtcaatgacaagttccaagttcgttccactggtcctgtcaatagtttgactatgcagcctgtcaaaggtagaaagagacatggtggtattcgtgtcggtgaaatggaaagagacgctttgattgggcatggtacatcttttctattacaagatcgtctgctaaattcatcagactacacacaggcatccgtatgtcgcgagtgtggttctattttgaccacgcaacagagtgtgccaagaattggttcgatttccaccgtttgttgtcgtcgttgttccatgagattcgaagatgcaaagaagctattgactaaatcagaagatggagaaaaaatttttattgacgactctcaaatttgggaagatggacaaggtaacaaatttgttggtggtaatgaaacaactacggtggccataccatttgtattgaagtacttggactctgagctatccgcaatgggtataagattgcgttataatgtagagcccaaatag

SEQ ID NO: 81547 - DNA, 1476 bp, Saccharomyces pastorianus
atgtctaacgatggtgtttcttctgcagtagagagaaaagtttacccaagtgagtcaagacaaaggcttacttcttacagaggtaaattacttttaaagttgaagtggtccgtgaacaatggcgaggagaacttatttgaagtaagagattgtggtggtctaccagttatgctacagagtaacagatgtcacttgaacaagatgtcaccatatgaactggtacaacacaaggaagaatccgatgaaataggtggttatttcattgttaacggtatagaaaagcttattagaatgctgattgtgcaacgtagaaatcatcctatggctatcatcagaccttccttcgctaacaggggtgcatcctattctcattacggtattcaaattagatctgtcaggccggatcaaacttcccaaactaatgttttgcattacttaaatgacggtcaagttacatttagattttcttggagaaaaaatgaatatttagttcctgttgttatgattttaaaagccttgtgtcataccagcgatagggaaatttttgatggtattattggtaatgacgttaaggattcctttttgaccgatcgtttagaattactgttacgtggttttaagaaaagatatcctcaattacaaaatcgcacacaagtcttgcaatatttaggagacaaatttcgtgttgtctttcaagcttcccctgatcaatctgatttggaagtcggacaagaagtccttgatcgcatcgttctcgtgcatttgggtaaggatggcagccaggataaattcagaatgttattgttcatgatcagaaagttgtattccttggttgcaggcgaatgttctccagataacccagatgctacgcaacatcaagaagttcttttgggtggtttcttatatggtatgatcctaaaagaaaagattgatgagtacttacagaatattattgctcaagtcaggatggatattaaccgtggtatggccattaatttcaaagacaaaaggtacatgtcaagagttttaatgagggttaatgaaaacattggttccaaaatgcaatactttttatcaactggtaacctagtgtcccagtctgggttagatttacaacaagtttctggttatactgtggttgcagaaaaaattaacttctaccgttttatttctcattttagaatggttcatagaggctccttttttgcgcaattgaaaactaccacagtcagaaagttgctacctgagtcgtggggattcctgtgccctgttcatacgccagatggttctccttgtggtttattaaaccattttgcgcacaagtgtcgtatatcaactcagcaatctgacgtctcaagaattccttctatattatactcacttggtgttgctccggctttcacacctttgctgctgtccttccctgtgttgtgtccaattgatggtaacttatggtgggtctccatgaccagctag

SEQ ID NO: 81548 - DNA, 186 bp, Saccharomyces pastorianus
atgggcggaaatgaactgggatttagatacacgagtgtctgggatgcgctcgtgacaatcggcagaacagaaggcgttagcggttactacaaaggcttagctgcaaacctttttaaagttgttccttcaactgcagtgagttggctagtttacgaagttgtatgtgattctgtaagaaattggtga

SEQ ID NO: 81549 - DNA, 849 bp, Saccharomyces pastorianus
atgcctttgaaggagaaaacagacgatgagctccaatctttacttgcacaagttccgcacaaatatataaaattctacgaaaatgttagacctccgtttatcggaacctattctatggactttactttgccaccaaacgatcccttttctacgaaaggtactggattcaattatgattacgattctgacgttgaatgggttaatgaagaagaagaaggcgaagtcgataacttagaaagtggtgaagaggaggaggaggaggaagatgatgaagacgtacctagcgaaggagagtttgacgggtttctagacagcgaagaaaacagtgatttggatggcctaccctgcgccaagagaaaatttgtaggcccattgataccaacaatatgcctaaaatccaattttgaaaacttatcagaggaaaataaacgatacttacaacaactcaaggccgaagttatcatagaaaccgacgggccaatcgatccattcaaagaacccaaaacatcgtctctaccatccaaaagaagtaattccgacttacaggcacagaccgctagccaatctcaaagtcccgaaaagaaacaaaaagcaatgattacagaccccatggacttacttcgactttttgatggggttcaagacagcacgttttctttgggtactgtgactgaaatagcacagaaaaatttgccgcaatacaacaaacaaacaattaaaaacaccataaaggaatatgccataagaagttctggaaagggtgatttgccccgcaaatgggtaatcaaagacgcacaaaactgggagaatcttcgagccaatgcaaatatgccaaccccgtctttgtaa

SEQ ID NO: 81550 - DNA, 105 bp, Saccharomyces pastorianus
atgcatatggacgaatacttcaatgacaaggatccaaatagaagtgacgatgctctgtatgtaaatacgtctagccaatacgaaggagtggctttaggtatgtga

SEQ ID NO: 81551 - DNA, 870 bp, Saccharomyces pastorianus
atggttgatttggagcaggaatttgcgctcggtgggcggtgtctggcattccatggtcctcttatgtatgaagcaaagatcttgaaaatatgggatccatcttcgaaaatgtataccagcattcctaacgacaagccaggtggtagttcacaagcaactaaggaaataaagccacaaaagctgggagaagatgaaagcattccagaagagatcattaatgggaagtgttttttcatacattaccaaggctggaagtcgagttgggatgagtgggttggatatgataggatacgggcctacaatgaagagaatattgccatgaaaaaaagactggcgaacgaggcgaaagaagctaagaaatcgttactggaacagcagaaaaaaaagaagctctccactagcctgggagggcctagtaatggtggaaaaagaaagggagacagccgctcgaatgctagtataagtaagagcacttcacagagttccttaacatcttcagtgagcggcaggaaaagcggaagaagttccgctaattccctccatcctggcagctctttgcgctcgtcatccgaccaaaatgggaatgatgaccgcagaagatcttcttcgctatcgccaaatatgctacatcacattgccggttatccaacccccaagatttcccttcaaattcccataaaattgaagagcgtgttagtcgacgattgggaatacgtaacgaaggacaaaaaaatttgcagactacccgctgatgtgacggtagagatggtactgaataaatacgaacatgaagtgagtcaagaattggaatcgccagggtcccagtcacagttgagtgaatactgtgccggttctcaagttgtattttga

SEQ ID NO: 81552 - DNA, 216 bp, Saccharomyces pastorianus
atgcttttatataggttggaacggctgccatatgacagacttctgagaaaatcatcgaaggatcaaaagccactagtaccaattaggatttatggggctatccatctgttaaggttgataagtgttttaccagagctgacctcgtctactactatggatctacaaagctgtcagcttttaatcaacaaaccgaagacttcttggtttggttgttga

SEQ ID NO: 81553 - DNA, 1212 bp, Saccharomyces pastorianus
atgtccggttccgaatttgatgaagtttacgtcggtgttggtgctaaacgtatccgtgatttgtttgctcaagcgcgttctcgtgcaccagctattatttttattgatgaattagatgccatcggtggtaagcgtaatccaaaggaccaagcttacgccaaacaaacgttgaaccagttattggtcgaattagatggtttctcacaaacaagtggaattattattattggtgccacaaatttccctgaggctttagataaggcgttaactagaccaggtagatttgataaggttgtgaatgtggatttgccagatgttcgtggtcgtgctgatattttaaagcatcacatgaagaagattacattggcagacaatgtggatccaactattattgcgcgtggtacccccggtttatcaggcgctgagctggcaaatttagtcaaccaagcagcagtttacgcgtgtcaaaaaaatgctgtttccgttgatatgtcccacttcgagtgggctaaggataagatattgatgggtgctgagagaaagactatggtcttaacagatgcagccagaaaggccactgctttccacgaggctggacatgccattatggccaaatacaccaatggtgctaccccgctatacaaggccacgatattgcctagaggtagggcattgggtattacttttcaattgccagaaatggataaggtcgacatcaccaaaagggagtgtcaagccagactggacgtgtgcatggggggcaaaattgcagaagaattaatttatggtaaagataacaccacaagtggttgtgggtctgacttgcaaagcgccaccggcacagcaagggctatggttactcaatatggtatgagtgatgatgtaggacccgttaacttgtcagaaaattgggaatcttggtctaataagattcgtgatattgctgataatgaagtgattgaacttttgaaggactccgaggaaagagcaagaagactattaactaagaaaaatgttgagctacatagacttgcgcaaggtcttattgaatatgaaactctagatgcccacgaaatcgaacaagtttgtaaaggtgaaaaactggacaaactgaaaacttccaccaatacagtcgtagaaggaccagacagtgatgaacgtaaagatataggcgatgataaacccaaaattcctacaatgttaaatgcatga

SEQ ID NO: 81554 - DNA, 957 bp, Saccharomyces pastorianus
atgaacgtttcaaaaatacttgtgtcgcccacggtcacgacaaatgttttacgcatatttgctcccaggctacctcaaatcggtgcttctttgttagttcaaaaaaaatgggccttaagatcaaagaagttctaccgtttttattctgaaaagactagcggtgaaatgcctcctaagaaggaagctgatagctctggaaaggcatccaataaatccacgatttcttcaatcgacaattcgcaaccaccacctccatcgaacaataatgataaaaccaaacaagcgaacgtagctgtgtcacatgctatgctagcaactagagaacaagaggccaataaagacttgacgagtcctgatgcacaagcagccttttacaaacttctcttacaatcaaactacccgcaatacgtggtctctaggtttgagacccccggtattgcatcatcgcctgaatgcatggaactgtacatggaggccctgcagaggataggcagacactcagaggctgatgccgttagacaaaacctactgacagccagctctgctggcgcagttaacccatcattggcgtcatcttcatcaaaccagtcaggttatcatggtaactttccatcgatgtattctccgctttatggatctcgcaaagagccactacatgttgtcgtatctgaatcaacttttactgttgtatcgagatgggtaaagtggctgcttgttttcggtatcttaacctactctttttctgaaggttttaaatacatcacagaaaatacaacgctactaaagtcgtcagaagtagccgacaaatcagttgatgtagccaagacaaatgttaaatttgatgatgtctgcggttgtgatgaggcccgtgcggaattggaagaaattgttgatttcctgaaagaccaactaagtacgagtccttgggtggtaaactaccaaagggtgtactgttga

SEQ ID NO: 81555 - DNA, 1806 bp, Saccharomyces pastorianus
atgggcaattatcaaaacgcagcccaattttttactgcttatgttaagtacaattcttccctaggattgtatgaaacatataatttgacagatcccgacgagtttgctaatcacatcaataacggggctttcacgaatgctggtattaaaacacttctaaagtgggcaacagacattggcaatcatctcggcgaggtcgttgaccccaaatggagtgaaatttccaaagatatttatatccctagatcctcatctaacatcactttggaatactctggtatgaatagctcagtggagattaaacaggcggatgtgactttaatggtttacccacttggatatatcaatgatgaatccatattgaacaatgcaattaaagatctttattattattcagaaagacagtctgcgtctgggcctgcaatgacatatccagtttttgtggccgcagctgctggtctgctgaatcacggctcttcttctcaaagttacttatataaatcggttcttccatacttacgggctcctttcgctcaatttagtgagcaatcagacgacaactttttaacaaacggattaacccagccagcattcccctttttaacagctaacggtggatttctacagagcattctgtttgggttaacaggaatccgatattcttatgaggttgatccagatactaaaaaaattaaccgtttgttaaggttcaatccaatagaactaccgttgctccctggtggtatcgctattagaaacttcaaatatatgaaccaagttttagatataataattgacgaccacaatggtacgattgttcataaatcaggagatgttcctattcatataaagataccaaacagatctctaatacatgaccaggatatcaacttctataatggttccgaaaacgaaagaaagccaaatctagagcgtagagacgtcgaccgtgttggtgatccaatgaggatggataggtatggtacctattatcttttaaaaccgaaacaagagcttacagttcaactgttcaagcctggcttaaacgcaagaaacaacatagcggaaaataagcaaataacaaacttgacggccggcgttcccggtgacgttgcattctctgctctagatgggaataattacacgcattggcaacccttagacaaaattcatcgtgcgaagctattgattgatttaggtgaatacaacgagaaagagattaccaagggaatgattctttggggacagaggcccgcaaaaaacatttccatatctattttgcctcattctgaaaaagtcgaaaatttatttgcgaacgtgacagaaattatgcaaaattcgggaaatgatcaacttcttaatgaaaccattggtcaacttttagataatgccggaattcctgtcgagaacgttattgattttgatggcatagaacaagaggatgatgaatctttggatgatgtgcaagccttattgcactggaagaaggaagacttagccaagctaattgaacaaatacccagacttaactttctaaaaagaaaatttgtgaaaattctggataacgtgccagtgagcccaagtgagccatactacgaagcaagtcgcaaccagtcgttaatcgagatattacccagtaatagaacaactttcactattgattatgataaattgcaggtgggtgataaagggaacacagattggagaaaaacaagatacatagttgtggcagtacaaggagtgtatgatgattatgatgatgataacaaaggagctacaatcaaggaaattgttctcaatgattaa

SEQ ID NO: 81556 - DNA, 1794 bp, Saccharomyces pastorianus
  modified_base (1767)..(1768): a, c, g, t, unknown, or other
atgaaaagaataagatcgctttggttcaatgcggaggcttcttattcaaaccttaacaattctcctagtttgaggaacaaaaatagtaccgataataactctcgctctaaaaattatcgttctttctcaaggtttgacttgatcaactctatacttttactgatgatgctatttttattagctatcttcgtcactgcattatatttaacaaagagttccaggcttacatactcacatgcctcgagggctgccctatttaaccctctgggtgtgatatcgccgtcattgggaaatcatacgttgaactacgatccagaagcaagggaatcttctaaaaaactttatgaactcctttctgatttcaacacggcatattacgatgatgagaacatgattttgggaagtaacttgttctcaaagaatacatactcgagacaaccatatgttgctaacggttatataggtagtcgtattcccaatattgggttcggctatgccttagacaccctgaatttttacacagacgcaccaggcgctttgaataacggttggcccttaagaaatcatagatttgccggtgcgtttgtatcggacttttattgtctacaaccaaaactaaactcaacaaacttcccagaattggatgatgtaggatattccactgtcatttcatctattccacaatggaccaatctacagttctcattagtgaatgattctaagtggttcaatccacaaaatgttacgttggatgacgtaactaattatagtcaaaacttatcaatgaaggatggtatcgtaactacggagttagattggctaaacagtcaaatacatgttaaaagtgaaatctgggcacatcggcacattcatccactgggagtggtttctttggaaatttccctgaatacggaccatttaccttcggattttgattcattagatgttaatatatgggatatacttgatttcaacacatcacataggactgttctacatagcacgggaacagacgaaaaaaacaatgcggttttcatgattgtgcagccagataacgttccatcttctaattgcgctatttactcaacgtgtactgtaaagtatgaaaattccaccaatccaataaattctagtgaatcttttgaagaaaaagatgtttcttctaatatttataatgttattttgacagaggaccaacccaagataatcgttcataagtatgttggtattatgtctactgagttcaataagaacaaagaacaacaagacaatactaatattgatttggccaaaatgatagctctaaacagtaaaggcaattacgagaagcttctgtcaagtcacaaacgtgcgtggtatgacctttacaacgacgccttcattgaaattccttctgacagtcttttagaaatgacagcaagatcgtccctattccatttactagcaaatacaagagactacaatgtctcgagcgataggggtcttcccgtgggagtttctggtttgtcatcagattcctacggtggtatggtgttctgggacgcagatatatggatggaacctgccctattgcctttcttcccaaatgtggctcaaaatatgaataattacagaaatgctacacattcgcaggcaaagttaaatgcagagaaatatggataccccggagcaatatacccctggacatctggtaagtacgctaattgtacttctacgggaccttgtgtcgattacgaataccacattaacgttagaatagtcgctatnnggcctccttatatccatatatcttga

SEQ ID NO: 81557 - DNA, 273 bp, Saccharomyces pastorianus
atggggaatgaaaataacgcctatagcaatatggacggtttgctttcgcaggatatctttgaacaggagaccgcggccacgctatttaaaagagacattgtcacaatgaactttaacaataatatattcacaccacggtatagtccgcgcacttttaccaataccgactacaattataatgataatgataataatgataatgatacagaggggcctggtccaataattcatccgggtcctgaaccaccaagatatgacgagatttcatcataa

SEQ ID NO: 81558 - DNA, 3024 bp, Saccharomyces pastorianus
atgcaatctactgtcccaatagcaattgcgagcaacggcaacaagagagatgtcgtccagaacgtttctgcaggcgacgagggtgatatattgcaaaggctagcccgtaacagagagatgatttctacctccctctcgccacaaaaatcgtcaggatttagtggtagaaggaggtcatctagtgttagggacgccctttcttctttttttggaactggtaatagtccaacatctagtatggacgattattccaatttgatgaaccgtaactattctaccgcatcaactgccatgtgtaggggaaacagttttccttcagatgttggcactaaggcttacaatattacgggatcttaccaaccggataggcacaggaattctgttccgtataccaccatagaccagttacacacaaggcaagacaccgggttgaggagagagtcagatccagtcgcggccaaaaaaatatctagtaataatgatattgttaggtcattcataacacatcatgctagtaatagcactatgtttattaatagggtgctatcggactatttagcggatcgtggtttcatcaagcaaacaccgttatataataagaaaagtgtgctggaaatttccattgcaacaagtgcagaatcagttttcttgccaactacagaaagtgatgaaacagagtatctatcactgattcatggttctttaaatcaggcgcgaacacagcctgtcgggtccactaacactgcagaaagtgatttcctcccttcatgtcctacgatggacactttgaatgaaaacaatgatttatcactatttccgttacatacacagcgaaccagcccctctaatacagcaaggacaggtaatgctatggatacaagcaattctgatcgtgcttctccggcctcgaacaataacacaacagatgcggattcctttgttgcgagtggcaataacaaccctatgaataataacaattctcccgcgagaaacagacatcctaattctcactcgcgttctcttcctaatgcttggaatagccaaatgccttcattcagctttgcattgatattttccctaaataaatcaactaccctttctgatattaaagtagaactcacttctaacgtgagagtggtgtggttcaatggtctcccccctacgaagaatgttaacgaggaatgctataatataggttctttggactggaccttaaatgcagacaactttaatcttttcattccgcaaggcgcaaagtctcctcttgatatcgttgaaaatcattccaataacaggaaattgaaagtgctccagaaattatcgatgaggaaacgccgttctttctcgaataaagcagttcttagggaaaatatattaaacaatttaaatgcctcgaattctacgaacaagttaaatgctggtgtttatgtctttattatccccatagtgcttgccagtcgtattcctgaatcgctttactacccatcagcgagggtatcctacagcttaagattagcgacaaaattgaaggatgaacatacacagttggttgcatcacggccacgttcttcttctatctcttctcctcaaaaactgcgttcatattcctgttctgattcttatgaatattctcaaattgatgacaccatagaaggagaaacctacaataacgacaaaaattctactggaaaaatcgcatttccctcctcatggttaaaaagtgcgaaggggcgcttaaaaaggaataattctaacggaagctcagataataatggcgcatcttctagtggtttagcgatgcaacatgattctgaagacactataaatttacagtacccgcttcatttggtgagaactccgccagaaatctctgtcactacagcaaataagccactttacattaacaaggtttgggagaattgtctttcttatgaaatttcattcgcccaaaagtatgtgcccttgaatggtgaaattccaatcacaattaaagtggcacctctagtaaaaagtcttagtgtcaagagaattcgtgttagttgtagagaaaaaatctcctacaggagtaaagactatcaatatgattttgaccagttggatccattggcttcagatccttgcaatccctatcatatgagatatttagtgagaaaaaagaaggacagaagcttgcctctatttgaggtggcctctaaatttactagtgggccttctattatagaggaagttgtcaccaatacagttgatgataacttattagcctacacttcatcaaaagaaaacaacaaagatatcccattttctgagtcctttactgttaaaacgaagttaaaatttccaaaatattgtgaagtggacgctaccaaagctgcaagtctaccaccatatggtatcgatcttttcgacccaataaaagatccaactcagagtgagaacacctctaataacggcaatgtattgggctttctagtgggtcgccctaacagggcttccaagacagttcataaaataccgcaagacaagaatcataatgaggtcaatgatacaaatggaaactcgaatacatctttgcaaactagctcgaatgttcccattcagcactacacacggttgaataaaccaagacgcggtttatatttggacagtatgcattttaagaatatccaatgttctcataaattagaaatcgtcttgagggttagcaaaactgatagtggtagctcaaaaatcataaggcattatgaagtaattgttgatacaccaatttatttgatttctgacctttgtaacacttcaaatatagacttaccgacttatgacatggccaccactgaatcttctaaagtcctgccaccaacttttgaagaggcaacatcagtttcagcatcaccaagatcttctgtatcttattatcccgatgacatttccatgcaacagttgaatttgtctagggtcgacttccctcgcaaatggttacctgtcaaccttacatccaaaaacaaccgctgtttcggattcgtctaa

SEQ ID NO: 81559 - DNA, 72 bp, Saccharomyces pastorianus
atgggagaaacaatgaacgaggctgttgagcagactggaaaagatgtaatgaaaggtgcccttggtttttaa

SEQ ID NO: 81560 - DNA, 1062 bp, Saccharomyces pastorianus
atgttcggtagcaaacgtctgaaaaatgttaaggaagcatttaagtccctaaaaggccaaaattcagagacacccattgagaactcaaaggcgtcttttaaatccaaaaattcaaagacatctactatttccaaagatgcgaaatcttcctcttctttgaagattcctataagttcaaataacaaaaataaaattttttcactagcagaaaccaacaaatatgggatgagcagtaaaccgatcgcagccgctttcgatttcacccaaaatttattggcaattgctacagtcacaggggaagtccatatttatggccagcaacaagtggaagtggttataaaactggaggatagatctgctataaaagaaatgagatttgtgaaaggtatctatttggtggtcattaacgcaaaagatactgtgtatgttttatcgttatattctcaaaaagtacttacaacagtgtttgttccggggaaaataacatcaattgacacagatgcatccttagactggatgctaatcggccttcaaaatggttcaatgatagtttacgacatagatagggatcaactttcttccttcaaattagacaacctacaaaaaagctcattttttccggctgcaagactatcacctatagtatccattcagtggaaccctagagatattggaactgttttaatatcatatgagtatgtaactctaacatactcattggttgagaacgaaatcaaacaatccttcatatacgaattaccaccttttgctccaggaggcgacttctcagaaaaaaccaatgaaaagagaactcccaaagttattcagtccttatatcaccctaattcactgcacattatcactattcatgaagacaattccttggttttctgggatgctaattcaggccatatgatcatggcaaggacagtgtttgagacagaaatcaatgttccacaacctgattacatacgcgattctagtactaatgctgccaaaatttcgaaagtgtattggatgtgtgaacaatccagaatatacttcactactcatctctcataa

SEQ ID NO: 81561 - DNA, 1785 bp, Saccharomyces pastorianus
atgttccacaacctgattacatacgcgattctagtactaatgctgccaaaatttcgaaagtgtattggatgtgtgaacaatccagaatatacttcactactcatctctcataagtcaatcagcagaggagataatcaaagtctcactatgatcgacctcggttacacacctagatattcaataacctcttatgaaggtatgaagaactactatgcaaatccgaaacaaatgaagatatttcccttaccaaccaatgtgccaatagtgaatatactaccaattccaagacagtccccgtattttgcaggatgtcataatccggggttaattttgttaatcctaggtaacggtgagatagaaacaatgctatatccttctggaatatttacagataaagcctctttattccctcaaaatctttcctggctgagaccattagccacgacttcaatggccgcttctgtaccaaacaaattatggcttggtgcgctttctgcagctcaaaacaaggattatttgttgaagggaggggttagaacaaaaaggcaaaaacttcccgctgagtacggtacagcattcattaccggccattctaatggctcagttaggatatacgatgcttcccatggggatatacaagataatgctagctttgaagtgaatctatcaagaacgttgaacaaggccaaagaactagcagttgataagatatcttttgccgcagagactctcgagttggcggtgtcaattgaaacaggagacgttgttttattcaaatatgaagtaaaccagttttacagtgctgagaacagaccagaaagcggtgacctggagatgaatttcaggcggttttctttgaataatacgaatggtgttctcgtcgatgtgagagacagggcacctaccggtgttaggcagggatttatgccatcaactgccgtgcatgccaacaaagggaaaacatctgcaatcaacaacagtaatattggatttgttggaatcgcatatgctgccggaagccttatgttgatcgatagaagaggtcctgcaatcatttacatggaaaacattagagaaatctcgggagctcaaagcgcatgtgttacctgcatcgaattcgtaattatggagtatggagacgatggttactctagtatattgatggtctgtggtactgatatgggcgaggtaatcacatacaaaattcttcctgcatcaggtggaaagttcgatgtgcaactaatggatattactaatgttaccagtaagggtccgatacacaaaattgatgcattttcaaaggaaacaaaatctagctgcttggcaactattccaaaaatgcagaatttaagtaaaggcctttgcattcctggtattgtattaataactggattcgatgatatcagattaataacactgggcaaatctaaaagtacacataaaggtttcaaatacccgcttgccgcgacaggtttatcttacatctcaaccgttgagaaaaataatgataggaagaacctaaccgtaataattacattagaaatcaatggccatctaagagtttttactattccagatttcaaagaacaaatgtctgaacatattccatttccaattgccgcaaaatacattacagaatcatctgttttaagaaatggtgatatagcgattcgagtgagtgaatttcaggcgtcactattttctactgtcaaggaacaggatacgctagcgccagtttctgacacactgtacatcaatggaatcaggattccctataggccacaa

SEQ ID NO: 81562 - DNA, 1224 bp, Saccharomyces pastorianus
atgaacaatattcagagtatcaagaggtatcacattgcaaaagtctacagaagagaccaaccagccatgactaagggtcgtatgagagaattttaccagtgtgattttgacgttgcaggcacattcgaatctatggttcctgattccgaatgtttgtccattttagtggaaggtttgaccagtttgggaatcaaagatttcaaaatcaaattgaatcacaggaagattcttgatgggatcttccaaatcgctggtgttaaagatgaggatgtgaggaaaatctcttctgctgtcgataagttggacaaatctccatgggaagcagtcaagaaggaaatgaccgaagaaaaaggtcaatccgaagaaactgctgataaaatcggtgagtatgttaaattaaatggttctttgaaggaaattcacgctgttctatccgcagatgccaacattacttcaaacgaaaaggctaaacaaggtttggatgatattgctactttgatgaagtataccgaagcatttgacattgactcattcatctcttttgatctttctcttgcaagaggtttggattactatacaggtttgatctatgaagttgttacttctgcatctgctccaccagagaatgcttcagaattgaagaagaaggccaaatctgcagaagacgcgtcagaattcgttggtgtcggctctattgcagccggtggtcgatatgataatttggtcaacatgttctctgaagcttccggcaaaaaatctactcaaattccatgtgttggtatttcatttggtgttgaaagaatattttctttgatcaaacaaaggattaattcctctacaactataaagccaacggctacacaggtgttcgttatggcttttggtggtggtaaggactggactggttatttacccgaaagaatgaaggttactaagcaattatgggatgctggcattgaagctgaatatgtctataaggccaaggctaatcctaggaagcaattcgatgctgctgaaaaagcgggttgtcacattgccgtaatcctcggtaaggaggagtacttagaaggtaaattacgtgtcaaaagattgggccaagaatttgccgatgatgatggtgaattggttagtgcggctgacattgttcctattgttcaagaaaagttatcacaaattcatgaagatggtctaaatgaggtcactcgtttaattaaaggattataa

SEQ ID NO: 81563 - DNA, 387 bp, Saccharomyces pastorianus
atgccattgatgggcgatgacaaggtgaagaaggaagtgggcagggcgtcgtggaagtacttccataccctgctggcccgttttccggacgagcctactcctgaagaaagagagaaactgcacacgtttattgggttgtatgcagaactctatccatgcggggaatgttcatatcactttgtaaagttgattgagaagtatcccgtacagacatctagcaggacggctgccgcaatgtggggatgccacattcacaacaaggtgaacgaatacctaaagaaagacatatatgactgtgctaccatcctggaggactacgattgtggatgtagtgacagcgacggtaaacgcgtgtctctcgagaaggaggctaaacagcacggttga

SEQ ID NO: 81564 - DNA, 111 bp, Saccharomyces pastorianus
atgaaacagatagtcaaaagaagccatgccatcagaatagttgcagcattaggaatcataggcctgtgggtgtttttctcgtctaatgacactatccatcgctacgccggg

SEQ ID NO: 81565 - DNA, 216 bp, Saccharomyces pastorianus
atgattcctaatgctgcaactattctgatggcatggcttcttttgactatctgtttcatcccgtcgtaccttgcacaatctgtccagactgtcctctttacgaatcaccagccttcccgtcttcttgtcttcatcacccacgtttattgtttaatgataaagccttttgtcctttatttttggttccttttcccgcttcgtttacccggtggttaa

SEQ ID NO: 81566 - DNA, 150 bp, Saccharomyces pastorianus
atggtttgcttctcgatctctttcaaccgagcgtcgttcttctcagcagccgccccttgcacttcatctataccagacttcgccttgattaggcccggcgtagcgatggatagttcattagacgagaaaaacacccaggggatcctctag

SEQ ID NO: 81567 - DNA, 135 bp, Saccharomyces pastorianus
atgagatttggtaccaaatcatccaagaaatttgtacctaaggaggtatccaaaaaggttcgtagggctgctaagccattcattacgtggttagaaaccgctgaaagtgacgatgatgaagaagacgacgaatag

SEQ ID NO: 81568 - DNA, 408 bp, Saccharomyces pastorianus
atgtctgaagaagccattagagctcgtgccaaggaactagaagtgaactctgagctcactcaactggatgaatatggtgaatggattttggagcaggctggtgaagataaggagaacttaccatcagatgtggagctttataagaaggctgcagaactagacgtcttgaatgatccaaaaattggttgtgtcttggcgcaatgtctattcgatgaggatatcgtaaacgaaatcgctgaacataatgcatttttcactaaaattttagtcactccagaatacgaaaagaactttatgggtggtattgaaagatttttaggtttagaacataaggatctaatcccactattaccaaaattttggtacaactatacaataatgatatcatctcggaagaagaaatcatga

SEQ ID NO: 81569 - DNA, 522 bp, Saccharomyces pastorianus
  modified_base (379)..(383): a, c, g, t, unknown, or other
atgtctattaatatttgtagagataatcatgatccattttaccgttacaaaatgcctcccatccaagccaaggtggaaggtagaggtaacggtatcaagactgccgttttgaacgtcgctgacatctctcacgcgctaaatagacctgctccatatattgtcaagtattttggtttcgaattaggtgctcaaacttccatctctgttgacaaagatcgttatttagttaatggtgttcacgaacctgccaaattgcaagacgtattggatggctttattaacaagtttgttctctgtggaagctgtaaaaatccagaaacggagatcatcataccgacctgcaggcatgcaagcttgcactgccgtcgtttcatcggcnnnnncttcattaagttatataagttagaaacatattatttaatccgaattatacaatcaatcttaatgtatttgaaaacatctattagtaactttaaaaaaaaaaaaactcctttctttttttctttccgtgccctccctccc

SEQ ID NO: 81570 - DNA, 3081 bp, Saccharomyces pastorianus
  modified_base (2942)..(3042): a, c, g, t, unknown, or other
atgaatacaaatgctcgttctgtgagagtctctgacaagagaggtcgttctagctccacttccccacagaaaattggctcctatcgtactcgtacgggcaggttttcagatactctaaccaatctactcccttcgattagcgctaagctacaccattcaaagaagagtacccctgtagttgttgtgcctcctacgagcagtactccagacagtttaaattccacgacatacgctcccagagtgtctagcgattcttttacggtggctactccgctgtcattacagtctactacgaccagaacaagaacaagaaataacacagtatcttctcagatcactgcaagttcttctttgactactgatgtgggcaatgccacgagtgcaaatatttggagtgctaatgcagaaagtaatacttcttccagtcctttgtttgattatcctctcgccacttcttattttgagccattgactagattcaagtccactgataattatacgctgcctcaaacagctcaactaaacagttttctggagaaaaatgggaatccaaacatatggtcgagtgcaggaaatagtaacactgaccaccttaatactccgatagttaacaggcagcgctctcaatctcaatctaccacaaacagggtttataccgacgcgccctactatcaacagcctgcacagaattaccaggttcaagtgcctcctagagttccaaaaagtacttcaatatcccctgttatccttgatgacgtcgatccagcctcgataaattggattacagcaaaccaaaaagtaccactagtcaatcaaatatcggcgcttttgcccactaacacaatatctatttcaaacgtgtttccattacagcctactcaacaacatcaacaaaacgctgtaaatttgacgagtacttccttagcgactttatgttcacagtatggtaaagtgctttctgcgaggacactaagaggcctgaatatggcattagtagagttttccacagttgaaagtgcaatatgtgctttggaagctctacaaggtaaggaactgtctaaagtaggggcaccaagtacggtatcttttgcgcgagtcttacccatgtatgaacaacctcttaacgtttatggcttcaacaacactcccaagcaaccgctgttgcaagaacagttgaatcacggggtgctcaattatcagctgcaacaatcgctacaacagccggagctacaacaacaaccaacttcatttaatcaaccaaatcttacatattgtaatcccactcagaatttgagccatctgcaattatcttcaaacgaaaatgaaccttaccctttcccgttgcctccaccatcattatcggatagtaaaaaggatatattacacactataagttcttttaagttagaatatgatcatctagagttgaatcatctcttgcagaatgccttgaaaaataaaggagtgtctgatacaaattattttggtcccctgcctgagcacaactccaaagttccaaagagaaaggatacgttcgatgcaccaaaattgcgggaactgagaaagcagtttgactcgaactcattatctactatagaaatggagcaattggcaatcgtcatgctggaccaattaccagaattaagttcagactatttgggtaataccgttattcaaaaattgtttgaaaactcgtcaaatatcatcagggatattatgttgaggaagtgtaataaatatctcacatctatgggtgttcacaaaaacggtacttgggtttgtcagaagatcatcaaaatggcaaacacgccaaggcagataaatcttgtaacttcaggtgtaagcgattactgtactccactcttcaacgaccagtttggaaattatgttattcaaggtattttaaagtttggttttccctggaatagtttcatttttgaaagcgttttatctcatttttggacaatagttcaaaacaggtatggatctcgtgctgtaagggcttgtctagaagcagattccattattacccaatgccaattgctgactatcacttcactgataattgtgctttctccttatctagctacggatacgaatggcactttactgatcacttggctattggatacttgcactttacctaacaagaacttgattttatgtgataaactggtaaataaaaatctggttaaactatgttgtcataaattaggctctcttactgtcttaaagattctcaatttaagaggtggtgaagaagaggcactgtcgaagaataaaattatccatgcaatatttgatggtccaatttctagtgattctatcttgttccagatactagatgagggtaattatggtccaacatttatttataaggttttaacctcgagaattcttgacaatagcgttagagatgaagctataacaaagattcgtcaactgattttaaattccaatatcaatttacaaagtcgccagttactggaggaagttgggctatcatcagcaggaatatcacccaaacaatcctccaagaatcatcgtaaacagcatcctcaggggtttcattctcctggtcgcgccagaggcgtttctgtttccagtgtgagaagttcaaattcaaggcataatagcgttatacaaatgaacaatgcaggtccaacgccagcattgaactttaacccagccccgatgagtgaaataaattcctacttcaacaatcaacaagtggtgtactccggaaatcaaaatcaaaatcagaacggtaattctaacggattagatgaattgaattcacaatttgattcatttagaattgctaatgtaacaaatttatccctacctatagttaacttaccaaatgtaagtaataataataacaattataataattctggttattcgagtcaaatgaatcctctaagccgctcagtgagtcnnnnnnnnnnnnnnnnnnnnnnnnnnnnnnnnnnnnnnnnnnnnnnnnnnnnnnnnnnnnnnnnnnnnnnnnnnnnnnnnnnnnnnnnnnnnnnnnnnnnngatacaagtttgtaccgctacaggtcatacggatattag

SEQ ID NO: 81571 - DNA, 120 bp, Saccharomyces pastorianus
atgtgctacaggatcaactatcaatcaatggacagaaatttgacaaacgccgaagttaacactttgcaagacatggtgtgttctaaattggtaaaagaatacagcgtagaactcagatag

SEQ ID NO: 81572 - DNA, 897 bp, Saccharomyces pastorianus
atgtgtacagaagagatgaaattgacaaactcacttaatccggtattccaccaaatggaaggagccacaatttggaaacgaacgaaggctgatgtgggcgtaaaggagccaatgtatatcgagaaaatccgtgaagatatcagacaggtagagaaccttttaaataaagaaaatgtaaagattacggttgacgatgatactatacctttgaaagaaaataatcctaaacaagagtatatgtccgatctggaggttgatttgtgctctcaacatttgaagaggtccattgaactgatagtttctgaagtttttaacaaaaaaatatctagcatgatcaagaacaaagcgaataatacacccaaagagctaaaagtccgttggattaacgcttacttcccctggaccgcgccctcatgggaaatagaggtttggtggcagggcgaatggctcgaactctgcggatgcggattgattcgtcaagatgtgctactaagagccggatataaaccttctgaaacaattgggtgggcttttggcttgggtttggaccgcattgctatgcttctttttgaaattccagatattagactgctttggagtcgtgatgaaagattttcaagacaattctccaagggattaattacttccttcaaaccttattcaaaacacccgggatcatttagggatgttgcgttttggttaccagaagataaaccagatattcatcaagttcatgaaaatgatttgatggaaattatcagaaatatagctggcgatttggtagagagtgtcaagctagtcgatagctttacgcatccgaaaaactgggagaaaatctatgtgctacaggatcaactatcaatcaatggacagaaatttgacaaacgccgaagttaa

SEQ ID NO: 81573 - DNA, 507 bp, Saccharomyces pastorianus
atggaggtaacttcaatgtttctcaatagaatgatgaagaccaggactggtctttatcgcttatattcaacccttaaagttccacatgtagaaatcaatggcataaaatacaagaccgacccacagactaccaatgttacagattcaataataaagcttaccgacagatcattacatttgaaagaatcacatccagtaggcattcttcgcgatctaattgaaaagaaattaaactcagtcgacaacacatttaagatctttaataatttcaagcccgtggtaaccacaatggaaaacttcgattctttagggtttcctaaggatcatcctggaagatcaaaatctgacacatattatataaatgagacgcacctactgagaacacatacttcagcccacgaattagagtgctttcaaaaaataagaaacgattcagataatattaaaagtggatttttaatatctgcagatgtgtacagaagagatgaaattgacaaactcacttaa

SEQ ID NO: 81574 - DNA, 1101 bp, Saccharomyces pastorianus
atggatcaagaacaaaaaattctgaatggggatgagacactctttcatgaagaatccatagagttatttaaggaaatacctcatttctatcaagcgggtaaaggtttgagcaaatctgatttattcaataacttgacattggacacaattctgcagttttcggcaagcgtgttatggatattaaactggctgccaggcttaaaaaaggctatcaatattgatgaagtaagccaagaacccatgttagatgctgatagattaaggagcagctggacattttctgaatcaatggatttaaactattcgaaccctagttccagcccaaattcattaggaaatctaaaaattttattggatgataaagcctccaaaaaatttgatgagactatcgacggattcaaaaccttgaaattcaaactaatcactatactgaggttcaacattagggccttgtgtatatacgacatcgggtctttttttcaaaacaccaaaatttggaatatggatgtgggtagtattgaattagatcaaaatatagcttctctaatttccgaattaagaaggactgaaagcaaattgaaacaacagttaccagaaaaggaaaaaaactccatatttattggtcttgatatagtcaacaactacgccttgattaagggtgccaaatccataaaagttttgaaccataacgggataaagaaaatgttgagaaatgtaaatgtcttacaacatgcctatagaaatctttcttctgaaccatcaaaaattaatatgaacgtcacaatgaatttttactctttatgcggctccagtgaagctgaactatttgaatatataaaagacaatgaattaccgcattgttctgtcgaagatttgaaaaccatattgaggctgcagtttagcgaggaaatgcatcgtcaattgaagagacaaagcactagctcaactaagggttccataaaaccttccaataagaggtacactgaagctttggagaaactaagtaacctcgaaaaagagcagtcgaaagaaggagcccgcaccaagattggaaaacttaaaagcaaattgaatgctgtccatactgcaaacgaaaaatga

SEQ ID NO: 81575 - DNA, 762 bp, Saccharomyces pastorianus
atgtacgaaatatgggtaaggtggtttaactctgtgaaggcgacggtgttgactaatgcctacgagtttaccggttatgaggacgaaacactggatcttttattgcttttcttaaagaattatctcgaagatatgcccagcaaatgtactacagttgaaaaaattataagtgtcctaaatcagcattcctttcctgagaaggcagaagagaaggaagaaaatcttcagattgatgaggaatgggcgaagaatattttggtacggctggaaaaaaccaagattgacagtgttgaggatgtaaaaaaagtaatcactgaaggagataaacatgaactagttggatacaaccagtggttccaataccttataaacaatgaaccgcagcatactacttttcatgaaaagattacctctaagcaactttgggttctgatcaagtatatgtcgaatacatggataaaagaaatacacaagaaaggaaggcattatcgtcggctgcaagattggctattctacatactggtacatacacccgaaagagtcacggcagaatatacaagcatcttgagagatcttggaaagaaatgccttgaactgattcaaaagaagccagttgaagcacatgagaataaaataacactcccgaaggagatggcggaattgaatgttgagataccagccgcggtggagaatatgacgataactgagctgacagtgtctgttatagcagtgaactatggtcaaaaagacttgatagaataa

SEQ ID NO: 81576 - DNA, 294 bp, Saccharomyces pastorianus
atgaaaagaggagaaagccaggcgcctgatgccatctttggtcaatctcgtgcatttgcactatctgattcttcagtgaatcctgatgtcattgaatatcttaaaagtgttaggcaagaagcactaagaaccaacgccatatcgattaagaatcatatgaatctgcaaaagaggacgcgtcacaaatcaagcatgtacgatgatgaggatgagggggcccttaaaaggcacgccatctcgccatccttgattaggcttcaaaggaatgtacgaaatatgggtaaggtggtttaa

SEQ ID NO: 81577 - DNA, 309 bp, Saccharomyces pastorianus
atgaacaaaagacgtggactagagagaaaggacattcctgcatggaaactttgtatttttggagcattgtctggcactgccttatggttgatggtatatccattagatgtcatcaagtctgtcatgcaaacggataatttacaaaagcctaaatttggtaattctatttccagtgtagccaagactttatatgccaatggagggataggcgcttttttcaaagggtttggtcctaccatgctaagagctgctcccgccaatggtgccacttttgctacttttgaattagcgatgaggttattgggttga

SEQ ID NO: 81578 - DNA, 189 bp, Saccharomyces pastorianus
atgtctgaagaatttccatctcctcaactaatcgatgatttggaagaacatccacagcatgataatgctcgagtcgtgaaagatttgcttgcaggtacagcgggtggtattgcgcaagtgctagtggccagccctttgatacgacaaaagttaggttacaaacattcgagcaccccaacaacagccatg

SEQ ID NO: 81579 - DNA, 321 bp, Saccharomyces pastorianus
atgaaaaacgaaagaattcaagaaaacatcaacccatggaccgttattggcataatttgtggcctagctatatgcatcgaagggactgcgttgttagccaaaatccaggagtctctgagcaaggccgaatttactcatgacgaaagtggattacatttgattcagtcatacacgaattatggtcttgatactgacaaattttccagattgaggcggttcttatggtttagaacttggggactttacaagtcgaaagaggatttagatagagaagccaagatcaatgaagaaatgatacgcaaactgaaagcagctaaatga

SEQ ID NO: 81580 - DNA, 264 bp, Saccharomyces pastorianus
atgctacaccataagttcgtatacccatttttattcaagtggcacttatcatgtgtagaaaagtgtcccccacaaatcacttttatagctaagtatgttacagcgaacgataaaaatggcaatagaaaacttacgataagggatgaacaatggcctgagttggcagatccaactccctatgatatttttggcattccaaaggccggatctggaaatcctaaactggacaagaagtcgttaaaaaaaaatatcatcgttatgtaa

SEQ ID NO: 81581 - DNA, 99 bp, Saccharomyces pastorianus
  modified_base (79)..(79): a, c, g, t, unknown, or other
  modified_base (91)..(91): a, c, g, t, unknown, or other
atgaaaaacgaaagaattcaagaaaacatcaacccatggaccgttattggcataatttgtggcctagctatatgcatcngaagggactgcngttgttag

SEQ ID NO: 81582 - DNA, 309 bp, Saccharomyces pastorianus
atgcctatggccgctattttcttgaggaacaagttcattgcctggttctccctgattcagagtgtacactactacctgaacaccgacgaagacatcatcgttgcctataaggaaaataaggcaccatctccaatggaccagcctcctgcaatcaagctattcatgagtttaatcgggttatgcgtgtgttacatgaacttagttttccctcaacaaatagctcaaccatcgtctagcggctctaaagataatactgaaacgacaattgagacaactaccgaagtagagacggaaacagctaagcagtag

SEQ ID NO: 81583 - DNA, 1185 bp, Saccharomyces pastorianus
atgatggcacaagatgtaaataatcccatggtagagtccaaatggagtgagttgagtgaattggccgataattggaacgaaaaaatcgactacaatccatcgcaagatcttcagagattcaccactagagagaatctctataattattatctgaatcactcacaagcgctcgaaaataatatggactgtattaataacagtgaggtgcccaccaatgataaaccaacagatacttatattttaaattctgaaacaaaacagtataatttagagggagattgcccgattttttcataccttcctatgtactgtcaagttattacaggtgcgactttaaacttgttggatcatctatcgcctacagaacgtcttatcggtataaattgggatggtggaagacatcatgcctttaaacagagggcaagcggattctgctatataaatgacgtggtactgttaatacagagattgcgcaaagcaaagctaaataaaatcacgtacgttgacttcgacttgcatcatggtgacggtgtagaaaaggctttccaatattctaaacaaatacagacaatttcagtacatctctacgagcctggtttttttcctggaactggttctttaagtgattcaagaaaggataagaacgtggttaatattcctttaaagcatggttgtgatgacaactacttggaattgatcgcatccaaaatcgtcaatcctctaatagaaagacacgaacctgaggccttaataattgaatgtggtggtgatgggcttctgggtgatagattcaatgaatggcagctaacaatacgagggctttctcgaatcatcataaatatcatgaaaagttatcctcgagcgcacatattcctacttggagggggtgggtacaacgatttactaatgagtagattttatacgtacttgacttggtgtgttacaaagcagttttccaacttaagatgtggtgacaataattcgttccaaatcgatccatttgatgtctgtgatggtgatgattctgaacaatttatacgtgaacatgatcttgttgaaatgtataatgaagagaactatcagtattggatatatgagatggaaggaagttctcgaatgaaaatgttaaggaatgacaataaggatagagatatggtcgaacttatgaagttttacgaactgtaa

SEQ ID NO: 81584 - DNA, 270 bp, Saccharomyces pastorianus
atgtggattcacttgccaatcattaaggacttaaagaaagcctgttctgaagttttcccagttgcagaatactctttcgttactattccaacttacccaactggtacgattggttttatggtttgctccaaagataaaacttgcaatgtcaagaagccactacgtgaaatctctgatgagaaggaggctgaattatacagatactataacaagaaaattcacgaagcttcctttgttctaccaacctgggcagccaaggaattaaattag

SEQ ID NO: 81585 - DNA, 531 bp, Saccharomyces pastorianus
atggcacaagaaatcactcacccaactattgtagacggctggttcagagaaatttctgataccatgtggccaggccaggccatgactttaaaagtggagaaagttttacaccatgagaagtcaaaatatcaagacgttttgatcttcaaatccactacatatggtaatgttctagttttagataatgtaattcaagccaccgaaagggatgaatttgcctaccaagaaatgattgcccatcttgccttgaattcccatccaaatcctaagaaggttcttgttattggtgggggtgatggtggtgttttgagagaggttgtcaagcatgattccgttgaggaagcctggttatgtgacattgatgaagctgttattagactatcaaaggagtacctaccagaaatggctgcctcttattctcacccaaaggttaagacccatattggtgatggtttccaatttttaagagattaccaaaacacatttgacgtaatcattactgactcttctgaccccagaaggtccagctga

SEQ ID NO: 81586 - DNA, 936 bp, Saccharomyces pastorianus
atggaaatagtagcaaacgctaaggaaagtaactatacagacttaatttggtttcctgaggatttcatatcaccggaacttattatagataaagttacatgttcatcaaactcatcttcttcgccacctataattgatttattttcgaacaataactacaatagtagaatacaactgattaacgattttacaacaaaattaatcaatattaaaaaatttgacataagtaatgacaatctagatctaatctctgagatactaaaatgggttcaatggtcgaggatagtacttcaaaatgtttttaaactggtctccacacctagttcaaattcaaattcatcggaacttgaacctgactatcaagctccattctccacctcgactaaagacaaaaattcttcaacatctaacactgagccaattccaagaagtaacagacatggaagtgtagtagaggcctctagaagaaggcgttcttcaactaataaaagcaaacgtcccagtataactgaagcaatgatgcttaaagaagagggtttacagcaatttaatttgcacgaaattttatctgaacccgcaatagaggaggaaaatggagacagcatcaaagagcactccacaactatggatggtgccaatgacctcggattcaccgcctctgtttcgaatcaagaaaatgcaggaactgatattgtgatggaagatcatggtgtactgcaaggcactagtcaaaattatggtactgcaacagcggatgacgcagacatagaaatgaaagacgtcagttctaagcctagtaaacctgaatcgtcggtcttacaactaattgtaagtgaagatcatatcattctcgacactatttcagaatgtaacttgtatgatgatgtaaaatgctggagtaaatttattgaaaaatttcaggatatcgttagctaa

SEQ ID NO: 81587 - DNA, 315 bp, Saccharomyces pastorianus
atggtagaaggagactcttatgtggagactttagactccatgattgaattattcaaggattacaaacctggttccataactttggagaatataacacgactttgtcaaactttgggtctcgagtccttcacagaagaattgagtaatgaactttcaagattatcgacggcatctaaaattatcgtgatagatgttgactacaataagaagcaagacagaattcaagacgttaaactcgtactagcatctaattttgataattttgactactttaaccaacgagatggagagtatgaaaaagcaacattcttctaa

SEQ ID NO: 81588 - DNA, 783 bp, Saccharomyces pastorianus
atgggtgccataatgaacggtatttcagctttcggtgccaactacaaaccatacggtggtactttcttgaacttcgtttcttatgctgctggtgccgttagattgtccgctttgtctggccacccagttatttgggttgctacacatgactctatcggtgtcggtgaagatggtccaacacatcaacctattgaaactttagcacacttcagatccctaccaaacattcaagtttggagaccagctgatggtaacgaagtttctgccgcctacaagaactctttagaatccaagcatactccaagtatcattgctttgtctagacaaaacttgccacaattggaaggtagctctattgaaagcgcttctaagggtggttacgtactacaagatgttgctaacccagatattattttagtggctactggttccgaagtgtctttgagtgttgaagctgctaagactttggccgcaaagaacatcaaggctcgtgttgtttctctaccagatttcttcacttttgacaaacaacccctagaatacagactatcagtcttaccagacaacgttccaatcatgtctgttgaagttttggctaccacatgttggggcaaatacgctcatcaatccttcggtattgacagatttggtgcctccggtaaggcaccagaagtcttcaagttcttcggtttcaccccagaaggtgttgctgaaagagctcaaaagaccattgcattctataagggtgacaagctaatttctcctttgaaaaaagctttctaa

SEQ ID NO: 81589 - DNA, 1059 bp, Saccharomyces pastorianus
atgactcaattcactgacattgataagctagccgtctccaccataagaattttggctgtggacaccgtatccaaggccaactcaggtcacccaggtgctccattgggtatggcaccagctgcacacgttctatggagtcaaatgcgcatgaacccaaccaacccagactggatcaacagagatagatttgtcttgtctaacggtcacgcggtcgctttgttgtattctatgctacatttgactggttacgatctgtctattgaagacttgaaacagttcagacagttgggttccagaacaccaggtcatcctgaatttgagttgccaggtgttgaagttactaccggtccattaggtcaaggtatctccaacgctgttggtatggccatggctcaagctaaccttgctgccacttacaacaagccaggctttaccttgtctgacaactacacctatgttttcttgggtgacggttgtttgcaagaaggtatttcttcagaagcttcctccttggctggtcatttgaaattgggtaacttgattgccatctacgatgacaacaagatcactatcgatggtgctaccagtatctcattcgatgaagatgttgctaagagatacgaagcctacggttgggaagttttgtacgtagaaaatggtaacgaagatctagccggtattgccaaggctattgctcaagctaagttatccaaggacaaaccaactttgatcaaaatgaccacaaccattggttacggttccttgcatgccggctctcactctgtgcacggtgccccattgaaagcagatgatgttaaacaactaaagagcaaattcggtttcaacccagacaagtcctttgttgttccacaagaagtttacgaccactaccaaaagacaattttaaagccaggtgtcgaagccaacaacaagtggaacaagttgttcagcgaataccaaaagaaattcccagaattaggtgctgaattggctagaagattgagcggccaactacccgcaaattggggacctgcaggcatgaagctgcactgccgtcgt

SEQ ID NO: 81590 - DNA, 222 bp, Saccharomyces pastorianus
atgaatcaagaagtcacgatcaagtatgtaggtaaaagatcaggggggagtatgtacataaccaaaaagattgggaaagagtttatatatgaatcatgcctacgatcgtaccttcttggctttcccaagaaaatttttcatctctcgaacttctcgagagattgcgaacggaacggcaaacgccgccggcatttctcggaaagaagactagaaaataaatga

SEQ ID NO: 81591 - DNA, 636 bp, Saccharomyces pastorianus
atggaacagggcaagacaccatattttagtgatattgatgattttatgaatggattgaatattatatcacccttaacacctgacgattttgaaaatgacgatacattagttaaaattgatgaaacctgccaaattcactccgcttctgaacctgagaagacctccataagtcccacatttgggaaaaatatcaaaaaggagctagtaactgatgatacggaaagcattattagcgggcctcctttgcaagagaataaaaagactcttttgaaataccgatatgtcaggacttctcttgatatgctcggctctgaaaagagtagttctaaaaataacagcggtggtatgttccgtattttccataagagtgctaattttggcgacaaaaatcaagaaaacgtgccacgagtgtgggacacacttagaaataatttgggaagggaaatttatcttttgcaaggaagattcaaaaaatggactacaaagcatcaaaatcttaagaagggccaaccttgtaaagatgaagacgccgttaccgttcccttaccatcatctgatccgggaaaggaaacacagttggaaactaaactctgttttgtgcccgaaccaggtgatcagcctttggtacaagcataa

SEQ ID NO: 81592 - DNA, 591 bp, Saccharomyces pastorianus
atgaacacagataccgataaagtcagcgatggtggatttgaactattaaaagtgattagaaactgcatactagatgcttggactgaatttcgaaattatgaaaaaagatgggaggaaggcaaagaggatgatatttactcattggtttacagcctgagacatctatggagtaaaaatagcaaagagaaaagcgccaaaatagagcaattgagatcctataataccaaactaaaatccatcgagttagacccctcatctcccgattcaccaccaccatgcattatcgtctgttctcacgttaatcatgaactcgcaagcccaatgttgattgaaatgggaagacaactagcaacaaaatggaaatatggatttgttggaatagacagcatggatgatttaaatgtcgatgtggcggttagcttactaataaaggaaatatcagaaaagatgaagctactggtttctaattccaatggaagtagtagtagtggtaattcaagttcaatttacaactctcatttaatgaatgacaagaagaaaaacaacaatgccggcttaaacaaaaatatgttgaagaaaattataaaataa

SEQ ID NO: 81593 - DNA, 189 bp, Saccharomyces pastorianus
gtcagagaaggttcgaagagagacctcactgcgatcgccgttctggggggcacttctaccggaaagaccgtcccggtatctaggctactgtctaatatcgtccacgagggtcagtatcccataaggtaccaatctaactggctcctcggctttgttccgtcatccgatcctggtccagagctatattag

SEQ ID NO: 81594 - DNA, 1002 bp, Saccharomyces pastorianus
atgcctgcaggtcatgcttttcgcaccgaacctataatggattttgaaattgagcccattgtcagttcaagtaaattatcatacaacgtcgttactaacgctataaagagtaagtttgccgaagccgtgaaggagtccctagttgtaccgtttatggatgatattgttttttatccaacaccgaatgaagtatacagaggtggtatttgggaggaacaggatcctgaggcagcggcgagggctcgcactgctgcggcagcctcagatatgaataataccagtgctaaggaacacttagaagcacttcaagagggcggaatgaaaacccagagtcgaatcaaaaaagccttaaggccagagagaaagaaagaaaacctaaaagatcttgttgacgcatctggagtagcaacgaaaactacaacccagacaacagtcacaaccgctactaatgatgatgtttccagttctgaaaattctaccaagtcaaggaagtacttcaagaattcaatcaagaaaatcggtagatggtacaaggataatgttggtaattcgagtgacaccgaagatatggatgaaatagatgttcaagataagaaaaatgatgattcagcagatgagagagaatcagataatcctatccttacatccaatccaaaaatgatttctaataggagaccagtaccaagaaggccttcacaaccgttaaatacactatctccaaaactagaaggcaggaaggaaaaagacactgagaattttccagttccaccgtcggcttcaaatatgaatgcttcaaagatgtttgcgaacaaagaaaatagaaagttttctgtatcctcaaatgattctcagaattcgctcaaaaatggtgatccccatgtgaaagcttcaaaacttgaaagctctcaagcttttgttaagaagacctctcagaatcgttttaatgacggctttttcaagcaagatttagaatttgaagaacagcgagagcccaaactgtga

SEQ ID NO: 81595 - DNA, 1413 bp, Saccharomyces pastorianus
atggctagcttgaaggtatttctcgcagtttacttgcttggcggtatcacatttttgcctttggtccttttcaccctctataaaatccatttattgtacagtaaccttaaatcggcatcgaagaaggagctagatcatgatacagcagacgaaattgatgagaaaaccagacttctggctcgtgatatagacccaaagtttaaagcaggcaagctagaagagcaattaggtgtcaaagtttttagcaagggttggatcaccgtcactaagcaatattattatcattcttcagaagtggctgtaattttgaagaattctaataataataaagattcagacactgcacttcaagagcaaatcttgcaaagaacagacttgaagaaaaaacaaaggttttttgcagtattaagacatggaaatttgtttttgtataaagacgattctcaaaatgcaaatttggtccatgctatatctttacaaaacagatttatcaccatttggccccgtttcgatgaactgggtaaggaagaattgccagatgcctcgcttttcactaagagaacttgtattgctattttcaagaatgacctcgtttctatagactctaaaaaccataatgttatcctgccacacttcgacccacttaccagtgctgaatcgaataacggtgacatctctaccaatgacactacacatgaatatcaatcacaattccatagctcaaatcagttcttcttgtatttcgataataacatggacaaagaagattggtattatcagttgatcaatgcctctaaaaacagtaattccctctcaactggtttattggatcctaatgtttcagctaacgcagctcatttgaagactaaggatatgttacaattgattcaggatatcaactctactgaaaatcggttaactactaagtggctgaatgctcttcttgggagattatttctttctctgcaacaaactgatacgttgaataagttcattcatgagaaaatctgcaagaaattgaataaaataaaaaccccagggttcttggatgatttggttgttgaaaaggtcgacgtgggtgatagtgctccattattcacctctcctgagttattagaattgtctcctgagggttcgactaagattgctatcgacgttcaatataggggaaacttgacaattattattgcgacaaaggcgagtattaacttgggatcacatttcaaacaaagggaggtttctttgcagttgtccataaaaattaaagaattttccggtccacttttatttttaatcaaaccacctccatctaacagaatttggtatgcttttcgcaccgaacctataatggattttgaaatgagcccattgtcgcaagtaaattatcatactacgtcgggggatcctctagag

SEQ ID NO: 81596 - DNA, 531 bp, Saccharomyces pastorianus
atggataccattaagataattcagtgcagcatatgcggagacacagatgtttctcgattaagcctgtattgccaagactgcgaagcaatatatcacgaaacatgtctacgcgggctagcttgtgaggtgggcgatcgcaatacgtggcaggagtgcacagattgtagatcaaatgcattgctcgagctgcgcatgggtgctatcagtagccaacttgctagttacgattccaggaattccatgatttttgctggtgagttacgggacaagcacagcgtcaagacacagcagatgtatgaacagatacggaatgccaagcacaaaatccagatgcacgtgcgacgagcactggaccggtacccactgcctctgctgcgcttcaaggatgcctacaagcacgtcaacaagcaagtatcccgcaagttgtaccgtctctctgacaacaagtacctgcctgaccagtacgattacgactctttagcccgaactggagtgcacacagaactcctaatttactgtcatgatgagtag

SEQ ID NO: 81597 - DNA, 999 bp, Saccharomyces pastorianus
atgatgaaggacccaaaatcaggaactacaaactatataattgattttaaatcaggattttcttttgttccgggaagtacgattgacgtgtataacggtttatttgctgatagggagcgagattcacttgggaaatctcatttcgcaagtttggtacttgcgtatacagagcatcattctactgggagtcatacaagcaacacaactgcagcaagtagctccgccaaacacaatgaaggagtcttcgagccatcttcagatgaagaggatagcataacgaattctactgatggtacgagcagtgtgagtaacggcgagagtgacaacgatagtgtttctagttcagataatcaactcagttcaaatgacagtaatgaagattatcattccattaaggacgagtatccgattttcgaagacgaaaatgccgattgtctattatacttacatacatgtcatcgaaattttatctggaaatgtgctaataagtatgaaagggacaactggatcgattctatcaatctattttcagcatatgacggatgctatgtggaaattggtagtatagcaaacactatttgtaataagagaaagcttaccattttgcagaggatggaaagacttaggtctataaaatcagccaaatgggagaaattgaaaaaatttgaaagcactctgatgcttatgggaaaatgtgttcctattagcacaaagactaagacagatatgataaaccgcataagacagctggctgtcagaatggactggttaatctacgaaattaagagaagcgagctgtttgtaagtatcataaaagaagtgactcgcaagcaggctgaaaagaatatcttagagcatggtaaaggagaagaggaggggcaaggcaataacgacgatagtgatggtatagatgatatagaggaaagcttcttattcaacgaggacagtttgcaagtgtgcgtgagcgacagtagttacgacgaatgtagtaacgaataa

SEQ ID NO: 81598 - DNA, 2589 bp, Saccharomyces pastorianus
atgaatcagtctatttcttcgttgattaagcttaaattccttcaatcacacagtaacgataaaaatggcaacaaaaagggcggaagcaatgtttcaacaggcatagataaattaagagagtcggaaagttatagaagtccttttcttcaactcgcagaaatacaggaacacactaataatgacgacgataaacttgatgtaaaagaatgcgagcccacaaaaaaacacagcaaactaagcaggatacggcgtaagatgggtaggttagacttgaatttcaggtcagccaatgaaaagggttctgaagatgatgaaatcttggttgcacaacacctccgtaatggacaagatcctgaagaaatgcctttcaaatcagaaaacaacatagattcgatagagaaagttcccaagcccgatggtgagagagtcacacttactagctccgggtctgataacgtaaagagaaattcaaaacacgccccattcattcctgtgaaacctgctctagaaaaatttccttcttctaatagattgtcaagagattacagaaaatcacaagagcctaccctgtttaacggtgatagattagttcctacccttcctactgtgagtaggatatcgacatcttcttccgtcggttcctctacagcggcttcaagatatttcaatccgtccaaaagagctgttgttgcatcatcatcatcatcgtcgtcgtcaataaaattcaattcgctgcacgcaataccacttgatgcaactcctcaaattgaattggcaaaacaacaagatgagatctccaaaaggaggttcggaagaaggcgcagtagaactgttgacgtatttgactatattaacaaaaacaatacagcaaagaacaaaccgccactctctccatcttcttttattaggactattgacgagaaaaatacaaattctcttatgcaagaccccatgggatcccgcggacctcttttgcccgatgatgccaatattataagcaatgatacagatggagcggaagcaagtcacccagaccatcaggttttatcaaggtctcgatctcaaagtacgtcttttgttcaaggcaagggcggcaagagaaaatcaattgaagatgaaggctaccataacaaattgggcctacctcatggatcaggccctacttcagtttacaacaataaaagcaatgccaattcaactattactggaatgtcaagaagaagtagctcaattgtgaatgctttaagtagttttgttaaccttcgctcctccagtttatcatcctctaggcaacagcaccttcaacaacaacagcagctacaacaaaaactggatgtctcgctggaagatctaccaccggttcccgcgcctgaatttagtgattcttgtaaggacttcttgattaaattagcgccctacgggaagttcattggaatcattttaacggaaaaggatgatgagttcaaaaaaaattgtttaaactacctattaacgaattgcttcgaatttaaaaatgaccctttagatattgccctgaggaaattgttgatgtttttagagcttccgaaggagacgcagcaaattgatagattgataatggcttttagctttgcatactataaggcccaaaagagctattctaaaaaaaaaggaattgagtgcccctggtctaatgcagaccaggtgtattttattgcattttccttactaatgttgcacactgattactttaaccccaacaataaaagcaaaatgacaaagcatgatttcgtggatttagtccataatgacaaatactcaggaggtaatgagatccctatggccgttttgacatatttttatgagaatgtgacagccaaagagtcgcccaaatttaattactttttgatgtcaccaatggcgttggacgatagcatccttgataaagatgcatttgacacaaattttgctatcacattatcttcgaattcgatgtattctcccatagacatgataaaaagggggagtataatacccaaggaagcttccctttccccaatcttttatccgctaacgaattcaattagtgcatctggtatagccccatctacggcggcttcttgcccaccaagtacgtcgggtactataaacggggccaacctcggaacggctaacagtaatagcaatagaccggcttctaactcaatatcgtcttatttttcatataatccaagctctagttctagcggaaatgctacgttagttcaagatgacattaacgtttattcgcacattataaatgatacattaaatgaagtaaatttatttccagaagtctcaaaatattggaataagaatgctctgaaggcaaatttgttgagaaatgaagaacataaatacgaaaaatattatagtattatgaatgatactaaaggtgggtatttacgctttcacaacagtcaattgaataaactgaatttacctaattttgaaatattgaatgataatagccggtctggatgcaagaactccgattataagtattgcaaaatccttcaaatgggaggaataatgaatttggggatgcccagtagaattttctattgttaa

SEQ ID NO: 81599 - DNA, 816 bp, Saccharomyces pastorianus
atgagacagctatggcaagatcctgagttaacccaaatgctaaaggcaattgtcactatgatttacgaacctatggtcaagatcttcaaagttgcaaggatggatgttgctttgaaaaattttgagaagttcatgagtgatttgatcaggcttgttgatgatgttatcaatggtcagttgggcgtttccacacagttcgatgtcgtggaagaaatccataacttagtaaccaaacatcaagatgccttttttgagtttattcatgatgtatatttgaacgattcagagggcatttttgaaggttttattacttggattactacgatagtgaaatttttgcaaaagagtaaattcggaggaccgagtgaaaggattgacttcaataagttaatttgtagagatgatatcgatattgatgtcagacttttgaaagttcaagttaataatgttcttaacaaaaagattggtgcgagaaaaatctataagaagttgttagatttgaaggttaaacaaggtactaaacaaaatagcaagcacgctgctggcatacttcaaaagaattggagtgacataaactcattggttatgccatccagctctggatcttttggacttggagatggtgatttggtggatttggatctcgatacaggtgattacgattttttacataaagagaatgaagttgaattagaaaagcaatacaaagatttattgaatcttgttgttgatgaaagtgaaattgataaattgagatctcaagttttcgcacaggaattaaaaaattatttagaagctcaaattgctaaaaagtag

SEQ ID NO: 81600 - DNA, 135 bp, Saccharomyces pastorianus
atgccgtacacagtaatgggacagatcatgaaatttactaatccaatagcaatcatgaggggtatgattgaattatttatggcacaacccttcggtggtcattcgctccttcaaacaatgttttctacgatataa

SEQ ID NO: 81601 - DNA, 1824 bp, Saccharomyces pastorianus
atgattactcaagacactcctgctttaaatccaacggaagaacactacctgaagagggaactgcttcgatgtcaattggattatgaaattggaaagcttaacgatcagtttgctttgagaaagttcggttatcctttttcaccaaacgatccgacagctccacagcctatctccaataacgattcatcaccagtgctcggtggcaaaggccattttagcgttaattatcccatgctgagttatgttttgcaagaatttatatccacatttcctttactttcaacaaacttgctagttgatgaaaaattctggcagagtaaggttcaagtgttctttgaacatttcatgagtcttgggtttagtgaaagttatgacagggaggaagcttcaaaaaggaagaaagtttccaaaaagctatcaaaggttctcttgttgctctttaactccggtgttggctcttttcaagagcaagcgtattataatgaggataaattcgttttacagtcaggccaagcgagaaaacgctctaatattgagaaatttgcaatgccaactagagaaaatttagagaatttgctcactaacgaatccgtttttattaacggttgggacgtcaatattatatccgtgttcaataagaattcacggaaatgtactgaaagtgtggataatgacaagtctattaaatctactccaacttcgagtcccaaaagccatgctataaaatcatttgcttccacttctaaatggatgaagaatgccttcaacaacactattaacagtaccataaatagtatgcccgaatcctcagcatctttattttcgaaattatcccttggcgtgccttcaactaagagcaagcaatctagaaaacatcattatttcttgattaagattaagaagcaagatgacgacgaccaagataacagcaatgaagagaatagtaatcttgatcaccatgctgattatttctatgtgacaagaacatacagcgacttcaaaaaactatctcatgatttaaaatcagaatttccggggaagaaatgtccgcgcttacctcatagaaataaaaaagtgacgtctatggtaactaaaaccgaagtgttacacaatgggcaaactaaatcagcagccagggaaaaaatcgtcaacacttttgacactgatttacaatctgcatcagagtctgataattcttcatttttacagacaacgaatgaattatctgctacagaaacagtacttacagaaaaagaaactgaaacgttgagaaaaaatattctaaatgagatcaaggaagaagataatattgatgaggacgagtatgaggaagaaggtgaaggtgaagaaagtgattttgatgaatataaagatgcatccgattcaaaaatcaatactttggtgggtgaaaaaatgagaacttcattaagacaatatttaaggactttgtgtaaagatgcagaggtttctcaaagctcatctattcgtcgcttcttcctaagtgggcctaatttagatattaaggacataaatccgaaaatagcagatgacattagaaacagggctctgatagatgtaagtaatttggagaaccaaatacgtttccaacagatggcgttagaaaagtctttaaagctgcaagactcaatgaaagatttcaaaacatccctgttaaaagatgaaaaatacttgatgagtctactaggagaaatcaaggacaatacgaaagttgaagacctgtcaccacttttacaagactttgtggaattgtgtaagatttatatttcctcaatgatttatcaaatgtttctgcgtaaacgataa

SEQ ID NO: 81602 - DNA, 153 bp, Saccharomyces pastorianus
atggatttctatgtcgtcatgaacagaccaggtgctagagtcactagaagaaagagatgtaagggtaccgttggtaactcccacaagacaactaaggaagacaccgtctcttggttcaagcaaaagtacgatgctgatgttttggacaaataa

SEQ ID NO: 81603 - DNA, 177 bp, Saccharomyces pastorianus
atgtctgccaaagctcaaaaccctatgcgtgatttgaagatcgaaaagttggtcttaaacatttctgttggtgaatctggtgacagattgaccagagcctccaaggttctagagcaattatctggtcaaactcggggatcctctagagtcacctgcagcatgcagctgcactgccgt

SEQ ID NO: 81604 - DNA, 1224 bp, Saccharomyces pastorianus
atgttaatgggtcttgatgaagaatatattgcagagagggaacgacagaaaaagaaacaaagtgagatagctgtggcaaaggcacaagctgcacaattaaaacttgaacagcaacagcacaaacttcagcaagtgccgcagaggggcaaaaaagatattgtttcgcagagatctaacgttaatgcgagaaaacaaaacatctcacaaactcttgcagcaaacagagccgcctcgaacaggaaaaatacagcaagtgataatcaaaggacaatgaaatatctgcaggaacagcttgtcattttaacacgagatagaaagggtttatcgaagcaggtcatcgctgcaattttgacgcaggctctagctatgacaataaatcaggttacacaagcggcaaaaaacaaggggattactggtaatccacttacagccttgatggacaagaatcctcagcatttgaatctaattttagcagctgctgtaaacgcggcaactgcaaaagtcacaaaaggtgaggtaaagcaattagtgaaccctgaaactacagcggcgggggctttagcagctaaggcacagcattccaaaccgatacgccaaccaatagtccagacgccgcatgtaccagataggcctccatctcagttatctgcgtcggcatcatcccatcccaataattacttgcatgataaacaaccgggttcgtttgatccttcgtccttgtctcgattttttcaaccgagacaaaatgccagggctacatcctctgtggcagctacgtcagttccggcggctgcttctcaaaatgttgatgcacaacccaaacctaagcctgcacaggacaacgacttagaaagtgaaagcggcactagtagtagtagcagttccagtagtgagagcggaagcgagagcgatagtggtagcgatgacggtagtgctagtggaagcggcgataatagcagcactagtagtgaaagcgaaagcgaaagtgatagtggaagcgaagtagatgaaaagaacaacaaaaacgaaaagatcgatagtgaaagtattaaaaacaacgaatctaaagatgatattccatctaaagacgagaatagtagcaatgataatcgcgagatttcaaaaaccgacgaagaaggtcatgattctaaaaggcggaaggtcagcgaggatatcaacgagggtatcactgaagtaaatgtatcccttgaggaaaaactttaa

SEQ ID NO: 81605 - DNA, 1038 bp, Saccharomyces pastorianus
  modified_base (531)..(579): a, c, g, t, unknown, or other
atgttccgtctttctaatacagtttcttccctagaatttctggatgagtttttgatgggcatattacttgctccagagatggattttttgtcaaatccaagttattctcttccgtctaacaaattagtgggacagggaagttattcatatgtgtaccctatatcatcaagtgcttcgtcaagatgtaacaacgattcaggggttgttttaaagtttgccaaatcacagcataaaagcaaggtgattttacaggaagctttgacgctagcatatctccagtacatgagtccttcaaccaatgaaagtcatattattccattctatgggttgacatacataactaaatcccattttagaagactgaggtccaacgaatgtgttcctggccttattcttccgaaatgcgaaatgagtttatatcacttcaatacagcagtgtcacataagctttcgttgataacaaaaagaaaaatatggtggagacttatgaagcaaatgatagacgcattaaaatctttgaaaacaaatggnnnnnnnnnnnnnnnnnnnnnnnnnnnnnnnnnnnnnnnnnnnnnnnnncatgttcttaatggaggccattgtaaggattttgacttctaccttgctgactttacgtcggcatttcacattaaccaaacaccaacagatctgaataccacggtagaatactgtgcaccagaactaattgatagctcctccgatcatgttcctacatttgaatcagatttgtatgccgtggggctttgtcttttatcatttatatcgcagcatgagccttacaacgaacttcaggcgttagtgtcgcatggatcctctccaggtattggcagttcatctatacagcagtcccaatggctgataaatgctcttttgaaaaaagatcctataaatctaaacatgttaagaaacgatttattccaggattggaagtcagaactagcattattgtccagaattctggttgacagactgcctctagaaaatctcataactatactcgatagtaactatatatga

SEQ ID NO: 81606 - DNA, 147 bp, Saccharomyces pastorianus
atgaacagtacacctcctacgtcacccgttaccagggtttctgatggttcctttccatccataagtaacaatagtaaggattttgcttatcgccaaccgcaaaaacataaaagtaacttcgcatatcacatctggtatctcctgtag

SEQ ID NO: 81607 - DNA, 732 bp, Saccharomyces pastorianus
atgagttacacaattagaaccccttgcaaatcgccttattcaccttatactggggaaggtatgctttacaaccggtcagcagataacttaatggcatcctcttcgcgaaaagcatcggctcccggagaggtacctcaaatagctgttagtaatcatggggatgaagccattattccggcaagcgcgtattcagatagtagtcataaatcgtctcgtgcctccagtgttgcatccattcacaaccaacgggttgatttttatccttcgccattaatgaacttaccaggtgtttcacccagttgtctagcattggatggtaatgcaaacggatattttggaataccattgaatttcaattcggaagcaagacgagggtcagatctttcaccttttgagatggagtctccattgttcgaggaaaacagaactcaaaactgcagtggctctcgcaaaagttcagcttgtcatattccccatcaacgtggtccaaggaaagaaggtaatgactcacgattgatctacggcaatgagaagggcgcctcacaatcacgtctaacgttgaaggaaccgcttacatctaaaggtgttgaagctccttacagcagtttgaaaaagacatatagtgcggaaaacgtcccactaacatctactgtatcgaatgataagtctcttcactcgcgcaaggagggaagtactaatactgtacctgctacatccgcatcaagtaagtga

SEQ ID NO: 81608 - DNA, 2130 bp, Saccharomyces pastorianus
atgcctatacataaaaaattgccgaagagtgaaggtaaggcgagggctaaacaaaaggttaacagggctgatccttctgatttagatgtggagaacatttacgaaacttccggggagtttgttagagagtatccgacagatattttgattgataggtttcacaaatggaagaaaatcttgaaaagtttgatcgcttacttcagagaagctgcctactctcaggaacaaattgcaaggatcaactaccagatgaaaaatgccgtaaaatttgcttttcttactgatttggaagatgaaacaaacaaactggttgatccaagtatatctaagttgcctactaagaaacctcagcctgtcccattggccgctcaaaaattggacagcaagtacgacacagatgtggaacagccgcagtcaatccaatcagtaccttcggaagaggtagcttcagcttcttctggcttcatgaaatttgggtcaggatctattcaagatattcaagtgattttgaagaagtaccatttatctttgggtagtcaacaatataagatctctaaggaaatcttggcatatattatacccaaattgaccgacttgcgtaaggatttgactacaaagatgaaagaaattaaagaattaaatggagatttcaagactaacataggcgagcatatcaaaataacaagcaggcttctgaataaatatattgcttcagtgaagttattagatgaagcatccacttcgggcgataagcaaggtgaaaaattaaaaccaaaacacgatccataccttttgaaattacaactagatttgcagctgaaaagacaattactcgaagaaaactatcttcgagaagcttttctgaatttacaatcagcagcactacaactggagaaaatagtatattctaaaattcaatccgcattacagcgctactcagcgttaattgattcagaagcacgattaatgatcaaaaatttgtgccatgaattgcagcaaggtattctatctagaccaccggctgtagagtgggataattttgtctctcatcatcctacctgtctgatgaatttaaaatcgacagacccgccaccgcaacccagaagattatctgatattgtttatcctaacatgaaatcgccgctggccaaatgcattagagtaggatatctactgaagaaaacagagtcttctaaaagttttactaaaggttattttgtgttgactacaaattatcttcacgaattcaaaagcagcgatttctttctagacagcaagtctccccgttcaaaaaataaacctgttgttgaacaatcagacattagccgtgtgaataaggatgggactaacgctggcagtcacccatcgagcaaagggacacaggatccgaaactgacgaagagaagaaagggtttgagttcttcgaatctatatcctatctctagtttgtctttaaatgattgctcattaaaggatagtactgactcaacttttgttttacaagggtatgctagttatcattcaccagaggacacatgtacaaaagaatcaagcacgacctcaaatttggcatgtccaacaaagacgcttgcttcaaataagggcaaacatcaacgtacgccttcagctctctcgatggtgtccgttccgaaatttctaaagagttcttccgtgcccaaggaacaaaaaaaggctaaagaagaagctaacatcaataagaagtcaatttgcgagaagcgcgttgaatggacgtttaaaatattttccgcaagtcttgaaccaactccagaggaatcaaaaaatttcaagaaatgggttcaggacataaaagcgcttacaagtttcaattctactcaggagaggtcgaacttcattgaagaaaagattctgaaaagtagaaaccataataatggaaagagctctcaaagtttcaaaaacagtacatatatcactccagtagacagttttgttaacctttctgaaaaagtaacgccatcttcctctgttaccacgttaaacactaggaagagggcaaatcgtcctcgttatatagacatcccaaaaagcgcaaatatgaatgcaggcgctatgaataccgtatacaggtcacaagtcatacaccagccattg

SEQ ID NO: 81609 - DNA, 2916 bp, Saccharomyces pastorianus
atggcatatcttgaagacgagccatcacgtcctattacgcctcaagatgtggaatacttgcgcgaatcagattggtatgattatgaggattatatagacttgaatcaagtgccgcttggttcctcacttccattaaaattagaagcaataccattgctatactctcctagaatatcctactttagaaaaataaatgatgatggttacgtactagcttacccatttggtaccgaagaatctcacaattgtctgattggcaagaatcatccagaattgacgcaggagaaattagcaactgaaagaaaacgagaaatagaagaacaactaaaattattacatattacgttaagcgaattgcaatcaaacaaaggcggaggttcggtaagtggaaattcggagcgctatgcacgcgaattaaaagcagaggtagctgaattaaaccacagattgcacacagtcaacaccatcttgagcgatttaaaaatctcggagactattcctggaggaaatactgatggtgatagctccagctcactctccgatactgatgtaaatttggaaaatgcaccgccaattcaaaatagaatatcgctattgaggaccaataccgtggagtcttttgtatcaatgagaaaagcctctactatgcaggttgagtccacctatgataaccgtttcatggtccataatatcgagttaaaaatcgataataaaatcaggcatcaccttttggaatacgcttccagtgctttcgaaagtatatctatgaggtttgctgtgacttataaatccgtaactattttaaaagaattactgggaaatgtgttgactggggtcagaacatctgtagaagattatggttcaatacttgaggacgatttagccagtaattcagaatttattgagcactttgagaaactcatcagagaagttccgagtgatgactttgattatgttgataattatctttttagactaatctcccctcaggttcagatcaaatcggacgttgaaaggaacgcagcagttattttagctgctagggatatagaaatgggaataattgatatagttcaagtgtatggaaaatcaggaaaaagaattcccgttgacgtcgatactattgttgaaactcgctattccactgtttcaaaggacattcagttgtgtacattgttcaaaaaggatttagagggtcctgaaggtagatttttccataaaaatggatatggttccgacaaagagtcagatatatggcccccatggattcctcttgaaatgtgctttgacgggtctttattagataagcatgtttttctaaaacggagatcaatgtttttgacctacgtcgctcccaatcccctattttttagtgcaaatgatacgtctgcattctcttatgattcgagatttcgtattgcatttccaggattggttctgacctcggactgtcaacaatactgcgctgtatatgcaatcgcagaagatttactttcctttggatcatcattggatgaaaaagttgagaaactttccaggatattatttactgatgaggtcagaaataacctggaaaatcttgatgtctctgttgtcacagcattacaagaaagaataaaggaactctattatacgcgagcatacctcaaacttcacgagccaagattgtttatgaaatcaggacaagagctaaccttcgatattcaaactagtacgttgaagttgacgttacttatgacggcaatcaagaaaacttacgacaggatggggagtggtaatagagtaatacagaaaagattgaggtggcaagttggaacagatgaattgatatgggaattgtacgatgagagtaaaactcctttcgtgactatcggattggggccctctacatttattcgttcagaaacttccgatggcactaatagtaataaagtatccatttcttccttacaatgtttcaaccagcaagaaaatcccgtttacactgaattgctggcccccttttatgaaaattcatcctataataagaacgcgccaatggtagaaattttttggatcctggggccatcagttggaggtatttcagatctgcaagatttgattgtttctctacagccattgattttcaagatggatcacaaaacatcggaaaaactaatgaattatctatttccaaagatagaacaaacttccatagaacccaattctccagaacttgtaccacgttcttccactagttccttcttttcatcgtctccagttttacggcacagtctttctaacggttctttatctgtgtacgacgcgaaagacgttgactcttgggacttgcgtagtatccagagcaaagaaggtatcaaaaagcataagggtgatcatagaaaattgtcagcatcactttttgtgcaacctgattataacatcaatgaaatggtcaaaagatcagggacatttttcaatgtaaaatctattataatccgaaaaactctaatgtccgtgtgttataagggttcacacagccttttgaccgatgttaataacctgattgttagagtccctgttttaaagtaccataacaaactgtggtcgagggaagaattttttactgctttgaaaagagacgtcgtaagaatagttttacaacatttgggaaatattattggtaacaaatttttgcctcataaaaaagagaataagaaaaaaacttctatggaaatacatcgattactaagtccagattctcaaaatcgtgataattcacatatccttgaagtcgaagggcataattcattttatagctccacgcactcttcagatatcagatcaataaactcagatgaaacgtataatgaaaatgatggaaatggagtaaagccattttaccctgttacgagtgagttttcaaaaaataaatga

SEQ ID NO: 81610 - DNA, 3258 bp, Saccharomyces pastorianus
atgtcgaattttatttcaaggctgcatatatcagatgaggagaatgtgacgtttaaggtcttcagcacacatgctctctttagccgtaacaacttgtctatgactcctaaaaagggacaagtaatgcaaatacgtccggattggccatttgcgaagacagccctagtatctgatcaattatctaactatattaaaattgtgggtacatcactctcttacctgagaattccaacagagcaggacgctaacccagtgtctataccagtctgtggctttgaaagattagacacatttctggatgaattttcaaattctaaattgatcgttcagtctacactaagacattcgtacgttagtcttgagaacattgaagttttgcatactttaagtcgcgcctttgacaaaatttacttgctaatatctagcagaacaaaaaggaatgcggctcataaagcgaatggtggaaaattgggggacctaaatgaagccaagaaaacttttaactggtcattgaaacttagaatgaaggatatttcatgttcgttactggtcgctgggtttcttccgaaaaacttggatcctgtggaagctgagaattttaacttatctgacgtaactagaggcgccaaagttgtttttacagaatcaatattgttagcggacagccaggagaaaaacttcactattattgatgcatccgtatatcgtttcatggatggcactacgtataagccctctcctgaggttattattcaatttaccaatttgttattgagttttaacgactcagatgaaattcatttttcacttcccaagattaaatttaagatggatgtaaatattatctggttgtggttttatattcggagtatatggataaaatttcgtcctaattcaaaattgagccgaaatccagtgagcagtgtaaaatctgtcaatgttctcgatagattaagagtagatataggaaagatgattatagagctaacgcttcctcataatacggaggtactcctaatattcgagaggattggactttcaagttccactaaaaatcttacaattgcatctttgtcagcgtacgtggtatcggtttatgtgaagcatattaaggtttatgtttccttgctaaatattaatgactttgagctagacactgaagagttgatctgcaagaaatccgctgttataaacacctcattgattcattttcatgccgaatatcattttagattttacatgataacggataacatagtcacgttgtataaatcgtttaagcaaattaaattggcattttccaatttgaatgaatttaagcgattataccctcagcaacagtttccgaaaaaagttccaaatttacatatttgttgccaggattttctaattgatattgaagaagatccttttgagcaggagttaggattaattttgaaagttggcgttttggaacaacgtgagaggttaaagaagcttgaagagttcaaggaaaagctatcaacatatgaggacatgaatgtacgtttaaggtcgctctatgatacctcccgtggacaaagttttttcccagagttttatgcgaatgatcaagaatatgagcaaaaggcctatctcaggttgttagaaaacttttcaacgtcatggattgccagatacaggaaagcaaaactttctttttatggtatgccttatcgggttatcagccgtgaagagcttggtacgaaataccacttgtttactagacagaaaaccagtactgttgctaacctcgtcgtaaaagatttggattttaaactaggcagtccttccttccctttagacaattatatggattttgtttaccagtatggaaaaaaagttccaaaatctacggagtacactttgctaattattcttggcctcaaaatcaaaagcgcgttatgggagttgcgtctgagagattatccaatacctgctatatcatttcccgacacatttacaacaggtgatgttgtatttgctgaaaagatgccagcaccttgcgcgcttcatactgtttatgttccttttgtcagctctgcccaaagaagcccctataatgacgccaatacaatatatggttcgcacatcattcgtacaattaattcagtcaaaacatatttcaatattaggtcaatggttacatcttcttcatctgccagaataacatgggggaaatctctgcaacccggttatgagtctttgatgctttggtttgattttttaaccaaacctctcatcgatccatccaaaaagctaggattttgggacaaattcagatatttagtgcatgggaagtggatatacgagttttcagaggaaagtgagatccacttaaatattaaaggttcacatgatccttataagattacagatgatggtgcgggtctggcgttctgctggtctggtggcaccacaatttacgttcataactccacggatcctaaagagtttttaaaaattgaatcccaaaggtttcagttggcagtgccagactttgccaaagttagtaaatttgataaagtctttatgaagctcgatggaagagtaatttggacattaggtttattttttgaacaaggcgatatatctaaggctggtgacgaagagaggttccttccaaataggccacattatgaaatacagctgatgaatccagatggagtcgcagatttggatcaccatgatacatacaaaggatttagaacatcttttatccacatgtcatttggtgtctattcttctgagcacggatccataaatagtctttatctcgcaccttacgctttaacacatttctttaagtggtggaatttatttcatacatatacatctggtcctattaggcaaggacagttatttacggatgtacttcaaaacaagacaaagtttggtcgctcattatttacaatagcttatcagctacatttaaaacggctaatggttacgcatatttatcggcatattactactcaatatgatcttgaaaaagaccgcaaaataacttttactggattgaaagggaggtttgattcactgaaaattgatttgcatcaaaaaagagttaaactgacccatacgaaccaaaaattaaataagtcaaaacctgtatggaagtttaagatgtctaggggtgagattgattgtgcagaagcagatattaggatattatcaactctgtttgatcaggaagcagttaaggaaattcttacttctggactcgatggcatatcttga

SEQ ID NO: 81611 - DNA, 1068 bp, Saccharomyces pastorianus
atgtctatgttaccgtggtctcaaataagggatgtgtctaaactattattaggctttatgctttttattatatcaattcagaaaatcgctagtattctcatgtcatggatattgatgctgcgccattccacaatacgaaaaatttcatttggatacttttttggtacgtcaataagacgagcgtttatcttaactgattttgctcaaatatatattggcaagataaccttgcgaataggttggaaacccggaattgtgtttcataatgttgatttgaagttatttgggaaggacagccatatcactgcacattcaactaaagactccagaacatatttcaatccgcgggatcaaacttttacctttgtaattaacaggcgagtcctatcaattttgaaacttgtgttctcattttccactttctttcatactttagctcttacagtgcctaatggaaaacaatataaattaaatatcggatccataacgatatcacacccacacgatgataccataaagttagaggcatttttgcatgattttacccatcctgaaacgaaagatactttgaaccatactggtttttttatggtctgtaaaattggaaaggaagatgatacaggcagcaactgcacaaaagttatactaaaaaattggaaatcaagtctcaaaataagtgatgtttgttggcatcttccagagaagaaagggaagaatttgcattcggagcctgttgagcctttttctgctggtgatgatgcggaaatgctcacttcatatcgtaagatgctaaagccttttcactacccactgaaaactttgaacattctggaccttaaggtagaaaatgtaaagttgatttacaaaaaaaagtttacaattcgcatatcaagtgttcaactttacttggaatcaatctccattctaaataatgtctccgctttggaacttttacccttaaataagcccacatggggcgattttgaactatcactttctgcaaatgctgttgtagtagatatcgatggtaatacagcagttagattccatttggaaatgtcatactga

SEQ ID NO: 81612 - DNA, 153 bp, Saccharomyces pastorianus
atgataatggattatctagtgagtccaattgttcatgatgaatttcatagaaaatatcaatctagaagatttatgaaagcttctataatttccgtccaatgggctttaaaggttagaaaaaacggctatgatataatgaccttgcatgaatga

SEQ ID NO: 81613 - DNA, 1047 bp, Saccharomyces pastorianus
atgtccaacccaatagaaaacacagaaaactcacagaaaactagttcatcaaggtttttgaggaatgtacaaaggttggccttaaacaatgtaacaaatacgacatttcaaaagagtaatgcgaataatccagccctaacaaatttcaaatctacactaaactcagtaaagaaggagggaagtcggattcctcaatttactagagaaagcgtatcaagatcaacagccgcacaagaggagaaaagaaccctgaaagaaaatggtatccaactccccaaaaacaatcttttagatgataaagaaaaccaagacccaagtagtcagcaatttggtgcgctaacttctataaaggaggggagagctgagctgcctgcaaatataagtttacaagaatcctcctcagcgaaggagataatccagcatgatcccctaaaaggcgttggatcaagcactgaggtagtccataactcggtagaaaacgaaaaacttcatccagctagaagtcaacttcaagttagaaataccgaaagtgaaactgatagtggaaaaaaaagaccaatttctacaattgttgaacaagaactgcccaaaaagtttaaagtgtgcgatgaaaatggcaaagaagaatatgaatgggaagacctagatgcagaagatgtaaatgatccattcatggtcagcgagtacgtcaatgatatattcgaatatctccaccaactagaggttattactcttccaaagaaggaagatctctatccgcatagaaatattcatcaaaatcgagatatcctagttaattggttggttaaaatccataataaattcggcttattaccggagactttgtatcttgccattaacataatggacaggtttttaggtaaagagctagttcaactggataagttacaattggttggcacatcatgccttttcattgcctctaaatatgaagaggtctattctcctagtataaaacatttcgcatcagagacagacggtgcatgtacggaagatgaaatcaaagaaggggagaaatcattttaa

SEQ ID NO: 81614 - DNA, 156 bp, Saccharomyces pastorianus
atgaatcttaagcagagatacggctctatattagggttttcttcccaagatggtgaaggacaagaaatagaaaaattttggaacaacgacacaagtccgattgttcctcttcaggagcttcctgaaccaaactttttccgcaaggccgcattttga

SEQ ID NO: 81615 - DNA, 279 bp, Saccharomyces pastorianus
  modified_base (247)..(247): a, c, g, t, unknown, or other
atgtccttgagagaagtaactaattatgaagtctcgttttacatcccgttgtcttacagcagcaggactcataaagtttgtaaactgccaaacggaattttagcattaataatatcggatccaacagatacttcaagctcatgctcactgactgtttgcacaggttcccataacgatccaaaggatattgccggtttggcgcacctttgtgagcacatgattctttctgccggttcccaaaaaatanccctgatccctggtttgattcccacacactag

SEQ ID NO: 81616 - DNA, 2472 bp, Saccharomyces pastorianus
atgtgttttcaacaatttcctgaatgcaattcgatatttatcaattcaaataaggtacctataatgagacttctctttcctgttagcgataaaaacactcggtttacaaaggatgacattaaaatatacagtcatctttggtgtgaacttttcggcgatgagtctccaggatctttgagctattacttagcttcaaaaggctggctcacaggctgttttgcctttacctcagaattcgctattggtgacataggattaattttggaattagaactgacaaacagtggctgggaaaatattaagagaattacgacaatagtacttaatagactcttgccttccttttacgtaatgaacatcgattacttaatcacttttttgaaagaacagaatttgatcgacctcgttagctttctgtaccaaagttcagaggatcttccaatggaagagtgctcaaaattaagcggtattcttcaggacgatttagaatgtttaaccccccctaatatattcaaaggatttaaatctcttatagaaatagatgatcccaacatcgaaaaatatgaaaacacaaaggccaatatacaatggtggacagggcaagctattaagttccaaaattttttaaaatctttcatgaatcatgacaacatgcgccttttactcttagggaatataaaatctggtaatatatttgataaaatgaaaaataaaagtgatatatgcaccgattttttctatgaatttgagtattatacggcaaacgttcatctagcaagtgataataaatttcattcaaacagctcgtatgaatttaattttcccacaggtaatctttttttaccagattgcgtcagcgatcctttaaaactacaacagctcttcttagaatgctcgttaaaatcgaaatttgctacgcttagacctcaaatttatagtgagcccactaggacaaagcctcaattagtcagtgagaaccagaattatgagatgtggatcttaaaagaagacccaaattttgcctcagacaataaatccgtcgtatcatttgaagttttggggttaggcatcaaacctagtccggaggcaacaatccacctggaagtactagcacaggcattatttatcatcacctcttcattcctttatcccgctctgagaattggttacacatatgagattgcctcatctagtaagggcaacgtaacactgcgatttactatttctggattccctgagggtgttttcacaatagtaaagacgttcgtggatacgctaaaacttattgcaacagatccaacgtttctttctaaagataccttgagaaaggcaaggattttagttagaaataaatacaagaacgcgtcatcggacaactgcgtgaagctagctagcgttggattgctgattgttttagagaaatatatatggactttagaggatagaattaatgcattagagcttaccgagttggaatccttcgaaaaattttgttttttattctggaggaatcctaaacatttggtcttgttcatgcagggaagccttgaatatgctgacgcaatcaaccgttacttaaataacaattttacgcagcacctaaaaatcagcaatgaagggagcaaaccgaccatacgtctctaccctcctcccagtacaaaagatctagatcaaggcacaaatgcctttatatcatataatggtcaccaggatgatcccaacaatagtattgtgtattttattcagactgcacaaagagatgacatcaaaaatctgacactaacctttcttaccgaatatctattttcactaacgctagtgcctgatctaagaaataaaaagcaaattgggtacattgttttgggaggactcagggttttaacagacactgttgggattcatataaccgtaatgtctggcagctcggggcacaatctggaaactaggatcaatgagtacttatcttacttgcagctgcaggtgctaaatagattcaccgagtttgattttcgaaggatacttctagagccgttcttaaatcttttaaaacagaacagtacgaaacagtttgaagggtcggctggtcctgtagacctattaaatgagatagtggcaaatgtgcaaaatggtgataattacactctcaacaataaacaaatgagacaacataggaaggtaagaaataaaattgcggaaggaaggcttaattttcaagaagatcatgaaatgattgatatctcatttttgcaaaagttaactctaaagaaatatttagcattcttcgagtccaaaatctctatatattccgctcaaagaagtaagctatcaataatgatcacaagtccaatggcagagaaggaaattgcaagcaggaaaatgttccttcagctagaggcctttctgaaaataaacggattcgccataaaaaatgaagacttgaagaaaattgtcgaacattcaaagggaatccta

SEQ ID NO: 81617 - DNA, 330 bp, Saccharomyces pastorianus
atgctcatcgatgacatgctcgataatatcgttttgctggcactagacatcgcatccatgctcatcgatgccatgctcgatgctattgtcttgctggcgctggacattgcgtccatgctcatcgacgccatactcgatgctattgtcttgctggcgctggacattgcgtccatgctcatcgacgccatactcgatgctactgtcttggatgcactagacatggcgtccatattcatgctgctacccatattcataccttccattttgaatgtcaaatataatacacttttttttattttctattcgattcttccaacaaatgtaatttga

SEQ ID NO: 81618 - DNA, 525 bp, Saccharomyces pastorianus
atggatctctttcatgacattataagggcgttcttagtattcacctctacgatgattatttatatgttgatgcttgctaccatgtcttttgttttaacatacgtttttgctgtaattactgggttagctttatcggaagtcttcttcaatagatgcaaaatagccatgctaaagaggtgggacatccaaagagaaattcagaaagcgaagagctgtcctggcttcggtaactgccaatgtggtagacatcccgaacccagccctgatccaattgctgttgccgataccacttccggaagtgatcaaagtactcgcctggaaaagaacaacgaatctaaagttgcgatttccgaaaataatcaaaagaaaacacctacacaagaagaggaatgtaattgtgccacagactcaggaaagaatcaagcaaacatagagcgcgacatccttgagaattccaagttgcaggaacagtccgggaatatggatcaaaacttacttccggccgaaaaattcactcataactaa

SEQ ID NO: 81619 - DNA, 300 bp, Saccharomyces pastorianus
atggaaggtatgaatatgggtagcagcatgaatatggacgccatgtctagtgcatccaagacagtagcatcgagtatggcgtcgatgagcatggacgcaatgtccagcgccagcaagacaatagcatcgagtatggcgtcgatgagcatggacgcaatgtccagcgccagcaagacaatagcatcgagcatggcatcgatgagcatggatgcgatgtctagtgccagcaaaacgatattatcgagcatgtcatcgatgagcatggaagcgatgtccagtgcgagcaaaacgttgggcgtc

SEQ ID NO: 81620 - DNA, 171 bp, Saccharomyces pastorianus
actcccacatatctaactatcagttttgttcaccatttgcatgcaaacaatagtgctaaggctttcggtattttcttattatttgttgtgtctgctgtcgtctacaaattactgcttttcgttagttggtgccttgaagtcactggtttaaaaaatgggacagcaaaataa

SEQ ID NO: 81621 - DNA, 804 bp, Saccharomyces pastorianus
atgtctgaaatcataaagaataacaagtcccattttaaacctaataatatttccgaggaacaaaaagctttgtttaacaggttctacacacatgtccgtgctacaggagtgccggagtctcgtcaacagctaatcgaagtagctagattattcactgatgatactgtattggataatgtgacaagaccttacttgattgcattagcgaagtatatgaatttgcaaccattcggcactgatgtgatgctacgttaccgtatcagatacaaaatgcttgaattgaaaaaagatgatctatctatatattacgaggatgcagaacaactctccctctctgaattgaaaacagcatgcgcctccagaggtattagaagtgtagacgtagagcctagcgtgttatattcgaatctaagattgtggctgaacatgaggctcaaggataagatcccatccacgctgttaatcatggctactgcctataactacggtaatgtgcaatcaaaggagtcattgtacgacgcattatgtgacgttttaatcggtatccctgatgaactataccatgaggttaaagtaaacgtcgttaaggaagatgaggcatccgctaagcaaaaattgaaacaattgagggagcaagaagaaattatgaaggaagaagagcagcaagaagagaacgccattgtgagcgtcaaggatgagttgagcttggacgaccaagacaagaacatagatgcggctgctccagacgtaaaaccgcatgacaccaagcctatcggagaagccgctgccatcaaagagaagtaa

SEQ ID NO: 81622 - DNA, 507 bp, Saccharomyces pastorianus
atgctgaaatacaggtctttgccaatcaagagagcaatccatcatccggcaccaggaattactccaatttctccccgtattatggtaagcaggttgagagtaataccatcttttaatttgaagttcaatcgttggaactcttcggtgccagaaagctcgaaaaaggagttaaaaacgacagacggaaaccaagaaagtgcgagtaaggtctctccagtaaaagagaaggaaaaagtaccctttaaggttaagatgcaaaaagcccttcgtcattattgggatggttccaaacttttggggttggagataaaaatttctaccaaattgctcatgaagagtgcagcaggctacccattgacgagacgagaacctttacaactgaaaagaactactcaagatatcgttcggttggttccatttgctgctttcctcattataccctttgctgaacttcttcttccatttgcattaaagttattccccaatttacttcctttctacttatga

SEQ ID NO: 81623 - DNA, 807 bp, Saccharomyces pastorianus
atgataaacatattcaaagaaaagggtattttgggtctgtatcaaggtatgacagtcactacggtggccacatttgtccagaattttgtttatttcttttggtacacatttatcagaaagtcctacatgaaacataagctgttaggactgcaatcactgaaaaaccgcgatggtcctatcacaccttctacgattgaagaattggtacttggggtagcagctgccagtatatcgcaactttttactagtcccatggctgtggtagctacaagacaacaaacagtccattctgcagagtctgccaaatttaccaacgttattaaggacatttaccgtgaaaataatggggacataactgctttttggaaaggtttaagaacaggtttagcattgacgataaatccttccatcacatatgcctcttttcaaagacttaaagaagtttttttccatgaccattccaacgatgctggcagtttgtcagcagtgcaaaatttcatcccgggtgtcctttccaagatgatttcgactctagttacgcaacccttgattgtcgctaaagcaatgcttcaaagcgctggctctaaattcactactttccaagaagcgctactatacttgtacaaaaatgaagggttaaaatctctttggaagggagttcttcctcaattgacaaagggtgtcattgtgcaaggtctgttgtttgctttcagaggagaattgacaaaatctttaaagaggctaatattcttgtactcttcttttttcctaaagcacaacggacaacgcaagctggcttccacttga

SEQ ID NO: 81624 - DNA, 756 bp, Saccharomyces pastorianus
atgtatgggtgtttggagatgttcggatgttactttatgcatgtcctttttattaatattaatgttgaagcaatatctaatgaagtatatatagttcacaatattgcttatgtgaaagatagtggaacattgagaatattcaaggaaagagacaggaggattcgagaaatgacaacaattcagccttttgaacctgtcgatttattcaaaactaacaatgtcaaccttgatatcttaacagaaaacttccctttagagttttattttgaatacatgataatatggccagaccttttttttaaaagttcagaaatgactgttgatcctacgtttaagcataatatctctggttacatgatggcaaaaacagaaggcaagaccacggagtggcacactcatataactgcagtgacagtagctccaagattccgccgaatatcgctagcttcgaagttatgtaatactttggagaccatgaccgatgtcatgccccatgaagtcaactttatcgatcttttcgtcaagtgcaataaccaattggccatcaaactttacgaaaaattgggatacagtgtctacaggagagtggtgggatattataactcagctgaagatgggtatccagataccctgaaaaaagtagatgacaataaagatgcttttgatatgagaaaagctatggctagggacaggaacagaagcgtacggccggatggaagaagccataaatgctatccacatgatgtaagattttaa

SEQ ID NO: 81625 - DNA, 810 bp, Saccharomyces pastorianus
atgagtttaccaaacattaattctgatatgaaaaaagacgcaaatcttgactactacaattttaatccgatgggcatcaaaagtttgttcttttcaagctacggagatccatgcatttttgggtccgataacacgcttctattgttatcaaagtggagatcaccagaagaaagtaaatggctccctattcttgatagcaacatggaaatatggaagatgtcaggagggaaggaaacgacagatatacatgtctggcccttggctttggcgtatgacacattgaattgtatcttagttaagggcaagcatatatggcccgagtttccccttccgttgccatccgaaatggatattagaatgccagtatttgttaagagtaaattactagaggaaaacaaagctatatcaaataaaaagaacgaaattggagctgacaccgaagtggaagaaggggaagaagacaaagaaatacagattcctgtttctatggcggcggaagaagagtatctgcgcagcaaggttttgtcagagctattgacagatacactggaaaatgacggtgaaatgtacggcaacgaaaatgaggtattggcagcattgaacggtgcatatgataaggctttgttacgtttatttgcgtctgcatgctcagaccaaaatgttgaaaaggctctttcgcttgctcatgaattaaaacaagatagagcacttactgcagccgttaagatatcagaaagagctgagctgccctctctcgttaaaaaaattaacaatataagggaagctagatatgaacagcaattgaaataa

SEQ ID NO: 81626 - DNA, 606 bp, Saccharomyces pastorianus
atggattctatgatggtcaaggaattcaacaaaaaattagaaacattaataaaccaagatttcaagaaggtccatgacctgcgcaaaaaagtggaagaatcaagactcaaatttgatacaatgcgttatgaaatcaaagcaaaagaagcagagttagaggcgaaaaaagctgaagccacaggagaagcacatagcaaggatgttagcgcaaaggacattagcgcaaacactaccacctcttttgacgaaacgccttctaccgaggatgaaaagccaaaatcagagggtgccgaagaagaatcaaagaaagaagcgaatgagcctactgttgatgacgttgctgatagaaaagaagatttaaagagtaacaaagtaaatgatgagccaccgattgaagaatccgaggaaaataaattactggaaaaactggaggatgaatttgtctccaatactacagcagcagtggaaacaatggaagaaatcactgacagttctgaaattctgggcttaataaagctgttccagaatttccagttggtttactttagacaatgtgtccaagaagtggaggcaaaccttaaagttctaaatggtttggaaatttag

SEQ ID NO: 81627 - DNA, 498 bp, Saccharomyces pastorianus
atgtctggttatttttcagggttttctctaaacaagatcaccgattcaattgctaccgctgctcacaagacccaagacactttgaacaatgcattagcaaatgcaaatgtaaacttaaatgaccctcaaacaaggctatcaattaaatcgcgaactagatttgttcaggaatcattgggtactgtatcagatataagtaaattaccaccacagtaccaattcttggagagaaaaagtgattccttagagaaggtatgtaaaaggattctactggtgtccaaaacgttcgaagtagagggctacgactatccaccaaatttaacggagagtatttcggattggtggtctctcaataaagatggctggtttggctctaaaaaatccgaaaattccactaaaaaaagggatgtaaccatgacgatgcctttttgccaagatcttttgctcaagccatctcaaaagccgctgttgactgcgaatgtgaatttcaaaatttag

SEQ ID NO: 81628 - DNA, 462 bp, Saccharomyces pastorianus
atgctgcaggtctttgctttgtgtgtcaaccgcatttgcagtgccttgtcaaacggcttcaactttctcatcatatatgggggcacgtttttccattcaggaaaatattccatacccatactggacgtagaccaccaattgaatggcaacagctcattgggtacggtgggattgtacttccatgtaccgttcacgccacctgacattataccaccagtgccacgttcaccaaacaatatgttcttgtgctttttctcatcgatcgtcttcgcctctgcgtttgttttctcgttcattgttaataacgtttgcaaggactttctcttcttatctctgaatagcgggttttccttcactgggtacattactggcctgtatccgctatacagaatatcgcgggtgagctccctagcttccaaatactgtgtagtaggtactttgggcagcgatctaaagtcatag

SEQ ID NO: 81629 - DNA, 120 bp, Saccharomyces pastorianus
atgggtgataattgtggtgtcctactctatagaatcagaccaaaatggctgagaggaattctaagatttctaatgtggagaggtatactctgttctcttatggaatttttcaccaattga

SEQ ID NO: 81630 - DNA, 972 bp, Saccharomyces pastorianus
atgcattgcgtactagcgcgaatattgttatggttcttaatagtagatctaagcgtcatacgggcgcttgtccttccaccattgaaagattatgatccgttagagcctttgatgaaaagagacatggccatgggtcaacggaacagattcaaagtcgacggccaattgccgcccatactaaatcccacagatgtgacagatgatcagagaagtctgcatacgcctggagagattccaccttatgtcatcaatcattgtcccttagtgcacttgtatagcgaagagaaatattggccatcggacattgctgagtacgttcaaaacttccaaattaaagataaaaacggcaattctatatccactcatgaaaatttgacactgcatgacttgaaggcggaataccacgtagatttatttgacaacaaaacggaaacgcatatccccagtagcgaggtatttttaaccagtttggacgatttcgacaaggaccctaaatggttgctcggtcatctacccgaatacggaacaggctacaactctaaggcgcctgctattctgatcgtagtcgacaaggggaacgggtgggttgatgcgttctggtttttcttctacccattcaatcatggcccttttattatgggccatggaccctggggcaatcacgtcggtgactgggaacactctttggttcggttttataaaggtattccaaaatatctttggatgagtgcgcattccagtggaacaggctacagatacgaagctgttgagaaatttaagaaactacggaaaagaaaacagcaagatagtgacgatggtggggatactatactggaaagaccgttgatttttagtgctagaggcacgcatgctaattatgcatccgctgggcagcatgctcatgacattcctttttttttcatgcctttgagtgatttaccgatcgtggtcccctgtgggatccatctttga

SEQ ID NO: 81631 - DNA, 174 bp, Saccharomyces pastorianus
atgatggatatacgagacaaaagatcaacatccttggggaattttttggccacatcttgcaagaagaaccagttgatatcatatataatttccaaatgtctgggtagcaaatggccaaagaggccgacgggccatttttccagggcctcttgcataacagtgtggttagtataa

SEQ ID NO: 81632 - DNA, 522 bp, Saccharomyces pastorianus
atggtttctcggacaatggatgttccaactacaaaagcaagtgattcaattccacttcctccaaacccagcaacgactcttccgctaatcagagtcgccattgaattcgaaagagcagaaatcaaagaccctatttcaaatacaataacagaaatcattaagcactcctttgtaccaagtatttcggccaagcgaccccataataacatgaaaacagcattagaaagagcatatccagtaactaaccaaccaatattgccgaagtcatggaacttaatgccaattgtatcatataaagtaaccactataacaatatccaaggccgccagaaaaagggttaatagaagcgatataacacataaagttaaactcaaagtactcttcattgcatatatgtctgacggtgaagcttatgtgttgtacaaacagatgagcatgatcatgagatttaaacttctatttaaagtagttccaagatgtcatttctttttacgaagcgcagccgtttatcaaccattctaa

SEQ ID NO: 81633 - DNA, 1236 bp, Saccharomyces pastorianus
atgataacggcactcgctatatcgtatgtcattgcagagggagtcgggccttttattggtggtgcatttaatgaacatttgtcttggagatggtgcttttatataaatcttccaatcggtgcgtttgcgttcataatattggcattttgtaatacatctggagaaccacatcaaaaaatgtggctaccatcaaaaatcaaaaaaattatgaactatgactatggcgaattattgaaagcaagtttttggaagaatacatttgaagtacttgtatttaaactagacatggttgggattattttatcttcagcaggctttacactactgatgttaggtctttcatttggtggaaacaacttcccatggaattcaggtatcattatttgcttttttaccgtgggccctatcttattgttactattttgtgcttacgactttcattttctgccattattggggcttcactatgacaacaagcggatcaaaccgttactgacatggaatattgcctcaaattgtggcatatttacaagctccataacaggattcctttcttgctttgcttatgaattacagtctgcttatttagtccagctttatcaactagtatttaaaaaaaagcctacattagcgagtatacatctttgggaactatcaattccagctatgattgcaactatggccatagcatatctaaattcaaaatatgggatcatcaaaccggcaattgtttttggtgtgctttgtgggattgttggatctggtttatttacgctaatcaatggagaactctctcagtcaataggttattcaattctccctggaatagcttttggtagtattttccaagcaacgttattaagctcccaggtgcagataacatcagacgatccagactttcaaaacaagtttattgaagtcacagctttcaactcgttcgccaaatccttgggctttgcgtttggagggaatatgggggcaatgatattcactgcatcactcaaaaaccagatgcgctcttcccaattaaacataccacaatttacgtctgtagaaacacttttagcgtatagcacagaacattatgatggcccccaatcttcactatcaaagttcataaacacagctatccatgacgttttttactgcgccttaggatgctatgctctttcattcttctttggaatattcacttcgagtaagaaaacaacaatatcagccaaaaagcaacaatga

SEQ ID NO: 81634 - DNA, 399 bp, Saccharomyces pastorianus
atgaagagtactttgagtttaactttatgtgttatatcgcttctattaaccctttttctggcggccttggatattgttatagtggttactttatatgatacaattggcattaagttccatgacttcggcaatattggttggttagttactggatatgctctttctaatgctgttttcatgttattatggggtcgcttggccgaaatacttggtacaaaggagtgcttaatgatttctgttattgtatttgaaatagggtctttgatttctgctctttcgaattcaatggcgactctgattagcggaagagtcgttgctgggtttggaggaagtggaattgaatcacttgcttttgtagttggaacatccattgtccgagaaaccatagaggaattatga

SEQ ID NO: 81635 - DNA, 210 bp, Saccharomyces pastorianus
atgaaacccttttccgtgcctgtgaagtttccgctttcggtcataaagaatatccgaattttagatttggacccttgttcagaagcttattgtctaagcctaaattcagtctgctttaaacggcttccgcggaagaaatatttccatctcttgaaatccgtacaagatattagacgtgtgttgggagtcgtatactgttggggtctgtaa

SEQ ID NO: 81636 - DNA, 2610 bp, Saccharomyces pastorianus
atgtctccggcacattactgtttactattagccatcgtcacattgctgggactagctaatgttgtctctgcgactacagcggcatgcctgccagcaaactcaaggaagaatggtatgaatgtaaatttttaccagtattcattgatggattcttccacgtattccaatgcagcatatatggcttaccaatatgcagacaaagtcaaattgggctctgttagcgggcaaacggatatatctatcaactataatcttccttgtgttacaacttcagggacatatcagtgccctcaagaagatgcatatggtaattggggatgcagaggtaaggggagatgctccaacagtcaagccgtttcatactggagtacagatctatttggcttttataccaccccaacaaacatcaccttagaaatgacaggttactttttaccaccacagacaggttcttacacgttttcttttgcaacagtagatgattccgcaattttatcggttggtggtagcattgcgttcgaatgttgtgcacaagaacaacctcccatcacgtcgactaacttcacaatcaatggtatcaagccatggcatggaagtctccctgacaatatcgcagggactgtctacatgtatgctggattccactacccaatgaagattgtttactcaaatgccgtttcctggggtacacttccaattagtgtgacactaccagatggcactaccgttagtgatgactttgaagggtacgtatatacctttgacaacaatctcagccagtcgaattgtaccattccagacccttcaaattatactgccagtactacaataactacaaccgagccatggaccggtactttcacctctacgtctactgagatgactactattactggcaccaacggtgtaccaactgacgaaactatcattgttgtcaaaactccaattactgccatctcatccagtttgtcatcatcttcaggacaaatcaccagctctatcacgtcgtcgcgtccaattattaccccattctatcctagcaatggaacttctgtgatttcttcctcagtcatttcttcttcagtcacttcttctctagtcacttcttctctagtcacttcttcagtcatttcttcttcagtcatttcttcttcagtcatttcttcctctgtcatttcttcctctgtcatttcttcctctgtcatttcttcttctgtcatttcttcttctacaacaacctccgcttctatattctctgaatcatctacatcatccgtcattccaaccagtagttccacctctggttcttctgagagcaaaacgagttcagctagttcttcatcttcttcctcttctatctcttctgaatcaccaaagtctacatattcgtcttcatcattaccacctgttaccagtgtaacaacaagtcaggaaataacttcatcattaccacctgttaccagtgcgacaacaagccaggaaactgcttcttcattaccacctgttaccagtgcgacaacaagccaggaaactgcttcttcattaccacctgttaccagtgcgacaacaagccaagaaactgcttcatcattaccgcctgttaccagtgcggcaacaagtcaggaaataacttcatcattaccacctgttaccagtgcgacaacaagccaggaaactgcttcttcattaccacctgctaccactacaaaaacgagcgaacaaaccactttggttaccgtgacatcctgcgaatctcatgtgtgtactgaatccatctcctctgcgattgtttccacggccaccgttactgttagcggcgtcacaacagagtataccacatggtgccctatttctaccacagagataacaaagcaaactacggagacaacaaagcaaaccaaggggacaacagagcaaaccacagaaacaacaaaacaaaccacagtagttacaatttcttcttgtgaatctgacatatgctctaagactgcttctccagccattgtgtctacaagcactgctactattaacgacgttaccacagaatacacaacatggtgtcctatttccaccacagaatcgaagcaacaaactacgctagttactgttacttcctgcgaatctggtgtgtgttccgaaactacttcacctgccattgtttcgacggccacggctactgtgaatgatgttgttacggtctatcctacatggaggccacagactacgaatgaacagtctgtcagctctaaaatgaacagtgctaccagtgagacaactaccaatactggggctgctgagacaaaaacagcagtcacctcttcactttcaagattcaatcacgctgaaacacagacggcttccgcgaccgatgtgattggtcacagcagtagtgttgtttctgtatccgaaactggcaacaccaagggtctaataacttccgagctaagtactatgtcgcaacagcctcgtagcacaccagcaagtaccatggtaggatcaagtactgcctctttagaaatctcaacctacgttggtattgccaatggtctgttgaccaataatggcataagtgtctttatttccaccgtattgctggcaatcgtgtggtaa

SEQ ID NO: 81637 - DNA, 2643 bp, Saccharomyces pastorianus
atgaaaatttccagttcaccatggaacgacggtggatacagcgcctatgagagaaacagagtcgctgtatcaccattttcatcagcgttggaaggcgaagaacgaatagaaacctctcgatctttgggtgatcattgctttgaacctttgccatacgtgacgaattatctttctattttcgcgctttttggtaaagagatatttggtgacaagggaaatgtgagctcaagaaatgaatatttgctaaaaaaatactactctttgaaaaagccatttgtattgcgacataatgggcatgcgttgaagaatcccgacatgccactccagaggaatgacatattgcaaaccaatttcatggttgacaaatttctgaatcgtactgtgcggtcagtgaattttaataatttcaagataatatcagatatgcaaagtaaaagcggtcgaggaacaaagtcaggcacaaatcagaatcaaagtgccgacgctattcaaaatatttgtctaccatctataccgtcggcgttgtcttatttccaatattataggaagctattgacagttaataccaaagaatgggatattttaaaactgcacagtttatgggtaccaaagctaaggaaggattttaaagatttttcgttgcatggtgataaaaactctccaaagccgatcgatagtcactatgatgaggataataccatgaaaaaaaatttattttttgaaagatctccaagtcgacagactctagatggtaaagggtgtgcctctaaggggtatgacatttcttccggtaatatgattatcctatccctattttctgaagataagctgccggctttaacttatcattgttccgtagaattaaatggaaacatttacatatttgggggattgatgccatgctacagctatgaggaggatgcgccgatgctgaacgatttttttgtagacggaataaagaacttacctccgcctttattacctcaagtgattaataatccatcaatggtcaataatcctcatctttatgtcgcttctataccatcatgccggtttagcaaacctaaaatggggggttatataccgcctccattgctatgtgttcaaggatccaaattaacagaccgatatattttcttttatggtggatttgaaatcaggacagaaacccgtggtgatgaaaatgggaagtatcatctcaagaaaagattatatgtgaataacactggttacatactcgatattatgtcgttcaagttcactaaaatagatatcatagtacaaccttccaaatataatgcgtatccgaccatgtcatcgaggtttggtcacttacaaatttctattgataatccaaataggagagctagcgttcattcttcaagcatgaacgaaattcataaaatggggagtgcttccatgaaacaaggtagcagcatcacttccgggcggcttgaaaaagcagcagtactttcatcattacctcataatactgtgcacacggttataatatttggtggttacagacaaaccggtgatgatcgttacgaagcaatgaatgatttgtggaagatagagatacccgtgatacgtcgcggtaagaaaggctattgtaagttttcagagacagctaacgcgatacgactgacgccaagggaaaaggacaaatcggattggcccgaagaaagagccttttctgccttttctgttcatgggacttcgttaatggataggagttctcttgacatgagactattgaacaacttaaaaaaccattttgttttaaaaccgtcatatatatcacaggatcgcgttgttagtcctaaaccggttttccccatgatggttcatggcacgcatcaagatcttttcaatagtggctctgcggcacaagaatcgcccaaagctggtgcctcggccagcagcgcaagtgctgcgagctttgatcccgatatggacgataatttggaaaattatatagtcaatccagggagaaaatcgtcatctattccaatgactgcgatagggagacagagattaattttaagccaagagaagccagtaggtaaaactgttgtattgcatggtgggtctaacggtctcaacgttcttgatgatatgtggttgatggacttagagtgtgagacatggactccaatagagacatttgcaaaggcagattcgagcgaagacggtgatgaaaaattggatagtgtgaacgtgggtctcgttggccacagaatggaaagtattggacgaatatgtgtatgtataggtggtatggtacaagaggatgttgaccaattttactcggagaatgatgatgagtctcctcgaaaacgcaaggtcgatacattaccgttgggtggtaattttttgaacacaattgatttaagcacgcagtgttgggaagaacataaaattactctgtccaagaaggaagacgatgaggacagacaagatagcgaaaatgaagacacgaattcaaatatagtagttggtgtcggtggcacttctttgcaatgtgacaaaagtattattttaattggcggattgatatctagacggagcaatgtaaaagaaatatatttacatggtaccataacgaaaagtatttttcctagtgtaaatcctagtgcataa

SEQ ID NO: 81638 - DNA, 4044 bp, Saccharomyces pastorianus
atgatacagaattattctagtaagcgtaaagatgagctggagccgcacctttttgccatagcagaggaggcgtacaggttcatggtccatgaaaaggctaaccagactgttgtagtcagtggtgaatccggtgctggtaagaccgtctctgctaaatacattatgagatactttgcctcagtccaagaaagcaacaatcgtgaaggggaagtggaaatgtctcaaatcgagagccaaattttagctactaacccgatcatggaagccttcggtaacgccaaaactaccagaaatgataattcctctcgtttcggcaaatatctgcaaattttatttgatgagaatactaccatcagggggtccaaaattagaacctatctcttggaaaaatccaggttagtttatcagccagagacagaaagaaattaccatattttttaccaaattttggaaggattgacagaaccggtaaaacaagaactgcatttgtcatctcccaaggactaccattatactaaccaaggtggacagccgaacatagctggtatagatgaagctcgagaatacaagataaccactgatgccctgtcattagtaggtataaaccacgagactcagcttggaattttcaaaattcttgcaggcttgctacatataggtaatatcgagatgaaaatgactagaaacgacgcatcactatcatcggaagagcaaaacctgcaaatcgcatgtgaattattgggtattgatcccttcaattttgcaaaatggattgtcaagaaacaaatcgtcacaaggtctgaaaaaattgtcactaatttgaattacaatcaagcgctaattgctagggactctgtggcgaaatttatttattccacgctttttgattggctagtagacaacattaacaagacattatacgatcctgagctggatcaacaagatcatgtcttttcctttattggtattttagatatctacgggtttgagcattttgagaaaaactcattcgaacaattctgtataaactatgcgaatgaaaaattacaacaagagttcaaccagcacgttttcaaattggagcaagaagaatatgtaaaggaggaaattgagtggtctttcattgagttcagcgacaaccaaccttgcatagacttgattgagaataaacttggaatactttctctattagatgaagaaagtagattaccatcaggctcagatgaatcatggacctcaaaactatattctgcctttaataaaccgccctcaaatgaagttttttcgaagccaagattcggacaaacgaagtttatagtaagccattatgctgttgatgtagaatatgaagttgaagggtttattgaaaagaatagagacagcgtttccctaggtcatctggatgttttcaaagcaacgacaaatccaattttcaaacaaattttagacaacagagaacttaggagtgacgatgctcctgaagagcaaaatactgaaaaaaagataatgatcccagcaagattaagtcaaaagaaaccaaccctgggatctatgttcaaaaaatcgctaggggaattgatggccatcataaattctactaatgttcattatattcgttgcataaaaccaaattctgaaaaaaagccatgggagttcgataatttgatggtcttatcgcaattaagagcttgtggtgtgctggaaacaatcaggatttcatgtgcaggctttccatcaagatggacttttgacgaattcgttcaaagatatttcctcctgacggactacagcttatggagtggaattctttataatccagacctcccaaaagaggcaatcgtcaacttctgtcaatctattctagatgctactatctctgattcagcaaaataccaaattggtaataccaaaattttctttaaagcaggaatgcttgcatttttggaaaagctaaggactaataaaatgaatgaaatatgcatcataatacagaaaaagataagggcaagatactataggcttcagtatttgcagaccatggaatcaataaagaagtgccaaagccaaattagaagtttgttggttcgtacaagggtcgatcatgagctcaagacaagagctgccatattactacaaacgaacattagagcattatggaaacgggaatactatagagctgccattgggcaaataataaaactacaatgtacctgtaaaagaaaattgattttagatagtgttaacaggaaattcatgctcatggcggcagtaattatccaaagctacatcagatcatatggtcacaaaacagattacagaacattgaaaaggagctccattcttgtacaaagcgccatgagaatgcagttagctagacgaaggtatatagttctgcaaaaagaagttgaagaacggaatattagggctagttacgggattggattactggaggaagctatcgaatttaagaactctttcattttgaatctagagatgttaaatgactcatatacaagattaacacagttgttgcagggagatttgtcaaatattccatctaagcaaaggcaagagtacgaaacgatagtaaatggttataatgataagatttccaagctgaagacgttacaagttgaaatcatgaatactttaaacaagaagaatgccttgaaggagagaaaaaagaagcaatcttctttaatacagtcacatatgcaaagtttggctgctataaaaggtaacaaaccttcaagattaagtgatgaagtcaaatcaatgaagcaagaactagcgtttattgaaaacgtaatagcacaagatttcaccaccacatattctgctaataagaatgataaagtgaaaggtttgggaatcgcaggacaacaagtaaaaccgaagctagtcaatgtaattcgtagagaatcaggaaatcctgatcttctagaattactaatggacctgaattgttacacattagaagtcacagaaggttacttgaaaaaagtaaatgttactgaggtgaatggagacaatgttctgggtcctatacacgtcattactacagtggtaagtagcttagtgagaaatgggttattgattcaaagtagcaaattcatctcgaaagtcctattgactgtagaaagcattgttatgagtctaccaaaggacgaaacaatgcttggtggtatcttttggttaagtaatctttccagacttcccgcatttgctgcaaatcaaaaaacattatatgaagggaatggcggtgatgaaaaagataagttaacactgatatatttgaatgatttggagaatgaaactttaaaagtattcgacaagatttattccacttggttagtgaaattcatgaagcatgcttcagcccacatcgagatcttcgatatggttttaaacgagaagctatttaaaaattctggtgatgagaagttcgctaaattattcacattcttaaatgaatttgatgctgtcttgtgtaaatttcaagttgttgactcaatgcatacaaaaatttttaacgacaccctgaagtatctgaacgtaatgctatttaatgacctaataaccaaatgtcccgcgttaaattggaagtatgggtacgaagtggatagaaatatcgagcggttggtgagctggtttgaaccaagaattgaagacgttcgtcccaatttgattcaaataattcaggctgtcaagatattacagttgaagataagcaacttgaacgagttcaagttactattcgatttctggtatgccttgaatccagcccaaatacaagcaattctgttgaaatacaagcctgctaacaagggcgaagctggagtaccgaacgaaatcttgaattatttagctaacgtgatcaaaagagaaaacctgtctttgccagggaagatggaaattatgctttctgcccaatttgactctgctaaaaaccatctgcgttatgacactagtgcaataacacagaacagcaatacagagggcttagctactgtcagtaaaattataaaattaggcagaacataa

SEQ ID NO: 81639 - DNA, 795 bp, Saccharomyces pastorianus
atgtcatttgaagtaggaactaagtgttggtaccctcacaaagaacaaggctggataggcggcgaagtcaccaagaatgacttctttgaaggaacgttccacttagagttgaaattggaggatggagaaactgtatccattgaaacaaatagcttggaaaatgatgatgatcatcccacgctacctgtactacgaaacccacctattttagagtctactgatgacttaaccaccctatcatatctgaacgaaccggcagtgctgcatgccataaaaaaaagatacatgaatggacagatatatacttactctggtattgtccttattgccgcaaatccctttgataaagtcgaccatttgtactctcgcgagatgatacagaattattctagtaagcgtaaagatgagctggagccgcacctttttgccatagcagaggaggcgtacaggttcatggtgcatgaaaaggctaaccagacggttgtagtcagtggtgaatccggtgctggtaagaccgtctctgctaaatacattatgagatactttgcctcagtccaagaaagcaacaatcgtgaaggggaagtggaaatgtctcaaatcgagagtcaaattttagctactaacccgatcatggaagcctttggtaacgccaaaaccaccagaaatgataattcctctcgtttcggcaaatatctgcaaattttatttgatgagaatactaccatcagggggtccaaaattagaacctatctcttggaaaaagacctgcagcatgcagctgcactgccgtcttta

SEQ ID NO: 81640 - DNA, 1206 bp, Saccharomyces pastorianus
atggttaaaatgagaagaataacacctacacgcctcctattcacatgcagatttatttcaaacaatgcttctccaccagtgcagcccttgaatgtgcttttctttggtagcgacactttcagtaatttctcattgcaagcactcaatgagttgcgtcaaaataatggaagcagtggtatagtggacaatattcaagtagtaactaggtcgccgaagtggtgcggtagacagaagtctattttgaaatacccgccgatcttcgatatggcagagaagcttcaattgccacgcccaattacatgcgacaccaagcaggaaatgttggcgctaagcaaactgacacccagtcgccaagaaaatccggagaacgacggctccggtgctccgttcaacgcgatcattgcggtttcttttgggaagctcattccgggtgacttgatccgcgcggtgccattggcgctaaacgtccatccttcgctacttcccagacataaaggcagtgcacctatccagcgagctctgctggagggtgacacttacaccggtgtaactatacagacactgcatccggatcggtttgaccatggtgcaattgtagcgcagacggagccactggcgatcgcaacaatgctgtcaaaagggagagtcaatgattcgacggcagatttcaattctgagggccttcctcggaggactgccatactgatggaccagttgggcgcccttggcgcccaacttttgggccaaacgcttcgtgagaggttatatctaccacagaaccgtgtgcaagcgccaacagcttacaaacccagttacgcccaccgtataacaacagaagataaacgcattcattgggcgcgcgattctgccgccgaactacttaacaaactcgaaacgctcggtcctctgcacgcgttcaaagaagcgacagcggcaagaaaggacgctcaaaattcagtattaaaacgaatattgtttcatgagtgtaaagtgatgagagacgcacgtctagataatggcagtaaaccgggcatgttcaaatatgatgatattaaagattgtattttggtcacctgtcgcggcaacttactactatgtgtgagccgcctccagttcgaaggtttcgccgtagaacgtgctggccagttcatggcgcgcctgcggaaaagatgcggcgccctgagtgaaaagttagttttcctgtaa

SEQ ID NO: 81641 - DNA, 105 bp, Saccharomyces pastorianus
atgaagggtaaggttaaaggttataaactgatatcaattaatgaaatcagtcaagagctagtggattattttagctcaaatatctcgatgaagacggaagcttag

SEQ ID NO: 81642 - DNA, 138 bp, Saccharomyces pastorianus
atgtcgtatattcaaacacgcaatagagaagacattgaaggtatatacgagaattattttacacactacatccaatgcgacttagccacgttccgaacgaaatgtttatatgtccaagttataacaaaaagcaattga

SEQ ID NO: 81643 - DNA, 726 bp, Saccharomyces pastorianus
atggactatggctacttttttcccgcacaacgtattgaagaaacaaatggtgtggatttttggatagacagtaatgctgaatttacacagtctaaaagacctgactcttcaacatccactctttcgagggttttaacggacaccacgaatgtatccaataatagtggatcactcaaaagaaaaaccatcaagaacaaaatattcccacaaaggaaaatattcaacgatagcgaatattttgactttggtaaagccaacactgattgtaagcatgtgtttaaaagtatttctaagcaactgatttttcttccaaggtgtttccaacatcacagtatccgaggctggatgaaagacagatactccgaatttggttataaaataaaaagaaatcaaaattgtcccccctcagcatgtgtacaggcactatacagtactagtagatccaataccgaagagtcaaaccccaacagtctggattctctgataatctataaatacatgcgatactctgaaaagaaaaaggaattgatgtgcagattttgccaggggaataattggattctagctgaaaactacctaaaacatttattctttgcgcacggcattttgtctgaatttaagcctcacactttataccatttcgagtctaagctgttaaaaatccagggaaaacttaatttcaaaattcaagtattaaaagagccagagtttagcaaaaaattttga

SEQ ID NO: 81644 - DNA, 153 bp, Saccharomyces pastorianus
atgtatccaataatagtggatcactcaaaagaaaaaccatcaagaacaaaatattcccacaaaggaaaatattcaacgatagcgaatattttgactttggtaaagccaacactgattgtaagcatgtgtttaaaagtatttctaagcaactga

SEQ ID NO: 81645 - DNA, 117 bp, Saccharomyces pastorianus
atggagagggcctattcgggagatatttctgctgctgacgataacttaaatccttttgaaagatacaaacgaaatgttgttcctcaagaagatgacagactgcataaattaaaataa

SEQ ID NO: 81646 - DNA, 192 bp, Saccharomyces pastorianus
cgagccgtaaaggactctagccctgttccctcagatctagatgaaaaatatgtgtctgcatcgggatctattactccaccaaggcctccaccttctaggtctagtccaaagaaagtgccgcctgttgtcccaaaaaagaatgataacctgaagaaaaagccacagtggtcccaaagaaaaagccattactaa

SEQ ID NO: 81647 - DNA, 366 bp, Saccharomyces pastorianus
atgcactcaaacctggcacctacggagacgcaagacgtatcatggtctgaaatcgatacactggatgatgtgaagaagatggcgaaagaacctatcgtcaacgacgggttcccacgagattttgagagcaatctcacgcaaatgcgcaagtcgcacgctcaactactgcgattaatgagggaaagaaatcagcgactaaagtatgccaagctgaggagctctcctcataaggatcagcataattctgccacgaataaagatcaagaaccagacgaggtattgcatgacccggaaatcgcacttgacggtgagaagtacgtgagccaagttgtcgatactattaaagatgttcaccgatgcttatga

SEQ ID NO: 81648 - DNA, 534 bp, Saccharomyces pastorianus
atggacatggacaacacggatatctccccaaccaaccatcatgaaatgctacaaaatctacaaaccgtagtcaatgagttatacagagaggatgtggactatgtagcggacaagatactgacgagacagaccgtcatgcaagaatcaattgccagattccatgaaataatcgccatcgacaagaaccatttacgagccgttgagcaggctattgagcagaccatgcactcgctaaacgcacagatagacgtcctgaccgcaaatagggccaaagtccaacagtttagctcaacttcgcatgtggatgacgaggacgtgaactccatagcagtggccaaaacagatggactcaatcaactatacaacctcgttgccaaggactacgctctcacggacaccattgagtgcttatctaggatgctgcaccgtggcaccattcccctcgatacttttgtcaagcaaggtcgtgaattagcacgccagcaattccttgtgcgatggcacatccaacgaatcacctcaccgttatcgtga

SEQ ID NO: 81649 - DNA, 255 bp, Saccharomyces pastorianus
atgataatgctaggcgacaaaactggaaaaatagtgagtggcagagatagtaatattttaatgcaccatattgattttaaagtagataaaaacttaatcaatactggagtcggaattctgatcgcgtttttgatatttacagttttgataccatcaaacgactggaaaattgacaagaagattagtattgcacttcttacgttgtatatagttgtcacatgtattagtgtttttttagaagttcaccaagcgtaa

SEQ ID NO: 81650 - DNA, 1122 bp, Saccharomyces pastorianus
atgactttattagcattggggaatgcacttcctgatattactagtacttaccagtcgatgaaatctggcgtgacttccttggccattggtgagttatttggtggcatattttttctgttaaccgttgtgattggactaatgggctgcgtagccactatccaatttcaacatgacaagtctattgaaacttacacagaagaaagctttgaccaaaatttatcgtatgatagaagccattatatattggatgtcggaatattcacttttatgctcttagtttcgggcacttttctagcagatggaagactgtacttttgggagtgtattgtcatggttttaacctactgctgttgtgctgtctatttaataaaaagctacaaatatccctgcgaaatcaatgatgctttagaaagagaggtagaaataaaaaaaactgtacttgcaaataatcatatcactgttccaaatcgatttacattaacgactaccagtgacattacatccacagacgatggaataagatatgtaaggcctttgggggatacacagattgatgaggacaacgctattaatttagatccaactcgtttaccaagtaaatccctggataacatttcgagatttaatcaaggtatacctgaaagaagggatttaataagacgtagaatacggggatatttacggtcgcattatcatggctgggtaagaatgacgttacaagatcttttgaatatatgggagaagcagaatctttttaacaatacagtaaaatcgttgtctttaccctccgatgatactcatttatttactaaagcttctttagatgaagaagggaggcctttaataagaaaaaggatgaattcattacaacctaaggatttttacaaatatttgtccctacggaatggggaaaactcaaattcgctggatactgcaatctctgctccccaaaacgagtatcaaacttactataatgaacccacaagtttgtttttgactgtgccacaaaaaaaaacctccaagaaatcattaagctgcgatcgcattccaaacttggtccggagtaataatattatattaaatgacgaggctacacgtacacaggaatctaccatgccttga

SEQ ID NO: 81651 - DNA, 141 bp, Saccharomyces pastorianus
atgaatcgccacagattgttgtggatgatgaaagtacatccaagcatgaatagtgccatgaatgagatcaaacttgtacttaactcttacaaaaaaaatgagatggttgtccatgagacgcagtgctttacacattattaa

SEQ ID NO: 81652 - DNA, 1716 bp, Saccharomyces pastorianus
atggagggctcatatctatctgcacaagaaaaccaacccataccggagcgattgatacctaggtcgaactcaacttcgaatttgtttgctttgtctagtacattctctaaactcaatgttaggaatgatgctgattacaattattcgaacccgaataagaagagacacatttataatagcgagatagactgcaggtctgtgacagcagctagaaaatttccagtaaggtcctgttcaatgacagccgcccagcaaagaaagagaactgcgctattcacagttagggaaagaaactcttaccatgaggggttcaataatgatcaagattatgtgaaccaataccagaagccacagtacactttcggagtatataaagaattaacaccttatcagctgcagcgctctaaaatgaaaacaagctttcaatttcccaatggcgaaatatacaagccaaaaattgatggaaaatgcacccacagcttgaaaaagcctgaattaaattcaagagattcttctttattcaaattcagcgagaagaaaggtcgccatttatcaaaagattttgtgggacctcataatgggacatcagtcatacatattcctcccaatgatacaggctacggtgtaaatagcttggagctgaacacttcagttccttcaacaataaaaagttcggtttcatcaacctctccgatatctgcagttaataccctaaccagcttgccagaaagtcaaaccgatgatgatgacggttatgaaaataaaactgtaactatatcttattgcttcgaaaatacggtaaatgaaaaacatggtagccatatagaaaaattggatttatcaactaaggaaaaaactaagccaacaactaattcaggcctatttgatagaaggaaaaagactattccgggcactgagaaatatagatgtataaagtcacaatcgaagttgaaactgggttctgttttgaagaaattatggcgtacttctggaaactcgaatacaaagcatggaaaaaaggatacaaaaagaaggaaaattcctatcgatgatatagtcacgcattctgatggaaattctgaagctgagagtgatattgaattaatggatgcaaatctggacggcattgaatttgacgacgacgaaactctaatggatacagattcaatttttgatgatctgttgtccaaggaaaatgataaatacgatttgaggcgaaggcaattagaaatacgacaaaagctccacgagacctcgcacaacgacgatggcaaggtttcttttcgagagaccgaaaagcataatgtcaatgaaggtttgatcgacaagaccataatcgaagaattttcaaagctcggtgaatatataagcgacacgagaaatcaaccaccaccaagatcgtccaagaggccttcattagacgacaatgaatctgcacgatacttctacaacatatcgacagatttgcgacagtctctgtcaggtccaataagcttaccaatgcatgttgggaacgacatggtaaataggttgagaaatgactgggagtatatcagattcgaagatagaaggaattcgctgccagattcctcatttgataaagtcgaaacacctccgaaaccaataaaaaaagatgtccggtttgcgaaagaagtatgtttagcaagtacttggtcatcgaatgcatatgagagagctaatccggaattcatatga

SEQ ID NO: 81653 - DNA, 600 bp, Saccharomyces pastorianus
atggagtacccagtaataccaagaaccacttttctaatagactcagtacaactaccagtcgatttccaagtcccaatgatagaatattatatcggcaaaataagttcttcagcagaattcaatcataccttatcttggtcacaatttctttatcttttcaaagaatatattttcaaacaatacaagtacaattactatattaaatacggtaaaaataaggtcacttttgaagatgcgttcgccgtggaaaaatggccaattacgttagacacagactctccagtttggtttaattttgcatggtatggatccttactctcgatgatcattttcatgtgcgtgcaatgtaagagaatgatatcttggaatccgtggacaactgctgaaccttccttttctatcaaatgggaggtctacaatgaatttggctgggagtgtattgtcggttggtttttacatttttacatcttcacaatgagtccacacttcaacttggggaaaaaactgtacttccaaagttttttctttagtgtattgtgtcttttagaatcgttagatttccttgcaaagcaactcgtagaaagattttctccattatga

SEQ ID NO: 81654 - DNA, 99 bp, Saccharomyces pastorianus
gatatttcgtatccatcagatgttgacgaacagttagtagcgttatcatttgaagatgtcgcgtcagactatgaatggttaatagaacatccgacatga

SEQ ID NO: 81655 - DNA, 2055 bp, Saccharomyces pastorianus
atgttaaaatgtatatgccgtgtctattcccagcctttggctcaaatggtcacttcaccgctgtttaaacatatgggtagcgcagggacatacacaattctacctattacaaatctgcgccatttatctacgaaaaactgtccattgaaaattaaatcaaatcgttcagaacctttgcagtttggcgattttgaacgacaggtgccatgttctaggaagagcggatcttcgaaaaatgttcagaagcgtttatacgagctccgacaattgaaaactgtattaagtgagacttttggagtaactgaatacgcctctttttttgaatctctacgaaatgccctgcatataaataattgctcagaaaatgaaaagaagaaacttttatatgatatcattttgcatcaacacgagttatacccagaggtggcaagaaaaattggattttatctaccaggtgaggtccacagatggttctggtatcatattccaaaatcagaatcttttaatcactatctttttcttttgaaaagtgatgttcttctctttacttctaactactgtacgagatttaccaataggctgataaaaggaactgagatggagaggcagttagccacgttccaaatatttttgcatgatgagacaaacataaaatttataatggaaaaagttctgaagttgcatacatttgacagcttaatcgctctagtaaatggccttgttaaggcgaaaaattttaggttcattaaagtatttattcaagctctactacagaagttggaacagcactgttattctggtaaagatggagcaaagcaaaagaacctgcgttatgtcaagttcaacaataccttactttattaccttttgaaaagtggaaatgttgagttattcatcaaaacctttcaagaggaactgaaattcattgtaagctcaggattgcttaatcacattgatggaaacgaacacatattgaattttcccattgaccactacttgaatctgctccgaatatctaataggcaggaggagcttttcaatgtaatttcctgcttacaaagcagcccactgatgaaatataaattgttcaaggagtttttaatgggtgaattaattgcatcttttcaagcctttcgtgacccgaaattggtgtgtaaatatctcctctcatcatacagctcaaaggcgtctgctaatattctgaatgccctagggatttgggggtggctctatcattcaaaatcaacgactttgacagctcctacgttagcaagagagctgaagaacaaaaataatattctaccgaacacaatgcgaatagggtcaccagtgactgttccaattttaactgaactgtatagaagccttttatcttcgagttctgtttcactggaaagtggtcaattcaagaattgtcttcttgatttatattacaagtacaagagttttctttccgaggaagctcataaatacaggtattggagaaatgataccggaatcctcaatgttttcctaaattatattagattccaagctcgtgaaccaaggctggcctacaatgttcttctggatttttattctcaacctttcgccaaaaaagtggttttaactaccacgctatgtcccttttccatagtagcctataaaaatcatacattaacgcaggctgaactatcagaattgctacaggtgatgcataaaaatggggtgcctttaacgtttaaattttgttctgcaatggtaatgcattatgtcaaaatgagagacgaaaaaggagcacgctcctggtacaataagatactcttcgggggctttgaaatcaggcatatggctttgatacagataataaaagaccaaggctggccgtttcccaaaaactttgacgaaactttactgacggaattggtggaaaataataacattaaagaacctactgatagcaccctgtttactgacgaagatatgttcgaagaagatggcaagcctagatttaatgatgatgatgttaataaatgtacaaatattataagagagacattgaaaagtctaaattaa

SEQ ID NO: 81656 - DNA, 210 bp, Saccharomyces pastorianus
atgaagccttcttgcacttttcttgcctcatcttcgtcttcatcaatatcttcgtcttcctcagaggagtcaaagacatcttctccttcttcttcatcactaggcgctttagtttcatcgttgtcatttactatttcttcctcgtccctagggaccagcttcgaatctcccgtctcttccataaaaggcaaattttatgtccttgtgtaa

SEQ ID NO: 81657 - DNA, 387 bp, Saccharomyces pastorianus
atgtcatacatctcgtcaatcttatccgacgatagaccagtaatctgtgtaggttgtttgatggattgttctcttaaaagcttcttttcttggatcctcctttgtctggtttcgtcgtcctcatcagaaaattcatcatcttcaatgaagtcatccaattcgtccaagattccacctttgtcagctgttctgttcctattttcatggtcttcttcatcacgcccatattcattgttcctaccgttgcgtaaaccagattcttcttcttcttcatcttcagaaaagaaatcttccaatttagacgtagaatctgccttgatgcagcgacgttgtcactttctgattctgcagcgtttccttcatctcctactctctttaatcttttaa

SEQ ID NO: 81658 - DNA, 702 bp, Saccharomyces pastorianus
atggctaaattacagaggaagagaagcaaggctcttgggtcatctctagagatgtcccagataatggatgcaggaacaaacaaaattaaaagaagaataagagatttagagaggttattaaaaaagaagaaagatatacttccatccacagtaataatagaaaaggaaagaaatttgcaagctttacggttggaattgcagaataatgaactcaagaataagattaaagccaacgctaaaaaatatcatatggtgagattctttgaaaaaaaaaaagcattgagaaaatataacagattattgaagaaaataaaagaatctggcgcagatgataaagatttacaacaaaagttgagagccactaaaattgaattatgttacgtgataaattttcccaaaactgaaaagtatattgcactatatccgaatgatacaccatctacagacccaaagggcgtagaattgacaaatcttagaagagaacaatttcttaaattagtagctgaaagaatggatgcgaacaccttaaacgtatctttcgaagagatattgaagggaaagaaattggatgaagattccatcggattaacattatcacctgataaagatcatgaggatggatcacaagtatcacctacacaggatagaaaagaattggatcaagttgtgggagaagatgaaaaggatgatttttttgagtaa

SEQ ID NO: 81659 - DNA, 1710 bp, Saccharomyces pastorianus
atgaatactgctggtttcaactcaccaaaaaaatccattgtcgaggagggaatggttgacaaccattcatcaactggaaattattctaacctatcaacaccctctattgagaaaaataagacaaataatgctgataatgaggaagaagtacgggagattgccatcccagagaagccagcttcagcatatgtcactgtttctatcatgtgtttatgcgttgcttttggtggatttatctccggctgggatacaggtacaatttccggctttgtaaaccaaactgatttcttaagaagatttggtacttacagtgcttccggagataaatactacttatcagacgtcagaaccgggttaatggtgtccatcttcaatgttgggagcgccgttggctgtcttttcctgtctaaacttggtgacatatatgggcgctgtgtaggtttgatgattgttgttgtcatctatatggttggaattgtgattcagattgcctctattgataaatggtatcaatatcttattgggagaattattgctggtattggtgctggtggtatcagcgtccttgctccaatgcttatatcggagaccgcaccaaagcagattagaggtacattgcttgcttgttggcaattaatggtcacatttgcaatttttcttggttactgtaccaactatggtaccaaaagatactcgaactctatccaatggcgtgttcctctaggtctatgtttcgcttgggccatttttatgataattggtatgactttggttccggaatcacctcggttcttagtcaaagttgggaaatttgaacaagccaagcattcttttgccaaatcgaacaaacttagcgttgatgatcctgctgtgattgcggaaattgatcttcttattgctggcgtggaagccgaagaagcaatgggaacagcgtcttggaaggaattattttctaggaaaactaaagtgtttcaacgtttgacaatgacagtggtagtcaattcgttgcaacaacttactggtgacaactacttcttctactacggcactactattttccaatcggttggtatgaaagactcctttgagacttctattgttttgggaatcgtaaattttgcatccaccttcttttcactatattctattgataagcttggacgtcgtaagtgtcttttactgggagctgcgaccatgacggtatgtatgctcatctatgcctctgttggtgttacaagtctatatccacatggcaaagatcaaccatcatctaaaggcgctggtaattgtatgattgtgttcacttgtttttatcttttcttttttgcctgcacctggggtccagtatgttatgttgttgtttctgaaacatttcctctgagagttaaatcaaagtgtatgtctattgcaacatctgctaatttgctatggggttttttaattgggtttttcacgccgtttatcacttcagcaatagacttctattacggttatgttttcatgggctgcctagtgttttcgtatttttatgtgttcctgtttatcccagaaacaaaagggcttacattggaggaagttgacgaaatgtgggtggatggtgttctgccttggaaatctaactcttgggttccctcttctagaaggggtgctgattatgataacgagaagatacttcttgacgacagaccttggtataagaaaatgatctga

SEQ ID NO: 81660 - DNA, 864 bp, Saccharomyces pastorianus
atgcattacaagaaagcatttctagcatctctattaagtagtattgcgctaaccgcgtacgctccacctgaaccctgggcaactttaactccaagctctaaaatggatggtggcacaacagagtaccggacctcattcggtctcgctgttatacctttcaccgttactgaaagtaaggtcaaaagaaacgtcatttcacaaattaatgacggtcaagtgcaagtaacgacacaaaaattacctcatccagtttcgcaaattggagacggccaaatacaagttacaacgcagaaggtgcctccagtagtgtcacatattgtgtcacaaataggcgatggtcaattacaaataactacagctaaaaatgttgtcacaaagtccacaattgctgttccaagtaaaactgtaactgcgacagcaacttcaaccgcaactgctgtttctcagattcatgatggtcaagtgcaagttactatttcttcagccagtagtagttctgtgctttccaagagtaagttagagccaacaaagaaaccaaataatgaaaaagtgatcaaggtgcaagcctgtaaaagttctggcaccttggcaataacgttacaaggaggtgttcttattgactccagtggtagaattggatcgatagtagcaaacagacagttccaatttgatggtccacctccacaggcgggcgctatttacgctggcggctggtcgataacgaagcatggcactttagctattggtgataatgacgtgttttaccaatgtctgtcgggcactttctataacctttacgatcagtctatcgggggccagtgcaatcccgttcatttacaaacagttggtctcgtcgattgttga

SEQ ID NO: 81661 - DNA, 969 bp, Saccharomyces pastorianus
atgaaaagaaatagtagcctcacgtctgcctatagacttgccccaaagccgttatttgctccctcttcgaatggcgatgctaaatttcaaaagtggggcaagacactggaaagaagtgatagaggaagcagtaccagcaattctattacggacccagaatcaaactatctaaattcaaatgacttgttgtttgatccagatagaagatatttgaaacatctggtgattaaaaataataagaacttaaatgtcattaaccataatgatgatgaagcaagcaaagttaaattagtgacgtttacaacagaatcagcttcaaaagatgaccaagcctcatcaagcattgctgcttcaaaattaactgaaaaagcacattctcctcagactgacctaaaagatgaccatgatgaaagcactcctgatcctcaatcgaaagctccaaacggttccacctctataccaatgattgagaatgaaaagattagcagcaaagttcccggcctattgagcaacgacgttacctttttcaagaataactactacatttcaccttccatagaaacgcttggcaataagtcattaattgaacttcgtaaaataaacaacctagtcattggtcacagacattatggtaaagtcgagtttctggagcccgttgatttgttgaatactcctttggatactttatgcggggatcttgtcacctttggaccaaaatcatgttcaatatatgaaaactgttccataaagccagaaaagggcgaaggcattaatgtacgttgtagagtgactttatattcctgttttcctattgacaaagaaacaaggaaacctataaagaatataacacatcctctactgaaaagaagtatagccaaactaaaagaaaacccagtgtacaagtttgaaagctacgaccccgtaacaggcacctatagttacaccatagatcatccagttttaccttaa

SEQ ID NO: 81662 - DNA, 156 bp, Saccharomyces pastorianus
atgctgaggaatcccactgcaaaccagtcagggagtggaaacagtctatttggaactaaacctgcctccactaccggctcattatttggaaacaacacagttctactgacagtacctatccagcgaatggggttgtttggggtaacacacgcttaa

SEQ ID NO: 81663 - DNA, 1761 bp, Saccharomyces pastorianus
atgtttggcaacaatagaccaatgtttggagggagcaacctttcctttggatcaaatacgtcatccttcggtgggcaacaatcgcaacaaccaaactctctttttggaaatagcaataacaacaataattccaccagtaacaatgcccaatcaggatttggtggattcacttctaccgctggcagtaatagtaacagtttatttggaaataacaatactcaaaataatggggcatttggccagtcaatgggtgccacccaaaactcaccatttgggtcgttaaactcctcaaatgccagtaatgggaatacttttggaggatccagttcaatgggttcttttggtggtaataccaataatgcatttaataacaataataataacagaaacagtaccaattccccgtttggtttcaataaaccgaatacaggagggaccttgtttggttcgcagaataataatagtgcaggtacttctagtttatttggcggccaaagtacaaataccactggaacattcggaaacaccggaagtagtttcggaacaggcttaaatggcaacggctctaacatatttggggcagggaacaactcacaaagcaatactacaggcagcttatttggcaaccaacaatcttcagcgtttgggacaaataatcaacaaggaagtctgtttggacagcaatctcaaaacaccaataatgtgtttggtaatcaaaatcagctggggggcagttccttcggatcaaaaccagttggttcagggtcgctgtttggccagagcaacaacactttaggtaatacaaccaataatagaaatggattgtttggtcaaacgaatcccagtaaccaaggcagttctaacagtggattgtttggacaaaactcaatgaacagcagcactcaaggggtatttggacaaaacaataatcaaatgcaaattaatggcaataacaacaacagtttatttggaaaggcaaacaccgttagtagtttcggtcagcaaccgaacaacaactctgggtctttattcggaaacaagccagcaagtggcgggttatttggtcaacagggcacttctacaaacaccttttcaaattccgcatcaggaggtttatttggccaaaataatcaacagcaagggtccgggctgtttggtcaaaattctcagacaagcggtagtagtggacttttcgggcagaatgatcagcaacagccgaatgcttttacccaatctaatacaggaacaggtctttttggacagaacaacaaccagcaacaacaatctacaggtttgtttggagccaaaccagcaggtaccacaggttctcttttcggtggtaattcttcaacccagcctaactctcttttcggtactgccaatgtacctacgtctaatacacagtcacaacaaggaagtagtctttttggtgccacgaagccgaccaacatgccctttggaggaaatcccactgcaaaccagtcagggagtggaaacagtctatttggaactaaacctgcctccactaccggctcattatttggaaacaacacagcttctacgacagtaccttccacgaatgggttgtttggtaacaacgctaacaattcaactagcactacgaatacgggacttttcggtgcaaagcctaattctcaggccaaacctgcattagggggagggttattcggcagacctgcaggcatgcaagcttgcactgccgtcgttacaacgaaagaagaaggaagtagggtgaagtaa

SEQ ID NO: 81664 - DNA, 759 bp, Saccharomyces pastorianus
atgctaacgataggtgcattacaagaaataaagtctgcagatataatactggcagataaactggtaccgcaagccattttagatttaatacctccaagaactgaaacctttatagccaagaaatttcccggtaatgcagaacgagcacaacaggaattactagctaaaggtttagaatcgttggataatggattgaaagtagtccgtttgaagcaaggtgatccgtatatttttggccgtggtggcgaggaatttaatttcttcaaagatcacggatatattcctgtggttttaccgggcataagctcatccctagcttgtactgtattggctcagatacccgctactcaacgtgatatagcagaccaagtgctcatatgtactgggactgggagaaagggcgctctgcctataattcctgaatttgttgaaagcagaaccaccgtctttctaatggcactgcatcgcgccaacgttctgatcacggaattattgaagcatggctgggatggtgatgtccccgctgcaattgtcgagagaggatcgtgcccagaccagcgtgttactagaactcttcttaaatgggtaccagaagtcgtggaggagattggttcaaggccccccggtgtcttggttgtaggcaaggctgtgaatgcattggttgaaaaagatctgataaattttgacgaatcaagaaaatttgtcattgatgaaggttttagagaatttgaggttgatgtagatagtctatttaagtaa

SEQ ID NO: 81665 - DNA, 1071 bp, Saccharomyces pastorianus
atgaaatttgatgtcaaatcttgctatgattccataccaaggatggaatgtatgaggatactcaaggatgcgctaaaaaatgaaaatgggtttttcgttagatctcaatatttcttcaataccaatacaggtgtattgaagttatttaatgttgttaacgctagcagagtaccaaaaccttatgagctatacatagataatgtgaggacggttcatttatcaaatcaggatgttataaacgttgtagagatggaaatatttaaaacagctttgtgggttgaagataagtgctacattagagaagatggtctttttcagggctctagtttatctgctccgatcgttgatttggtgtatgacgatcttctggagttttatagcgagtttaaagccagtcctagccaggacacattaattttaaaactggctgacgatttccttataatatcaacagaccaacagcaagtgatcaatatcaaaaagcttgccatgggcggatttcaaaaatataatgcgaaagccaatagagacaaaattttagccgtaagctcccaatcagatgatgatacggttattcaattttgtgcaatgcacatatttgttaaagaattggaagtttgtaaacattcaagcacaatgaataatttccatatccgttcgaaatctagtaaagggatatttcgaagtttaatagcgctgtttaacactagaatctcttataaaacaattgacacaaatttaaattcaacaaacaccgttctcatgcaaattgatcatgttgtaaagaacatttcggaatgttataaatctgcttttaaggatctatcaattaatgttacgcaaaatatgcaatttcattcgttcttacaacgcatcattgaaatgacagtcagcggttgtccaattacgaaatgtgatcctttaatcgagtatgaggtacgattcaccatattgaatggatttttggaaagcctatcttcaaacacatcaaaatttaaagataatatcattcttttgagaaaggaaattcaacacttgcaagcatatatatatatatatacatatagttaa

SEQ ID NO: 81666 - DNA, 729 bp, Saccharomyces pastorianus
atggtcgataatgaggctatttacgacatgtgcaaaagaaacttggatatcccaagaccaagctttgcaaacttaaacaacctaattgctcaagtggtatcatctgtgacagcatcattgagattcgacggttcattaaatgtagatttgaacgagtttcaaaccaatttggttccatatccaagaattcatttccccttagtttcatattctccagtcttatccaaatcaaaggcattccatgagtccaactctgtgtcagaaattacaaacgcttgttttgaacctggtaaccagatggtcaagtgtgatccaagagatggtaaatacatggctacttgtctgttatacaggggtgatgtggtaacaagagatgttcaaagagctgtcgagcaggtgaaaaacaagaagaccgtccaattggttgattggtgtccaactggtttcaagatcggtatttgctacgaacctccaactgccacaccaaactcacaattggccactgtggatagggccgtctgtatgttgtcaaataccacatccattgctgaggcttggaagagaatcgatagaaaattcgatttaatgtatgccaaacgtgctttcgtccactggtatgtcggtgaaggtatggaagaaggtgaattcaccgaagctagagaagatttggctgctttagaaagagattatatcgaagttggtgccgattcttatgccgaagagttttaa

SEQ ID NO: 81667 - DNA, 1644 bp, Saccharomyces pastorianus
atggaaagatatctagatatgtccagtatgaaacacatcttttatctctggttgaaagtgaaatgtggtgatgagcaatcctcttcaactaaccttccctcgttcaaaaccctcgcgataatacacagaatgttattacgtttttctaatacagatgagctaaacgattttttaaccaatcccgttgttttaagtacgggatatacatcaagtgtgcaattcgagttgattgaattttgtcattctctgtattccatcaaaggagacagaacaaaaagcattgatgactcaatattgatggaaagagttgataaatttattacaagacttaataataatatttcaacacgaaaagagctatatatgtcagtggttcaagcgtacgtctctactaacaatttcgagaatttaaaagtaatcttggaaaaaatccagagagataatgatattagcatagacggttcgtttcatttgtgcatttctaggtattttgtcaacaccaatcaattcgaaggacttttcaaatattatcgcagtgtagttaaaaccactgatggcaaaacgcgattacggcccgcatttattcaacaattatggtcatgtgccgtaaatgtttatccaatgctggcaaaagaaattacaaatgacctacttgtgactctaaaaaggagccaatacagcaaatgtctcacttgggtgtacacatttttacaagaaaatgcccatatccatacgagaaagatcaatggaggagaagactcttcgttatctggtttcaacgcggttgattttgaaaggtttgaagagttcaagaaaaaagtttctcacaatgatgtatatggagcagaattggtgatttcgaatagtttgaaggagggcattgcgcctcaattttcatttttgtattccgttttggcattatgcttgagaaactctttaactggtttggcacgtgtagttgatgtgatattaaggactagattccgctatatcccactaaaagtcgatatattatggttgaaatgggagatcatttctaattatagatcttttgaaaagttgtctgctgaacatttaaaagaactggaattcaaactgaaggaatttgaacgagtacatcaaaaggagctttcagttcaaaactatttacaacttactcaaatatgtttccacacccgtgatttcaaatatgcatgttacctaatttcacaagctagaaaaaatttggatacttctaataacaaacagtggatgatgtattacatgacatctttaaagttggcgtcaagaatgcatgaaagcgaacggtttagtaggattttaaaagactggaattgtaatcatagggcaagcctgattactccaggttgcattagacaaatcaaaggctttatgaaatattttgagaaaaggcctgcttacatttcaactgctgcttccattgataacaaggagataaaggatcgcattgacgagttagtacttagatatgtggactataaataccaggggcttgagaatatgagaaagttaacacttttcttaaaagaatggtttgatgaagagatttcactattaaagttggagcaaaatgaaaggaaaaggaagctttttgaagagaataaaaaggaggaggaggagtaa

SEQ ID NO: 81668 - DNA, 330 bp, Saccharomyces pastorianus
agaggatccccaataccagcactagaattctgcaaaaccgcaaaatacaggaatctcaactcggggaaaggtttattgcaaaaacttaactttgttaaaaaacggaaatctttcaaacagccttcaggcgtcatttgtagccattataacagcaatgttcaaaaccgtttgaaaaggacaaaacagtcatcaacaaagatagcctcttcatcatctgtggagacacaaatatcttcatcctcatcgccattacccaataaagcgatcggtaaaaatgaaaacagcgttgaaaacggctttaaaaagctaaatttgcatgatatcagttaa

SEQ ID NO: 81669 - DNA, 216 bp, Saccharomyces pastorianus
atggggtgggaaagtgactccgagcgagattctaaaggcgacaagacacagagtcgaaacaaggacgtttcaaatgtttcacagatacatcctgatggactgggaattggtgccaagttaaataaggcaataaacgtggaggaggcttcatttatgcccgtcgtaaaaatcgataaaatgacgggcaccaaagttgatgacgacaaaaaaaaataa

SEQ ID NO: 81670 - DNA, 1260 bp, Saccharomyces pastorianus
atgaatcaggaagacaacacgggcggagggggcatttttggtcttttcaaatggactaaggatgcgctgtttggtacggacatatcaccttcaatgaaatataaagatcaggaagaacgaagagaccgatctaggtatgcccaagacgacacaaatttttctatgaagtttggaaatgactccaacaggaggagtacaaacttatcgaggtcaaattcgtggtctggtctggattcaacgctccataggaagtacgagttactcccagagtacaacgagaacggctttaactcaattgttaacggtgaccaccacagcaaagagagaatacgatctttacgaagtcctgctccgatagtaccgagagaaccacttcgtaacgaacctacggatacatttggtcacagactacacacaaaaaggagaactataaatgagctttccaattcgcagataccctttataccacctcaggaagacgaccctttgctctcgaaattatttaacaaggatggagttaatgaggttagaagatcgccctataagttatcggttaaagatataccaggcaaatttccatctcccttaacaaaacgtgatgaaatagacaattactatgtccgggacgaagatgcttgccacaagaatagagagtataaaaaggcatattttgatctttttgcacaaatggacttgaacagtagagacctggaagatttgtgtgaggatgttagagagcagcgtgagcaattccacaggaatgagcaaacttataagcaagcatacgaggaaatgagagcagaactggtcaacgagttgaagaaatctaagacactctttgaaaattattattcattaggtcagaagtacaagagtttgaaaaaggtccttgatcaaacgatcagtcatgaggctgaactggccacttctagggaacggctgtatcaggaggaggatttgaaaaactttgaaatacaaacattgaagcaaagactatccgatttagagctgaaatataccaatttgcaaatagaaaaggacatgcagcgggacaattatgaatccgaaatacatgatttattattacagcttagccttcgtaataacgagagaaaagatacttctgctggttcgaatattttttcaacaggacaatacgacaggactccattccacaatggaaataacagttacgactctaattcgcattcatgggacactgattacttaaaaaatatagacggattcatagaacgctga

SEQ ID NO: 81671 - DNA, 357 bp, Saccharomyces pastorianus
atgttatctcttataaatagaagtattcttcattcaataccaattactcgtcacattcttccaatccgattaatattggttaaaatgaaccatgtgcaaatcagaaacataaaattatatcactttatttcatatggtttcatgcttacaaagcttactgtctttctctttaacttattttctacaggctacgaattctttgcaggcttactttactcatatcattattacctatacaaatatatattaaagaaatccaaacaaaaatgcttgaaaagcatacagcttccgatacatcatgtatatagaaaatcacagtacaaaagttttgaatttatgtataaccgtttcgcctga

SEQ ID NO: 81672 - DNA, 291 bp, Saccharomyces pastorianus
atgacaagcgaaccagagtttcagcaggcttacgatgagatcgtttcttctgtggaggattccaaaatctttgaaaaattcccacagtataaaaaagtgttacctatggtttctgtcccggagaggatcattcaattcaggctcacgtgggacaatgatcatggcgagcaagaagtggctccaggatatagggtgcagttccattcagccaatggcccttacaagggtggcctacgcttcctaccatcagtgaatctgtctatcctaaaatttcgagtttcgaccaaatcc

SEQ ID NO: 81673 - DNA, 111 bp, Saccharomyces pastorianus
atgagagccttagagtatttcggtaaaggtaacatcagattcaccaagcatttaaaggagccacgtatcgtggcgcccgatgagcttgtgattgatatcgcatggtgtggt

SEQ ID NO: 81674 - DNA, 1422 bp, Saccharomyces pastorianus
atgatcttcctaaacaccttcgcaaggtgccttttaacgtgtttcgtactgtgcagcggtacagcacgttcctctgacacaaacgacactactccggcgtctgcaaagcatttgcagaccacttctttattaacgtgtatggacaattcgcaattaacggcatcattctttgatgtgaaattttaccccgataataatactgttatctttgatattgacgctacgacgacgcttaatgggaacgtcactgtgaaggctgagctgcttacttacggactgaaagtcctggataagacttttgatttatgttccttgggccaagtatcgctttgccccctaagtgctgggcgtattgatgtcatgtccacacaggtgatcgaatcatccattaccaagcaatttcccggcattgcttacaccattccagatttggacgcacaagtacgtgtggtggcatacgctcagaatgacacggatttcgaaactccgctggcttgtgtccaggctatcttgagtaacgggaagacagtgcaaacaaagtatgcggcctggcccattgccgcgatctcaggtgtcggtgtacttacctcagggtttgtgtctgtgatcggttactcagccactgctgctcacattgcgtccaactccatctcattgttcatatacttccaaaatctagctatcactgcaatgatgggtgtctcaagggttccacccattgctgccgcgtggacgcagaatttccaatggtccatgggtatcatcaatacaaacttcatgcaaaagatttttgattggtacgtacaggccactaatggtgtctcgaatgttgtggtagctaacaaggacgtcttgtccattagtgtgcaaaaacgtgctatctctatggcatcgtctagtgattacaattttgacaccattttagacgattcgaatctatacaccacctctgagaaggatccaagcaattactcagccaagattctcgtgttaaggggtatagaaagagttgcgtatttggctaatattgagctatctaatttctttttgaccggtattgtgtttttcctattcttcctatttgtagttgtcgtctctttgattttctttaaggcgctattggaagttcttacaagagcaagaatcttgaaagagacttccaatttcttccaatataggaagaactgggggagtattatcaaaggcacccttttcagattatctatcatcgccttccctcaagtttctcttctggcgatttgggaatttactcaggtcaactctccagcgattgttgttgatgcggtggtaatattactgatcatcacgggacttctggtttatggaactataagggttttcatcaagggaagagagtctctcagattatacaagaatcctgcgctacctactttacagtga

SEQ ID NO: 81675 - DNA, 810 bp, Saccharomyces pastorianus
atgatcatctttgtcattgaactagcttacttcgtttgtctctgttggataagaccgtatttggacaagagaactaatgttttcaatattgctattcatttggtgaatttgatcaatgcatttttctttttgtttttcagtaatttgttcaagcaaccagcagtggtttcgtcagtgatggcggttattctgttcgttctgaacgcggtgtttgctctattcctattactgttcactattgtcacctgtacactggcattactacacagaaacccagatgtccgttaccaaccaatgaaagatgaccgtgtgtcattcattcctaagattcaaaatgatttcgatggcaaaaacaaaaatgattctgaactgtttgaattgagaaaagctgttatggacaccaatgaaaatgaggaagaaaaaatgttccgtgatgacactttcggcaagaacctgaatgcaaacacaaatacagcaagactctttgatgatgagactagttcatcctcttttaagcaaaattcctctcccttcgatgcctcggaagtaacggagcaacctgtgcaaccaacctccgctgtcatgggtacgggtggcagcttcttgtctccacagtaccaacgtgcgtcatctgcttctcgtactaatctagccccgaataatacaagcacctccagtttaatgaagcctgaatcaagtctctacctggggaattccaataaatcatattcgcatttaacaacaacggcagcaacgaaaacgcccgcaacaacaacccatatttgtaatccaatatatactcacatgtaa

SEQ ID NO: 81676 - DNA, 3144 bp, Saccharomyces pastorianus
atggtcgaaaatagtacgcagaaggccccacatgccggaaatgatgataatagctctaccaagccatattcggaggcgtttttcttagggttcaataacccaacgcctggattagaagctgagcactcaagcacatcgcctgcccccgagaactccgaaacacataataggaaaagaaatagaatatcgtttgtctgccaggcttgtaggaagtcaaaaacaaagtgtgatagagaaaaacctgaatgtggccgatgcgtcaagcatgggttaaaatgtgtttatgacgtatcaaaacagccagcaccacgaattccgagtaaagatgccattatatcaaggttggaaaaagatatgttttattggaaagataaagctatgaagctactaacagagagagaggtgaatgaatcaggcaagagatcagcaagtccgatcaatacaaacaatgctagcggggacagtcctgataccaagaagcagcataaaatggaacctatatatgaacaaagtggtaacggggatataaacaatggtactagaaatgatactgaaatcaacttgtatagaagtcatccaaccatgatcatgagtaaagtcatgaaaagagaagttaagccgttatctgaaaattatattataattcaggactgttttctaaaaatcctggtcacttcagtgttccttgacacttcaaagaacacgatgataccggcattgacggcaaacgcgaatattacaagagcccagcctagcgtagcaaataaccttttgaaattgaaggaaatgctaatcagacagtgtcaaaccgaagatgaaaaaaatcgtgtaaacgaatttactgatagaatactacaaaatacaaattcaaatagaaacttgaaaatcggtatgctattatcaatgctttacaattctgtcggttaccaatatctggaggatcattgccctcaaggtggcgaatattcggattcattgagaaatttgatcaatgaatgtgaagctattttgccatcttacgaaatcattgaacgctacaagaaccacttttatgagtacgtttatccaagtctacctttcatcgaattagaaatttttgaagaatcattaagtcaaacaatttttccggacccaaacaacccctccaaggtgcaaatacgtatgggtagcacacatttgagagctaaggtggaaaacttgagtcttctattggttatcttgaaactctcatacatgtcaataaggtttttagatcatagtacagcagactcgagtttttatctttcaaaggaaataattgataaatatccaataccgaacgattttattttattgagtcaaagatgtctagcatcggaaaattggtgtgcatgcgctaatgaaaacatcatatcatgtttactatatatctggtctttttttgctttttctcctgaagagggtgatttctttctcgagcatcccaccgatgttatcagtagtttgataatgatgctttccacctcgattggtctccacagagatccttcagatttccctcaattgatttccccgtccacctcagataaaagaaccttgaatcacagaagaatactctggttgagtatcgttaccgtttgttcgtttgaagcaagtctcaagggtagacattctgtctcaccgatatctttaatggccttattcctaaatattaaggatcctgattctctgacggtatatatgaaccgagttaggggcgatctaagcgatatcaataatcacaaacttttgagaattcatgaatttacatttaagagagcccagcttgcgttactcctgtcagacttagataacttgacgatgacatactatggtagtttccatttgcactcaattgaattcataagagaaaaaattgagatttttgtggaggaaaactttcccatagtaccattgaaaagtgtcgcacaggataagtcagaccttgatgacatgaatgtgatttcagaaatgaatatattatcttcagaaaattcttcttcatttcacaatcgaataatgaataaactattgatgttgagaacttcaatggccgtattcttgcattttgaaacactaattactaaggataaaagtatcttcccattctacaagaaatactttatggttagctgtatggatgcgttgtcactgataaattatttcaataagtttttcaacggagaatatcgacacgcaatatcttctttaaccagttttaatgttacaaaatttattcagttagcactatccagcacgatcttcagcctattagggattatactaagaataggtttagccatccatatgttatcttctgaagtacaaaagttatcgggaacgacagatccaagaataaaggagttaaataccaaagtcgaaaaatttagtaccctgcaaagagatctcgagtctgctttagaaggtatatattgctctgcttcggaacatttaagattcacatacttccccgtttttaagatgttggctttattcgatgtcattgtacaaagaatgagaaagggtgaattatggcacggcatatttacgatgattcaaatggaacaaatgcattctaggataatcaagacattaagcattaccttaggagtcaaactggacaaaaaggataggctattagaggaattgatggcatgcgatcacgttgcgaattttagcgttgaagatatagatgagctgaaccgcaatatcaaaaaagagattcaaatttcttcaggactgaagccgcctgtaaacacaattgacttaaccaacggcgaaccattcggcaatgctgttcctaccttcacaaagacatggagttcatccttagataatttagaaaaactatcgtcggccgctgcagttggtcagagcttggactacaacagtggtttacgtcagggtcctttggcgggtggtggttcaaaagagcaaacgccaatagccgggatgaataacttgaacaattcaatcaatgctacaccaattgtcgataactcatctggatcacaacttcctaatggtttcgatagaggccaagcgaataatactccttttccaggttattttggaggtttggatttatttgattatgactttttgtttggcaatgattttgcttaa

SEQ ID NO: 81677 - DNA, 444 bp, Saccharomyces pastorianus
atgggttggttttgggcagatcaaaaaactacgggcaaagatattggtggggcagcagtatcatccatgtcagggtgcccagtcatgcacgagtcgtcgtcgtcgtcgccaccatcctctgagtgccccgttatgcagggagataacgatagaataaacccgctgaacaatatgccggagttggcagcatccaaacagcctggccaaaagatggacttgcccgttgatcggaccatctccagcatccccaagagtccagacagtaacgagttctgggagtatccttctccacaacagatgtacaatgctatggttagaaagggcaagattggcggtagcggcgaagtcgccgaagatgcagtggagtccatggtgcaggtccacaactttctaaatgaagggtgctgcaggaagtgctcgaaggggaaaaaccgcacgggatcc

SEQ ID NO: 81678 - DNA, 1521 bp, Saccharomyces pastorianus
atgtctagattagaaagattgacctcattaaacgttgttgctggttctgacttgagaagaacctccatcattggtaccatcggtccaaagaccaacaacccagaaaccttggttgctttgagaaaggctggtttgaacattgtccgtatgaacttctctcacggttcttacgaataccacaagtctgtcattgacaacgccagaaagtccgaagaattgtacccaggtagaccattggccattgctttggacaccaagggtccagaaatcagaactggtaccaccaccaacgatgttgactacccaatcccaccaaaccacgaaatgatcttcaccactgatgacaagtacgctaaggcttgtgacgacaagatcatgtacgttgactacaagaacatcaccaaggtcatctccgctggtagaatcatctacgttgatgatggtgttttgtctttccaagttttggaagtcgttgacgacaagactttgaaggtcaaggctttgaacgccggtaagatctgttcccacaagggtgtcaacttaccaggtaccgatgtcgatttgccagctttgtctgaaaaggacaaggaagatttgagattcggtgtcaagaacggtgtccacatggtcttcgcttctttcatcagaaccgccaacgatgttttgaccatcagagaagtcttgggtgaacaaggtaaggacgtcaagatcattgtcaagattgaaaaccaacaaggtgttaacaacttcgacgaaatcttgaaggtcactgacggtgttatggttgccagaggtgacttgggtattgaaatcccagccccagaagtcttggctgtccaaaagaaattgattgctaagtctaacttggctggtaagccagttatctgtgctacccaaatgttggaatccatgacttacaacccaagaccaaccagagctgaagtttccgatgtcggtaacgctatcttggatggtgctgactgtgttatgttgtctggtgaaaccgccaagggtaactacccaatcaacgccgttaccactatggctgaaaccgctgtcattgctgaacaagctatcgcttacttgccaaactacgatgacatgagaaactgtactccaaagccaacctccaccaccgaaaccgtcgctgcctccgctgtcgctgctgttttcgaacaaaaggccaaggctatcattgtcttgtccacttccggtaccaccccaagattggtttccaagtacagaccaaactgtccaatcatcttggttaccagatgcccaagagctgctagattctctcacttgtacagaggtgtcttcccattcgttttcgaaaaggaacctgtctctgactggactgatgatgttgaagcccgtatcaacttcggtattgaaaaggctaaggaattcggtatcttgaagaagggtgacacttacgtttccatccaaggtttcaaggccggtgcttggtcactccaacactttgcaagtctctaccgtttaaaaaaagatcatgattga

SEQ ID NO: 81679 - DNA, 882 bp, Saccharomyces pastorianus
  modified_base (810)..(810): a, c, g, t, unknown, or other
atgtctactacagttgaaaaaatcaaagctatcgaagatgaaatggcccgtacccaaaagaacaaggccacatctttccatttgggtcaactgaaggccaagctggccaaactgagaagagaattgttgaccagtgcttcatccggcagcggtggtggtgctggtattggttttgatgtggctagaactggtgtggccagtgtggggtttgtcgggttcccgtcggtggggaaatctacattactgtccaagttgactggtactgagtctgaagcagctgagtacgagtttaccaccctggttaccgtccccggtgtcattcgttataaaggtgccaagatccaaatgttggatttacctggtattatcgatggtgctaaggatggtagaggtagaggtaagcaagttattgccgtggcaagaacctgtaacctgttatttatcatcctagatgtgaacaaacccttgcatcataagcaaatcattgagaaggaactggaaggtgtggggattcgtttgaataaaactccgccagatatcttgatcaaaaaaaaagagaaaggtggtatttccatcacaaacacagtcccattgacccatctggggaatgacgaaatcagagccgttatgagcgagtacagaataaatagcgctgagattgccttcaggtgtgatgccactgtggatgatttgattgatgttttggaagcttcgtcaagaagatacatgcctgccatctatgtgttaaacaagattgattctctgtcaatagaggaattggaattactttaccgaattcctaatgccgtngcctatttcgtctggttcaagattgcgaacttcggacgagcgtgttgcaagttcatgttgggaacagactaa

SEQ ID NO: 81680 - DNA, 831 bp, Saccharomyces pastorianus
atgttgcaagcccagcagcacccagcccatcgccattacaaagacaacgacaagtacggtcttaaatcaccttcccggtccttcgtgaaggacaagaaaaggttggttcaccggtttttgaaatccatggagccttcttcgtctgggcaatctaaggattcgtctacactggcgccggctttcgatccaatattgcccaatgttatatctaagccttccaagcgacccacacatcattcgcattcatcagacgggagttctagcacgcagacagatatatcgttacagagcttgctttaccatgatcttgaaagctcaccaaagaaacatgtttcgccctcaagaccgccctctgtagcttccgaatcctctcctgccgttgctaatcccattgggctttcgccaaaagacgcctgcaatgcatcgttttcgcagtcgtcctcatcttcgttgtcttcttcttcatcgtcttcatcatcgacgtcattctcacagtcagtggctgttgatcctcttgaacctcctggaaatatcacatatagtagttcgaatctttcgctaaattcagatgaattagactactatcagcgtcatatcggattgcagttacagcagacagaagctttactaaagcacagtttgaaagatgaggttctgaaagatgaaaatgaccttgttaaaaacattgcaaattttgaccagatcgtcaaagagctaagggacttaagatccaggaccattggatggaaagagcttgttgaagaggatcatttaatgaattcgaaccaggattttgacacgaaaaacccgaatcatttgacgcacgtttga

SEQ ID NO: 81681 - DNA, 414 bp, Saccharomyces pastorianus
atgcaaaatgctcaaataaagagctcttctaaagacagcgggatagatggtacagatcgcaatagcaaagatggtgtagaaaagagacccctggaagatgtaaagcaaatgattgacgctggaacaccagatgttggccacaaatctactgttgaaactaagccaaacgttggatggcaagcctctcacagtaatttcgctgcattacacgaaaaagagcagaaatatgaaatggagcaccatcatgctcgtcataaactgcatcgtcaagttattccggattacacgtctgcctcgaccgcaatgttcagcgattgtatgttcaacgcagcaccagataaagtacgaagtctcagtacgatgaagtcttctggactctcgccaaaacacccatttaacgtatgccacctttaa

SEQ ID NO: 81682 - DNA, 819 bp, Saccharomyces pastorianus
atggcaccaagtatagcaacggtaaagatagctagggacatggttttgccattacgtatatttgtcaatagaaagcagatccttcaaaccaatgataagactagcaataagtcgaatgccactatatttgaagcaccattattatcaaataactccataatctgcttaaaatcaccaaatacaagaatatatttatcgcaacaagataagaagaatctttgtgacgaggtcaaggaggacctgttattgattgtttacgaactagcgtccccggaaatcatcagttccgtactcagcaaaataagagttggtcattctactgatttccaaatcaacgttctgcccaaactttttgcaggtgccgatacggataatgcggtaacttctcacatccagtctgtgacaaggctggctaaattcaaatacaagttgcactacaaacataagtgggagctcgacatattcatcaacagcattaagaagatcgccaatttaaggcactacttgatgtttcaaacattaacattaaacggtttctcattaaatgcaggtcccaaaacgttattagctaggaaaatagaaaaacagccccaggtacctaatttgttaatagaaaatggggacgctgatgacctggatacaccggtggaagaggatataaaacctgtaatagaatttatgtacaagcctgttattaatttaggtgaaattattgatgtacatgtgttgcataggcctagaagacataaggtacgtacccagtcgaagcaaccccggaggaatgaaaaaccgataacaagtgatggcttaatattataa

SEQ ID NO: 81683 - DNA, 237 bp, Saccharomyces pastorianus
atgatactactcaaaagagaggtaagtacggtgaattacaagatgcttcggcgaacccctttaatgacaataatgtactgggaagtaacgactttgaaagtgcagaaccgttcattgaaaatccatttgctgatggtaatcaaaattcaaatagattcagttcttcgagagatgatatttcatttgatatatgaggcacagacacgaagagcagaagacaaatacaatataatataa

SEQ ID NO: 81684 - DNA, 342 bp, Saccharomyces pastorianus
atgcacctgccgcagtgcttgcgcactatccagttctccccgtctgttatctccacatcctaccagattcccgtcatttgtcagcatcacgctgtggttcccaccgcacgctatcttcctgactattgctccatcatctcctggcacagacctctgtggggtatccatatcctcatcgtgccccagtcccagttgcctttgcccattggacccaaacgcatacacacaactcatcgatacaagcctgttatagcctttaatgatcacatttcatcacttgcgctttggatctgcctgcattatcaaggctcaaacggctgcgttaccccgtcgccgcgatag

SEQ ID NO: 81685 - DNA, 108 bp, Saccharomyces pastorianus
atgttgctcagtgaactcgtagcaaccgcctcctctctgccatacacggccatcagcatccacaataactgtcgtgtcccagccgcacgccacatccaccacgggtga

SEQ ID NO: 81686 - DNA, 336 bp, Saccharomyces pastorianus
atggtatctagttttttcatggcttctaccctattagcaatatcatcatgttttaactcatccataagcagagccaagggatataatgactcgttagagtctgagtccttagagtttgacgttgttgatgttgttgatgttgttgctgccgagggcacggcacctgccgttgttgatcttgctccagacatatttcgctcctttctgaccactcaattattcttcgataatcagataccagttgttatagtcgtcgaaataagttccacgttagtattgttgctatctgccttccttcggacctgcaggcatgcaagcttgcactgccgtcgttta

SEQ ID NO: 81687 - DNA, 1686 bp, Saccharomyces pastorianus
atgtctggagcaagatcaacaacggcaggtgccgtgccctcggcagcaacaacatcaacaacatcaacaacgtcaaactctaaggactcagactctaacgagtcattatatcccttggctctgcttatggatgagttaaaacatgatgatattgctaatagggtagaagccatgaaaaaactagataccatcgcgttggcactcggtcccgaaagaacaagaaacgagttgattccctttttaacggaagttgcacaagatgatgaagatgaggtgtttgccgttttagccgaacagttaggaaaatttgtcccctacattggcggtcctcaatacgccacaatcctattaccagttttggaaattttggcatctgcagaagaaactttggttagagaaaaggccgtagattctctgaataacgtggcccaagaactttctcaagaacaattatttagtgacttcgtccctttaattgaacatttagctactgcagattggttttcttcaaaagtttctgcttgtggtcttttcaagtctgttattgttagaatcaaagatgattcattgagaaagaatatcctggctttatacttacaactcgctcaagatgatactccaatggtgaaaagggccgtcggtaaaaacctgcccatcttgatcgatctgttgactcaaaatttgggattatctacagacgaagattgggattacatttctaacattttccagaaaatcattaacgataatcaagattctgtcaagtttctggcagttgattgtttaatttccatcttgaaattttttaacgctaaaggtgatgagtctcacactcaagatttattgaactctgctgtcaaattaattggtgacgaagcgtggagggtacgttacatggctgccgatagattttcagatttagcctcgcaattcagttccaaccaagcatatatcgatgaattagtacaaccatttttgaacctttgtgaggacaacgagggagatgttagggaagctgtggctaaacaagtttctgggtttgccaagttcctaaatgatccttcaattatattgaataagatcttacctgctgtgcagaatttgagtatggacgaaagtgaaacagtgagatctgctttggcttctaagattacaaatattgtattactgttgaataaagatcaagtcattaacaattttcttccgattttactgaatatgctaagagatgagttccctgacgttcgtttaaatatcattgccagcttgaaggttgtcaatgacgtaataggaattgagctgctatcagactctttgttacctgccataacagaattagccaaggacgtgaattggagagttagaatggctataattgagtacatacctatcttggcagaacaattaggtatgcaattttttgaccaacagttaagcgatttatgtctttcatggttgtgggatactgtttattctatcagagaagccgcagtgaataatttaaaaaggttaacggaaatatttggctctgattggtgtcgtgatgaaattatttcaagactgctcaaatttgatctacaattactggaaaattttgtctcgaggttcacaatactctctgctctaaccactttgtgccacccgggtaacaggtatgccctaagaagcaatgaaatgaatgcttag

SEQ ID NO: 81688 - DNA, 330 bp, Saccharomyces pastorianus
atgcaaaagatcagtaaatactcatctatggcaattctgaggaaaagaccgctggtaaagactgaaactgggccagaatcagaactcctaccggagaaaaggaccaaaatcaaacaagaagaggttgtccctcaacccgtggatatcgactgggttaaatcgctgccaaataagcagtacttcgaatggattgtggttagaaacggcaatgtgcccaacaggtgggccacaccattggacccctcgatccttgtcactccggcctcgacgaaagtcccttacaagtttcaagaaacatacgctagaatgcgagtactgagatccctatag

SEQ ID NO: 81689 - DNA, 714 bp, Saccharomyces pastorianus
atgccctcccccatcgaaatggaggaacagaggatgactgcgctgaaggaaatcaccgacatcgagtacaagttcgcgcaattgcgccaaaaactatatgacaatcaattggtgcggttgcaaacggagctgcagatgtgtctggaagggtcacacccggaattgcaggtctaccactcgaagattgccgcgatccgtgactacaagctacaccgagcgtaccagcgacagaagtacgagctttcatgcatcaacacagaaacaatcgctaccaggacattcattcaccaggacttccacaagaaggtcaccgacctgcgagccaggctgctgaacagaaccacgcagacctggtacgatatcaacaaggagcgccgcgatatggatatagtcatcccagatgtcaattaccacgtccccatcaaacttgataacaagacgctgagctgtatcacgggctacgccagcgcagcacagctgcgctatcccggcgagcccgtggcagaggacctcgcttgtgaaagcatcgagtaccgctacagagccaacccggtggacaaactcgaagtcattgtggaccgaatgaggttcaataacgagattagcgacctcgaaggcctgcgcaaatatttccactccttcccgggtgctccggagttgaacccgcttagagactccgaaatcaacgacgacttccaccagtgggcccagtga

SEQ ID NO: 81690 - DNA, 333 bp, Saccharomyces pastorianus
atgagtcagcaaacaccacaggaaagtgaacagaccacagcgaaagaacaggaccttgatcaagagagcgtgttgagcaacattgacttcaatacggatttgaatcacaatttgaatttatcggaatactgtatatccagtgacgcaggaacagagaagatggatagcgacgaggagaagtcgttggccaatctgccggagttgaagtacgctcccaagctatccagcctggtgaagcaagagacgcccaccgagagcttgaaaagatcacacgaagatgagaaagaggcgatagatgaggccaagaagatgaaagtgccgggagaagaacga

SEQ ID NO: 81691 - DNA, 2394 bp, Saccharomyces pastorianus
atggaagagaaagaggatgctgtaaagaatgaagttcttcttaatcgattttatccacttcaaaatcagacttatgacattgcagataagtctggccttaaaggaatttcaactatggatgttgtaaatcgaattaccggaaaagaatttcagcgagcttttaccaaatcaagcgaatattatttagaaagtgtggataagcaaaaagaaaatacaggggggtataggctttttcgcatatacgattttgagggaaagaagaagttttttaggctgttcacagctcagaactttcaaaagttaacaaatgcggaagacgaaatatccgttccaaaagggtttgatgagctaggcaaatctcataccgatttgaaaactctcaacgaggataatttcgtcgcactcaacaacactgttagatttacaacggacagcgatggacaggatatattcttctggcacggtgaattaaaaattcccccaaactcaaaaaaaactccgaataaaaacaaacggaagaggcaggttaaaaacagtactaatgcttctgttgcaggaaacatttcgaatcccaaaaggattaagctagagcagcatgtcagcactgcacaggagccgaaatctgctgaagatagtccaagttcaaacggaggcactgttgtcaaagacaaggtggttaacttcggcggcttttctgcccgctctttgcgttcactacagagacagagagccattttgaaagttatgaatacgattggtggggtagcatacctgagagaacaattttacgaaagcgtttctaaatatatgggctccacaacgacattggataaaaagactgtccgtggtgatgttgatttgatggtagaaagcgaaaaattaggagccagaacagagcctgtatcaggaagaaaaattatttttttgcccactgttggagaggacgctatccaaaggtacatcctgaaagaaaaagatagtaaaaaagcaacctttactgatgttatacatgatacggaaatatacttctttgaccaaacggaaaaaaataggtttcacagaggaaagaaatcagttgaaagaattcgtaagtttcagaaccgccaaaagaatgctaagatcaaagcttcagatgacgctatctctaagaagagtacgtcggtcaacgtatcagatggaaagatcaaaaggagagacaaaaaagtgtctgctggtaggacaacggtggtcgtggaaaatactaaagaaaacaaaactgtctatcatgcaggcactaaagatggtgttcaggctttaatcagagctgttgtagttaccaaaagtattaaaaatgaaataatgtgggacaaaataacaaaattatttcctaataattctttagataacctaaaaaagaaatggacggcacggcgagtaagaatgggtcatagtggttggagggcatatgtcgataagtggaaaaaaatgctcgttctagccattaaaagtgaaaagatttcactgagggatgttgaagaactagatcttatcaaattgcttgatatttggacctcttttgatgaaaaggaaataaaaaggccgctctttctttataagaactacgaagagaatagaaaaaaatttactctggtacgtgatgacacacttacacattctggcaacgatctggccatgtcttctatgattcaaagagagatctcttctttaaaaaaaacttacactagaaagatttccgcttctactaaggacttatcgaagagtcaaagcgacgattatattcgcacagtgatccggtccatattaatagaaagtccttcgaccactagaaatgaaatagaggcgttgaagaacgttggaaacgaatcaatagataacgtcatcatggatatggctaaggaaaagcaaatttatctccatggctcaaaacttgaatgtactgatactttaccagacattttggaaaatagaggaaattataaagattttggtgtagcttttcagtatagatgtaaggttaatgaattattggaggccggaaacgctattgttatcaatcaagagccgtccgatatatcctcttgggttttaattgatttgatttcgggagagctattgaatatggatgtaattccaatggtgagaaatgttcgacctttaacgtatacttcaaggagatttgaaatacgaacattaactccccctctgattatatatgccaattctcagacaaaattgaatacagcaaggaagtctgctgtcaaagttccactgggcaaaccattttctcgtttatgggtgaatggatctggttccattaggccaaacatatggaagcaggtagttactatggtcgttaacgaaataatatttcatccagggaataacattgagtag

SEQ ID NO: 81692 - DNA, 75 bp, Saccharomyces pastorianus
atgagcagtgttcaactttcgaagggcgattttcatagcatcttcaccaataagcaaaggtacgatatcccggtc

SEQ ID NO: 81693 - DNA, 240 bp, Saccharomyces pastorianus
atggctgaagaaggtggtacgcgcatagctattaacatatatgcaaaaagaacggcaaaaggcgaggaggtttttatgccaccgctagtatttgacatagatcacatcaaacttctaaggaaatggggtatttgtggtgtgttatctggaactttgcctactgcagcacagcaaaatgtatttttgtcggtacctttgaggcttatgttagaagatgtgctgtggctgcatttgaacaat

SEQ ID NO: 81694 - DNA, 243 bp, Saccharomyces pastorianus
atgtcaattacgaagactgaactggacggtatattgccattggtggctagaggtaaagttagagacatatatgaggtagacgctggtacgttgctgtttgtcgctacggatcgtatctctgcatatgacgttattatggaaaacagcattcctgaaaaggggatcctattgaccaaactgtcagagttctggttcaagttcctgtcgacctgcaggcatgcaagcttgcactgccgtcgttta

SEQ ID NO: 81695 - DNA, 333 bp, Saccharomyces pastorianus
atgtttattaatggctttgtaaactaccccgtaagaacccctcccaatgacctgcttcaagtggtattgcacggatttctcagatgccctctggatgggagtcaagttgactctatcggtatcggccatactgttcatggtatagtcttaccaggaaaatgggtagtgcttatgtgtgttttgtccttcctcgagcctccaagtagaagatataccttttgtgaggcagatctcccgtatacaaaaataacagcaagaaaagcggaaagaccatcgcaaggtggaaaggattataatggcacagcaaagaccgcacagaggactacagtatag

SEQ ID NO: 81696 - DNA, 459 bp, Saccharomyces pastorianus
atgcaaacatcttcagaaaataccaacgccaagtcggattctctcgacgaacccagtgcatatttaatcgaggaaaatgtggctcttcctaaggacatattccattcgtacttgagttattggatatatgaagttactcgtcataaagcggcagtaattttgctcgtacttattgtgacttcaattttattattagtgtttttttataatacggaattttgcgttgcctttgagatactattgttttccttttgctttgcaggaacatgcatggttgtaattgcatttagtgaaccgatcggtgatcgggaatttaaagttaagcttctgatggaaattatcacacgtaaaccggcggtaaaggggaaagaatggaggacaattacatataatatgaatcggtacatatttgatcatgggctatgggacctgcagcatgcagctgcatgccgtcgttta

SEQ ID NO: 81697 - DNA, 735 bp, Saccharomyces pastorianus
atgtcgcctcaataccatttttattttgtatcattccggaacttagtattgaatgaaaaatgcctccgaagtaaaaagcaggtgatgaaaagtttcaattggtataagacagatcgctattttgatccgcataacatccttcaacaccatagcagagctatagagaagacaagatataaactgggcatgcaaacatcttcagaaagtaccgacgccaagtcggattttctcgacgaacccagtgcatatttaattgagaaaaatgtggctcttcccaaggacatattcggttcgtacttaagttattggatatatgaagttactcgtcataaagcggcagtaattttgctcgtacttattgtgacttcaattttattattagtgtttttttataatacggaattttgcgttgcctttgagatactattgttttccttttgctttccaggaacatgcatggttgtaattgcatttagtgaaccgatcggtgatcgggaatttaaagttaagcttctgatggaaattatcacacgtaaaccggcggtaaaggggaaagaatggaggacaattacatacaagatgaaccagtatttatttgatcatgggctatgggatactccctactacttttaccgtgatgaagattgccaccgttattttctaagtcttattaagggaagaactttcaagaagcaaaaggaatcgtcagccagcaatgtgatggacgcacaatga

SEQ ID NO: 81698 - DNA, 153 bp, Saccharomyces pastorianus
atgcaatcgcaaccacaaaataaaaatattagactggatgtgttgagtggagatggtgccaatttagttgagggaaatgtggtccttcccaaagacatgttcaattcgtacttaagttattcactttacgtgttacgagggggctcattgtaa

SEQ ID NO: 81699 - DNA, 561 bp, Saccharomyces pastorianus
atgcagacccctccagaaagtaccgacgtaaagttagatacacttaacgaacctagtgcacatttaattgagaaaaatgtggctcttcctaaggacatattccgttcgtacttgagttattggatctatgaaatcgctcgctatacaccagtcatgattttgtccctggtaataggggttttggttttattaattatattttttaatgacaacgaagcttgtgttttcaattctgcatactacgcttatctttctcttgtaggtttgttaataatattaggtgatggtaatccaaagctagtcagtcgtcgaaattttaggaccgagcttttagtggatgtcatcacacgtaaaccggcagtagaagggaaagaatggaggatcatcacatacaacatgaaccaatatttgtttaatcatgggcaatggcatactccgtattacttttacagcgatgaggattgctaccgttattttctacgccttgttgagggagtaacccccaagaagcaaacagccacgtcaattggcaattctccggtcaccgctaaaactgaagat

SEQ ID NO: 81700 - DNA, 126 bp, Saccharomyces pastorianus
atgtgccatatgtctcatgcctctaggaacgtcaaacttaccttttgtaataaatgggacgcaatcacgcgatccaatgcagacagaagactctcaagatggtgcaaatcgcgaactcgtaagtag

SEQ ID NO: 81701 - DNA, 3249 bp, Saccharomyces pastorianus
atgcagaagactaatgcgctacacatcatactttacggcgatgatatatttcaagatagcataagctctatggttattctgatgttactggtagtcgtaagtgcagtatcacgaacgtatagaagaataaacatgggtctcatcaaaaaagtgacccattggtcatatgataatttgattgattatctttcagtgaaccctacaagagatgaagtgacccactataaagtggatccggaaaatgaatctgatgaatcaattattaaattacacactgtgaaagacttcggcagtatcacctgcttagactattcagaatcagaaattggtatgattggagttggtgaaaagaatggatatttaaggatttttaatatctctggacaaaattcctcatcgccagcgagccatgcgccagtgggcttaaatgccaataacgagacttctatgacaaatgccagcggtggtaaggcagctcaggcggaaaatatagttggatctgtctcaaatttaaaggatacccaagggtaccctgtttcagaaaccaattatgatatacgtgtacgagcaaagaagcagcggtgtataaactctctgggaataaatacgaatggtcttatagcaatgggtcttgacagaaataagcatgattcatctttacaaatttgggacatgaattatcatgatgattcgcatgaaactatcaacccaatgtttagttattgcacaaatgaaagcatagtatccctaaagttcctcaacgataccagtgtattggctgcaagtacgaaatttttgaaagaaattgacgtcagatcccccaacccaatttatcaacatccgacacgattgacgtatgatatcaaactgaacccgtttaacgattggcaatttagtacttatggggatgatgggaccttagctatttgggataggagaaaattatctgaccaagcttcacttggtgatttaaatgtagcttcccctttattaacttttgaaaaattggttggatccggtgcagcgtcaaggaaatacatgaactcttgctttaggtggtcatgtgtgaggaacaatgaatttgccaccttacatagaggtgataccatcaaaagatggaggttaggctattactgcgatagcaatcgtgatattgcggcagatgacgataacgagatgaatattgagaatttgtttgtttcttccgtgcatgacacaaatacgatgtacgatagagttgctacatttgattatattccaagaagtaataatggaacaagtctaatctgtatgagacaatcgggaacaatatacagaatgccaatttcagaggtatgctccaaggctatactcaataataggaactctctcttattgtcaaattttgaaaatactgagatagatgaaattagagtcaacaatgagcatgaaaagtccaacttagagaatgtaaaaacagtcctaaagaatctatcgtttgaggatttagatgttagcgaagattactttccgtctggacatgatgaacctaataatgaaattgagtactccgagttgagtgaagaggaaaatgacgggagtaatgatgttcttgacagtaagcgtggatttgaactgttctggaagccagaaaaacttctggaaaaagatataagtgtaataatgaggacgcgagcttcattgggatatggtttggatccaatgaacacggtagagatgattgattcttctaaaaatctacaaaacaatgcttatataaggaacacatggaggtggatcgcgattgcaaaggcttctgttgacgatggtacgatggtttctggtgatcttgacttaggttacgaaggtgtgataggtatttggaatggtataaacggaatatcgaaccaagacagatatagacaagagacaattctttctgataaacaactaaataaagaaatggaaaaaatcatcaaactaagaaggaaaaatagggatcggaacagtcctattgccaatgccgctggttcaccaaagtacgttcagagaagactctgtttaattatctcaggatgggacctttccagatctgattatgaagacaagtacaacataattatgaaaaacggccattatgaaaaagctgccgcttgggcggtattttttggtaatatcccaaaggctgtagaaatattgggatctgcaaaaaaggaaagattgagactaattgccaccgctattgcaggttacttggcgtataaggatctgccaggtaacaatgcatggaggcagcaatgcagaaaaatgtcctccgaattagatgatccttacttgagagttattttcgcctttatcgcagacaatgattggtgggatattctttatgaacctgccatatctttgagagaacgattaggggtagctctaaggtttttgaatgatacagacctaaccactttcttagatagaacttcatctacagttattgaaaacggcgaattagaaggtttaattctcaccggaataacacctaatggtatcgatctactgcaatcatacgttaataaaaccagcgatgttcagagtgccgcactgatatcaattttcggctcccctagatatttccgcgaccaacgagtagatgaatggatacaaacttatagagatatgcttaaatcgtgggaattattctccatgcgagccaggttcgatgttttaagatcaaaattatcgagaactaaaactggtgtattaactgcagacataaagccccggcaaatatatatccaatgtcaaaactgtaaacagaacatcaacactccgcgcacatcctcaccttctagcgccgtctctactagtgctggaaattacaaaaatggtgaagcctatagaagaaataacgctgactacaagaaatttaatactggaagttctgaagcacaagcagctgatgaaaagccaagacataagtattgttgcccacactgtgggtcttcatttccaagatgtgccatatgtctcatgcctctaggaacgtcaaacttaccttttgtaataaatgggacgcaatcacgcgatccaatgcagacagaagactctcaagatggtgcaaatcgcgaactcgtaagtagaaaactgaagttgaacgagtggttcagcttctgtttgagttgcaaccatggtatgcatgccggtcacgctgaagaatggtttgacagacataatgtttgtcccactccaggttgcacctgccagtgtaataagtag

SEQ ID NO: 81702 - DNA, 303 bp, Saccharomyces pastorianus
atgttgttcaaaccaaaaacacgagcaataccatcaccgactgcaagaactctaccagtttcgttcaaattggcctcgtcggacacacccttaattctttcctctaagatggaggaaacttctgtgggttgtgccttggtggaagccaatcttctggtggaagccaaagcagcagcggcaggtcttgcggccttggtagagttaattagagttctcgatagagaacgaatagcagcagtacgagccaacattattatatgtgcgtgtttttttttatttattttgttactgttcttgcgatag

SEQ ID NO: 81703 - DNA, 261 bp, Saccharomyces pastorianus
atgtcaaccctctgcagctccataggttggcggctcttggtcgcactaatcaactccgctggcgtttgcggatcattcaatgatagaacaccggcatcatcgggccacgcctttacaaacgcaccaactcctaacgtaaaacctgccgtaggtaaaattactgccctgttgactaatttaaatagaaatggaatagttctggacatattggaactcaccctcgatctatcctgtcatttggtcattgtctataaaaaataa

SEQ ID NO: 81704 - DNA, 405 bp, Saccharomyces pastorianus
atgatattattgaaatctgagcatggaggaaaaagaaaagagatgcgacaagatgatttaatgggtccaaatcattttagcctacgtatcatgtataaaataatcatatacacctacccagtatccttatatgcagtaaaagagctcaacctgagcaaaacgttttccatcagtgcacttggaattttgaatagtaattccaaccagagtccagcgaagaagcaaaccttcttttctgcttgcgttgctccagtcatatggctctttctttatttctatttgtattctcgatctaacctctcatctttaggcagcagcggcaataggctccgggggttgtatgcctgcctcttcgtagtactcagccaagtcttctttatcgaaaactacatcgatcatcagtga

SEQ ID NO: 81705 - DNA, 3474 bp, Saccharomyces pastorianus
atggctctgcgtatacgcattctcgtcatggtgaaggataatcgagattctgaccaagaccaagattttagttctgctcacatgaaaagacaaccggagcagcaacagttgcaacagcaccagttcccaagtaagaaacaacgaatatctcaccatgatgacagtcatcaaatcaaccatagaccagttacctcatgtacacattgtagacagcacaaaatcaaatgcgatgctagtcaaaatttccctcatccttgctccagatgcgaaaaaattggtctccactgtgaaattaatcctcaattcaggcctaagaagggctcacagttgcaactactgagacaagatgtggatgaaatcaaatctaaactcgatactcttctagcgaatgacagcgttttcgttcatcttttacaacagattcccatgggcaatagccttttgaataagctcaatctgcatccaactccaactccgggtactattatccctaacccagattcttctccttcctcaggttctccaacttcttccgcggctcaacgagattctaaggtttcagttcaaacttatttgtccagggaaccccaactcttacaagcaaatcagggcagcaatacgaataaatttaaagcaaataatgaagcatcttctcacatgacgttgcgcgcatcttctctagcgcaagattcgaaaggcttggttgcaacagagccaaataagctgcccccgctgctaaatgactcagcattgcctaataattcaaaagaatctttacctcctgctttgcaaatggctttttataagaataactctgcaggtaacactccgaacggccccttctctccaattcaaaaaacatattcccctcatactacgtcgaccaccgttacaacgacaacaaatcaaccaccgtttgcagcaacaagccacgtagcaacaaataacaatgcaaataggacgaagacgccggtagtagccaccaccacgactatgccattattgccttcgccgcatgcaaatgtagatgagtttgtactgggcgatattagtatttccattgaaaaagcgaatagattacaccatattttcgtgactaggtatctgccgtattttcctattatgtattccaataacgccaccgaattatactcccaatctcagttgcttttctggaccgtgatgttgacggcatgtctgtctgatcctgaaccgacgatgtattgcaagctaagctctttgatcaagcaacttgccatagagacctgctggataagaacacctagatccacacatatttcgcaagctttgttaatattgtgcatttggcctttgcctaaccaaaaagtcctagatgattgttcttaccgttttgtaggattagcaaagtcactgtcttatcaattaggtttgcacagaggtgaattcatttctgaattcacaagaactcaaacatcaatgccaaatgcagaaaagtggagaactaggacttggctgggaatattttttgccgaactttgttgggcgagtatccttggtttgccaccaacttcacagacagactatttattagaaaaagccttatcctgtggtgacgaagaatcagaagaagataacaatgacagtattgacaataacaacaatgataaaaggaacaagaaagacgagccgcacgttgaaagtaaatacaaactaccgggcagttttagaagattgctcagcctggcgaatttccaagcaaaattgtctcatatcattggttcttccacttccagtcctgatggtttattggaaccaaagtatcgtgctgagacactgtccatcttgggaaaagagttagatttattagcaaaaactttaaatttccagagtgacgatactgtcaacatttattttctttatgttaaattaactgtctgttgttttgcattcctacccgaaacacctcctaccgatcaaattccatatgtcacagaggcctatctaacagctactaaaattgtcactctattgaataatcttttagaaacacaccaattaattgaactgcctatttatattagacaagctgctacattttctgcactgattctctttaaattgcagttgactcctttacttcctgacaaatattttgattcagcaaggcaatccgtggtcactatccatagactttatagaaatcaattaactgcgtgggccactagtgttgagaatgatatttcgagaactgcaagtatgttagaaaaactgaacttcgtactgatcatgcatccagaagtttttgtggaagaagacggtattatttctaggatgagatcacatttaacagggtctttattctatgatttggtttggtgtgttcacgaggcgagaagaagggaaatggatcccgaatataacaagcaagccttagagaaagccgctaagaaaaggaaattttcctcaaatggtatctacaatggcacttcgtctacgggtggcataacggacagaaaactatatccattgccactatataaccatatctccagggatgactttgaaactgtgacaaaaacaacaccaagtggaaccactgttaccactttagttcctactaagaatgccttgaagcaggcagaaaagctagccaagacaaataacggagattctgacggttctataatggagattaacgggatacctctttccatgctcggggaaacaggcagcgtaaaatttcaaagtttattcgctaatacctcgaatagtaacgattataataataataggacgttattggatgcgtctaatggcatgtcaattccctctaattcaatttatccagtggcttctgtccccgcttcgaataacaatccacaaagtactaaggtagactattatagtaacggacctagtgtaattcctgatctctccatgaaaagatcagtaagcactcccgttaatcattttcctgcgtccgttccagggttaaggaaccaccccgttggcaacttatctaataatgttacattgggaataggccaccctattccaagggagcacagtaatttacaaaatgtcaccatgaactataataatcaattcagcaacgccaacgcgattggaagatcacaaagtagtatgtcccattcacgtacaccgattgcttcgaagtcaaataatatgacagatttgcattccgtcgtttccgaccccggctcctctaaaagcacggcatatccacctctgagcttgttttccaaaagtaatgatatcaatagcaacaaaacgaaccaacgattttctacgggcactaacactgtaacttcttctaacttccaaaccatcgataatgaaaacaacgtgaaaactcctggaaacaaactaacggatttttttcagcaacaaagtgcaggctggattgaaggcaactctagtaatgatgacttttttggttggttcgatatgaacatggaacaaggtttttaa

SEQ ID NO: 81706 - DNA, 231 bp, Saccharomyces pastorianus
atggttgatttgatgactgtcatcatggtgagatattcgttgtttcttacttgggaactggtgctgttgcaactgttgctgctccggttgtcttttcatgtgagcagaactaaaatcttggtcttggtcagaatctcgattatccttcaccatgacgagaatgcgtatacgcagagccatataatctgtatacggacctttgacagtaaggtttctgcggggatcctctag

SEQ ID NO: 81707 - DNA, 915 bp, Saccharomyces pastorianus
atgtggggcatcttattgaaatcctcgaacaaaagttgttctaggctctggaaaccaattttgacacaatattatagcatgacatcaactgccacggattctccgctgaaatactatgatatagggttaaatctgacagatcctatgtttcacggtatttacaatggtaagcagtaccatccagcagattatgtaaaattattagagcgtgctgctcagaggcacgtgaaaaatgcccttgttacaggatcatccatagcggagtctcaaagtgccattgagttggtaagcagcgtcaaagatcttagcccattaaagctgtatcacacaataggtgttcacccatgttgcgttaacgagtttgcggatgctagtcaaggggacaaggctagcgcttctattgataacccttccatggatgaagcatataatgagtctctatatgctaaagttattagtaatccatcttttgcacagggtaaactgaaagagctttatgatttgatgaatcagcaagcaaaacctcatgatacaagtttcaggtcaattggtgagatcgggttggactacgacagatttcactatagttctaaagagatgcaaaaggttttttttgaagagcaactgaaaataagttgtttgaacgataaactcagcagctatccattgtttctgcatatgagaagcgcatgtgacgattttgttcaaatattggaaagatttgttgtcgggttcactgatgagaaggatacctttcagctacaaaagttaggtgcatcgtcgtctagcggattttacaaatttcatccagatagaaaactagtggtccattcattcactggttctgcgatagatttgcagaaattactgaacttatcacccaacatcttcataggagtaaacggttgctcgtga

SEQ ID NO: 81708 - DNA, 465 bp, Saccharomyces pastorianus
atggcatctattacttttagaactccattatcctctcaggaacaagccttttataatcagaaatttcaccaattggatacggaagatctcggggtggtcactggcgaggcagtcagaccgctcttcgcgtcttctggtcttccagggcaattactatcgcaagtgtgggctaccgtcgatatagacaataaagggtttttgaacttgaacgagttttcggctgctttgagaatgatcgctcaattgcaaaatgctcctaaccaaccaatttccgctgccctatatgagagcacacctactcaactggcttctttttctataaatcagaacccagctcctatgcaaagcggtagtgcaaccggcaatacaaacaacactgatattcctgccttatcctcaaatgatattgctaaattttcacaactgtttgatagacagcaaggtgctcaaactgttgctgggtga

SEQ ID NO: 81709 - DNA, 210 bp, Saccharomyces pastorianus
atggtcagcttgcacggaagctttaagggtttcccttgtttcggcattagaagaggcatttcgcacgttttaccgggtcagaaacttcgaggaagctgtgacaattggaaaaaaaaggcaaaactaaatgcaatgtatccggttgcccatgcattatttgtgatgttttcggatgtagttcgctgcgctccgcggcgatatatcctctag

SEQ ID NO: 81710 - DNA, 483 bp, Saccharomyces pastorianus
atgttaacgaattctgctcaccctgctattgaagatcaatacgcgttggccagtacggcccgctctaaattggcgagatgtgtaagtgctactacaagaaataaagattataatttaagggtgttagtgggccacgctaacctgctagataaaataaccgcaaacgtggaagcgcacaatgctgccgtcgacgccctttccacagacctgttcgataaaggtaacgataacctgtctattgagcatatcgaactgtctaatgctaggagagacgccggcgttaacgaggagcgcgccgacaagacagaccatggcaactactacgatttctactctagtgacgaagaccgtgatgttgacactctatcttccaccgacagtgaagacgatgacgattatgaggagtacgacttcgactgcgacagctccttcggcgagcacaacaagaaaatcgacacgtacttcagttccgggatcctctag

SEQ ID NO: 81711 - DNA, 1803 bp, Saccharomyces pastorianus
atgccggtatctgattctggattcgataattcttcaaaaacaatgaaggacgacactataccgacggaggattacgaagaaatcacgaaagagtccgagatgggtgatgcgactaaaattacttctaaggttgatgctaatgtcattgaaaaaaaagataccgattcagaaaacaatataaccattgctcaggatgacggaaaggtgtcttggctgcaaagagttgtcgagttttttgaagttaagaatgactctaccgatttggccgatcataagcccgaaaatccaattaggacatttaaagatttacaggagtccctccgttcgacgtacttgtacaacacagatctgcggcccgtggaggcaaaaagaagaacgtggacatggaagcagtacattttcttttggatttctgggtcctttaacgtcaatacatggcaaatctcagccactgggctacagttagggcttaactggtggcagacttggatctgtatttgggttggatacacgtttgtcgcatttttcttgatactgggttccaaagtggggaacaattaccatatctctttccccatttcctcaagagtatcatttggtatctacttctccatctggattgtcatcaaccgtgtcgtcatggcatgtgtctggaattctactttggcttatatcggtagtcaatgtgttcagttgatgctaaaggctatcttcggtactaatttgaatactagaatcaaagacaccataaagaaccccaatttgacgaacttcgagttcatgtgcttcatggtcttctgggtcgcatgtttaccgttcctatggtttccacctgacaaattgcgtcatatatttgcactcaaatccgccatcactccatttgcggccttcggttttttgatttggactctttgtaaggccaaaggtcatttggcattgggttccctaaatgacaatggtggcgcaatcagaaagacggttttagcatggtctgtcattagagctattatgagtgctctggataacttctctactttaatcctaaacgctcctgacttcactagattcggtaagacctacaagtcatctgtttactcgcaattgattgcgctacccgtctgctatgccattatttccttaatcggaatattgtctgtctccgcagcttatacattgtacggcgtaaattattggagtcccctagacattctgaacaggtacttggataactatacttcggggaacagagccggtgtattcttaatatctttcatttttgcgtttgaccagctgggtgccaaattgtctggtaactcgatccctgcaggtaccgatctgactgcattattgcctaaattcatcaatatcagacgcggttcttatatttgtgctctaatatcgttggcgatttgcccctgggatttactatcatcatcgtcaaagtttactacggcactagcggcatatgcagttttcttaagtgctattgcgggtgtaatatcagccgattacttcattgtcagaaaaggttacgttaatattttccattgctacaccgacaagccaggatcgtactacatgtacaataaatatggtacgaactggagggcggtggtagcttatatatttggtattgctcctaattttgcaggctttttaggttcagtgggagtttctgtgcctattggcgctatgaaagtttactacctaaactatttcgttggttatctcattgcagcattgagttactgcatgttagtgtattttacccaattaagggtattccaggcgatgccaagataa

SEQ ID NO: 81712 - DNA, 315 bp, Saccharomyces pastorianus
atggccactattgcatcagaatactcttcggaggcgtcaaatacacccattgaacatcaattcaatccttacggtgataatggtggtacaatcctgggcattgcaggtgaagatttcgcagtgttagcaggcgatacaagaaatatcaccgattactcaattaattctcgttatgaacccaaggtttttgattgtggtgataacatagtcatgtcggcgaatggatttgcagcagacggcgacgctttagtaaaaagattcaaaaatagtgtaaaatggtaccatttcgacacaacgacaaaaaatatctataac

SEQ ID NO: 81713 - DNA, 1194 bp, Saccharomyces pastorianus
atgtcacagttcttcgaagctgctactcccgttgcaattcccacaaacaataccaacggcggctccagtgatgccggcagcgccgccactggcggcgcccccgttgttggcaccaccgctcaacccaccatcaatcacaggcttttgctgtcattgaaagaggctgccaagatcattggcactaagggctccaccatctcacgcataagagctgcaaacgccgtcaagatcggtatttctgaaaaggtgaccggttgctctgacaggatcctgtcctgtgctgggaacgtaatcaatgtggccaatgccattggtgatattgttgacgtgcttaacaaacggaatcccgaaaatgaggacgcagctgagggcgaagcggaagagcactactacttccactttttgaaccatattttaccagctccctcaaaggacgagatcagagatctgcagcaactggaggacatcggttatgtgaggctcattgtggccaattcccatatctcatcgattatcgggaaagcaggcgccaccatcaagtccctgatcaataagcacggcgttaagatcgtggcttccaaggacttcttacctgctagcgacgagagaattatcgagatccaggggttcccaggatccatcaccaatgtacttatcgaaattagcgagatcatcttgagtgacgttgacgtcagattcagcacagaaagatcttatttccctcatctgaaaaagtcctccggtgagccaacttccccttctacctcatctaacactaggatcgaattgaagattccagaactgtatgtaggcgccattattggccgtggaatgaacagaattaagaatttgaaaactttcacaaaaaccaatattgtcgtagaaaggaaggatgacgatgataaagacgaaaattttagaaaattcataatcacaagtaaatttcctaagaatgtcaaacttgctgagtccatgcttttgaagaacctgaatactgaaattgagaaacgtgaaaactacaagagaaaattggaagctgccgaaggagatgccactgttgttactgaacgctctgattctgcttctttcttggaagagaaggagaactccaagaatctgattacgagaggacgtcgtataatactgtggtcccgtccaacgacaaaagttcctcacgatagttgtccacagtaa

SEQ ID NO: 81714 - DNA, 861 bp, Saccharomyces pastorianus
atgctaagaacaagaaccacaaagacccttagcacagtggcgaggaccacaagagctatccaatattaccgatctatcgctaagactgctgcagtttctcaaagaaggttcgcatcgaccttgaccgtgcgtgacgtagagaatatcaaacctagccatattattaagagtccaacatggcaagagttccagcatcaattgaaggatccaaggtacatggaacactttgcacaacttgatgagcagtttgctcggcatttcatggctacaaacagcggcaaaagtgttctggcgaaagatgatagtacatctcagaaaaaggatgaagatgtcaagatagtacctgatgaaaaagatacagacaatgatgttgagcccacgcgagatgatgaaattgttaataaggaccaagaaggtgaagcttcgaaaaactccagaagctccgcttctggaggtggacagtcatcatccagtcgatcggattctggagatggaagttcgaaacaaaagcctccaaaggatgtaccagaagtatacccgcaaatgctagcattaccaatagccagacggcccttatttccagggttctacaaggcggttgtgatatcggacgaaagagttatgaaggcaatcaaggaaatgttagaccgccagcaaccctacattggcgctttcatgttgaagaactcggaagaagatactgatgtaatcacagataaaaatgatgtatacgatgttggtgttctggctcaaataactagcgctttcccgagtaaagacgaaaagacgggcactgaaacaatgactgctcttttatatcctcacaggagaataaaattgatgacttattccaccaaacga

SEQ ID NO: 81715 - DNA, 261 bp, Saccharomyces pastorianus
atgcggagccgcaacaaagatcaccggtccctgttgcggtaccttgaaactgccccggcctctgatttctctaaagaagcagtggaagatgttgtacaacagccatgtggcgatggagtaaagtatcttcttggtagcgctaggctcttggtagatgtatgcctgatcagccgacgtcttgacgcttttggcctcgatggaactgtaattcgtagttttctgtgtgctcttggaagaggcagatttctccgtgagttttga

SEQ ID NO: 81716 - DNA, 150 bp, Saccharomyces pastorianus
atgtgtgattggaagggtagagacaattgtcctgcgccggcaagaaaaacatcgtgtgtctctagagcagctttgcattctaacgtgcggtggaaatggtgcgaaaagtcgacacttgacagggcttccaactgctggcgtggcacataa

SEQ ID NO: 81717 - DNA, 2415 bp, Saccharomyces pastorianus
atggctaaacaaagacaaactactaaatcgtctaagcgatatagatattcttccttcaaggctaggattgacgatttgaagattgaaccggctagaaatttggaaaaaagggtacatgattatgtcgagtcgtcgcattttctcgcttcctttgatcagtggaaagaaattaatttaagtgccaaatttacggagtttgcagcggaaattgagcatgatgttcaaacattaccccaaatactataccatgataaaaagatttttaattctttggtttcattcattaactttcacgatgagttttctttgcaaccgcttctggacctcttggctcaattttgtcatgatttaggtccagattttcttaaattttatgaagaagctatcaaaactttaataaatctgttagacgctgctatagaatttgagtcatctaatgtttttgagtggggtttcaactgtttggcttacattttcaagtatctctcgaaatttttggttaaaaaactggtgctcacatgtgatcttttaattccactattgtctcattctaaggaatatctttcaagattttcagcagaagcattatcttttttagtaagaaagtgtcctgttcctaacttgcgcgagtttgttagatcagtttttgaaaagttagagggagatgatgagcaaactaacctctacgaagggcttctgatattattcacagaatccatgacgtcaacgcaagaaactctgcattcgaaagctaaagctatcatgagcgttcttttgcatgaagctttgaccaaatcatccccggaaagatctgtttcattgctctcagatatttggatgaacattagtaagtacgcctcaatcgaaagtttacttccagtctatgaagttatgtatcaggattttaacgattctctcgatgccaccaatatcgatagaatattaaaagtattgacaacaattgtcttctcggaaagtggtagaaaaattcctgattggaataaaattattatcctaattgaaagaataatgagtcaaagtgaaaattgtgcttcgctttcacaggataaagtggctttcctatttgctttatttattcgtaacagtgacgtgaaaactttaacattattccaccaaaaactttttaactacgctttaacaaatatatctgactgtttccttgaattctttcaatttgctttaaggctaagctatgaaagagtattttcattcaatggattaaaattcctacagttatttttaaagaaaaattggcaatcacaaggaaaaaaaattgcacttttttttctagaagtagatgataagcctgaactgcacaaagtacgggaagtaaatttgccagaagaatttattttatctatcagagatttttttgtcacagcagaaattaatgattcgaatgaccttttcgaaatatattggcgagctataatttttaaatattcgaaattacagaatacagaaattattatcccattgcttgaacgtatcttttcaatttttgcatcaccagataattttacgaaagatatggtcggtacactcttaaaaatatatcgtaaagaagacgacgcttcagggaataatctattaaagactattctggataattacgaaaactataaagaaagtttaaactttttaagaggatggaacaagttagtgagtaatcttcatccttcagaaagcttaaaaggactaatgtcacactatccaagtctactccttagcttgacagataattttatgttgcctgatgggaagattcgttatgaaactttagaattaatgaagacattaatgattttgcagggtatgcaagtacctgacctcctttcttcatgtatggttatcgaggaaatacctcttacactacaaaatgccagagatttaaccattagaatcaagaatgttggtgccgaattcggaaaaaccaaaacagacaagctagtatcctctttctttctcaaatacttatttggccttcttaccgttagattctctccagtttggactggtgtttttgacactcttcctaatgtttacacaaaagatgaagccctcgtttggaaacttgtgctatcattcattaaacttcctgatgaaaatcaaaatttggattactaccagcctcttcttgaagatggtgcaaacaaagttctgtgggattcgagtgtagtgaggttaagggacactattgatacgttctcacatatttggtcaaagtattctactcaaaatacgagcattatatctactactattgaaagaagggggaacaccacctacccaattttaattagaaatcaggctctaaaagttatgctatcgattcctcaagttgctgaaaatcacttcgtcgacatcgcaccttttgtttttaatgacttcaga

SEQ ID NO: 81718 - DNA, 522 bp, Saccharomyces pastorianus
atgatatatcccttattcaggatatgtatcctaggtgcatttctgttgggcagctatgcatgtcttgaaaatagtacgcaaaagggtattgaaggggtaactctctctcataatagtgtacaaattaataatactttggcaaaatctgcgccattttgtgagtcagacgctctttcaatgaattattcaactgaaaatatgttaagtaataatgcatgcgattatacgaaaaattcttcgtatccatatattattaccattattactaaggcctttgataatgcccttgaaaattcacttaatttacaagcaaacaggaagctttatcacagagtggggacgtgtatacagaatattttttatcaactgttgttaactgtgaattactttaacatgaacaagctcaaagtaagccagaacaattacctacaaagaagtaatttctataaattcgaaagaaacggcactgaatgggaatatatatttgcatcaaattcagcttgtcttgtttatcatcaataa

SEQ ID NO: 81719 - DNA, 2010 bp, Saccharomyces pastorianus
atgtctcccatacaggttgttgtctttgccttgtcaaggattttcctgctattattcagacttatcaagctaattataacccctatccagaaatcactgggttatctatttggcaattattttgatgaattagaccgtaaatatagatacaaggaggattggtatattattccttactttttgaaaagcgtgttttgttatatcattgatgtgagaagacataggtttcaaaactggtacttatttattaaacaggtccaacaaaatggtgaccatttagcgattagttacacccgtcccatggccgaaaagggagaatttcaactcgaaacctttacgtatattgaaacttataacatagtgttgagattgtctcatattttgcattttgattataacgttcaggccggtgactacgtggcaatcgattgtactaataaacctcttttcgtatttttatggctttctttgtggaacattggggctattccagcttttttaaactataatactaaaggcactccgctggttcactccctaaagatttccaatattacgctggtatttattgaccctgatgccagtaatccgatcagagaatcggaagaagaaatcaaaaacgcacttcctgatgttaaattaaactatcttgaagaacaagacttaatgcatgaacttttaaattcgcaatcaccggaattcttacaacaagacaacgttaggacaccactaggcttgaccgattttaaaccctctatgttaatttatacatctggaaccactggtttgcctaaatccgctattatgtcttggagaaaatcctccgtaggttgtcaagtttttggtcatgttttacatatgactaatgaaagcactgtgttcacagccatgccattgttccattcaactgctgccttattaggtgcgtgcgccattctatctcacggtggttgccttgcgttatcgcataaattttctgccagtacattttggaagcaagtttatttaacaggagccacgcacatccaatatgtcggagaagtctgtagatacctgttacatacgccaatttctaagtatgaaaagatgcataaggtgaaggttgcttatggtaacgggctgagacctgacatctggcaggacttcaggaagaggttcaacatagaagttattggtgaattctatgccgcaactgaagctccttttgctacaactaccttccagaaaggtgactttggaattggcgcatgtaggaactatggtactataattcaatggtttttgtcattccaacaaacattggtaaggatggacccaaatgacgattccgttatatatagaaattccaagggtttctgcgaagtggcccctgttggcgaaccaggagaaatgttaatgagaatctttttccctaaaaaaccagaaacatcttttcaaggttatcttggtaatgccaaggaaacaaagtccaaagttgtgagggatgtcttcagacgtggcgatgcttggtatagatgtggagatttattaaaagcggacgaatatggattatggtatttccttgatagaatgggtgatactttcagatggaaatctgaaaatgtttccactactgaagtagaagatcagttgacggccagtaacaaagaacaatatgcacaagttctagttgttggtattaaagtacctaaatatgaaggtagagctggttttgcagttattaaactaactgacaactctcttgacatcactgcaaagaccaaattattaaatgattccttgagccggttaaatctaccgtcttatgctatgcccctatttgttaaatttgttgatgaaattaaaatgacagataatcataaaattttgaagaaggtttatagagagcaaaaattaccaaagggtttggatggaaatgacaccattttttggctcaagaattacaagcgctatgaagtcttgaccgctgctgattgggaagccatcgatgcacaaacaattaaattatga

SEQ ID NO: 81720 - DNA, 1473 bp, Saccharomyces pastorianus
atgcaagcccaaggttcacaatcgaatgtagggtctttgaggagtaattgctctgacaattcactaccgaacaatcatgttatgatgcactgcgatgaaagcagcggcagcccgcacagcgagcacaacgattatagttacgaaaagaccaatctggaaagtacggcatcaaatagtcgtgaacacagagacaaccagctaagtaggttgaagagtgaggaatacgttgttccaaagaatcaacgtaggggactattgcctcaactcgccattataccggagttcaaggatgccagagattatccaccgatgatgaaaaagatgattgtcttcttgattgcgttttcctccatgatgggccccatgggcacatctatcatttttccagcgatcaactcaatcacaacagaatttaaaacatcagtgattatggtaaacgtttcaattggtgtgtaccttttaagtcttggtgttttcccattgtggtggtcttctctatccgagctagagggcagaagaactacttacataacttcatttgcattattgtttgcatttaatatcgggtctgctctagctcctgatatcaactcatttattgccttgagaatgctctgtggggctgcttctgccagtgttcaaagtgtaggtgctggaacagtggctgatttatatattagcgaagatagaggtaaaaatttgagttattactatttgggtccactactggcgccgctactatctccaatttttggatctttattagtgaatcgctggccctggagatccactcaatggtttatggttattttatccggatgtaatgtcattcttttgacagtgttactacctgaaacattaagaaaacaagattctaaaggcgctatcgctcaaattttggctgaaagacgtattcaagtagacaataacgaacgtggagagatacaagaagattatcagaggggagaagatgagacggatcgaattgaaaaccaagttgccacattatctactgagaagcataactacgttggagaggtaagggatcaagactcgctagatttagaaagtcactccagccccaatacttatgatggtcgagctggagaaacccaattgcaacggatttatacagaggcgagtagaagcctgtatgaatatcagctagatgatagcggtatcgatgcaacaacagcacaagttacgagaataagatcaacagatccaaagttagcgagatcgattcgagaaaatagtctgagaaaattacaaaccaacctggaagagcaagtcaaaaaagtgctatccagtaatggaggtgaaatcgctcctaaagaggtatcagcggtgaggaaggtctgggacaccttttttgtttattttatcaagcctttaaaatcattgcacttcctagaatatccacccgtggcacttgcaataacattttccgcaatttccttttccacggtatga

SEQ ID NO: 81721 - DNA, 1920 bp, Saccharomyces pastorianus
atggaaactattttgcagccaaaggctagaccatttgagtctttgaaaagaaaacgttttagagaatggttgaggccgtcgactgcgcatggatccctgttgcattctgatacattagatttgcgtgactttgcaaaacctaatcccgctgacacattttctaatcttgattctggtcattgtcctttggtcacaactccaataaaatatgagtgcccagatggaaagagttcttttttccgaggagacactaaatttgaaaccctgttcagtaatagaaaattctatgagttcaaagataatttgaaaaggggattgaagaaaatacgtcatgggagaaacggacatcaaagcgaaaagagatgtccagttgttgaagaaacaaaaaagtctgtgtcagataatctggacaaaccagacaataatacgccctgtttcaacagattccacacaaattcgaaagaatttgaaacgcaatttgatcattcaaataggagccaaaattccgataaggcttatctagacaatgaatcctgttggaacctaagtgagaaatttattccttttaataatttaaaatatgaagatttgaaacattttgaagagaatttgcaaagcttagcgcctgcaacttttactccaattgaatcaaatgaatcgcttgataggtcagattcgacacgtggcacaaaacgaagcattcgcaatgattccagtgatacaacatctgaaaagaggctatgcttaaaacaatactcagatgaacctgaatcggatcattcgatggaaagtacaccatccatttacattaccaaagaagttcaagaaagaattgaagcattaagctccacggattcgtttttaattgaaaaagtagattttccctctaacaaaattggttccagtgcctccgattatgaaagtgataacgaatacagaaatatggatgaggattcaataaacgatgttaccactgagaaagagggaaatgtggtcataccagactctaatactagcacggtggacgcaatggaaaaaccaattgaagtgagctcggccttaaaagatgatacattggataaagacatagatgatgcgagcagtagctattcggatgatgtagagaccacattcgagccagttgaatctgaggaactttccgatttatctgatacaagctcaagcggaagtagtaaaatttatactatccccacatttcgcggccttactaataggaccaatatatcacaaattctttcaaaagttggtaaagctgatttaagccaagataacttaacgcatttgatcaaaagtcatcaaaaaaagaaaagatgcgtgaattttagaaataaaagattctatgatgctttcaatccatatgttgataacgaagaagatgcagagttatctgacagcgaaaacatttcagaaatggatacagatctttgtataaaggatcggagtacctcaagtgttaggtttgatgaaaactcacgtcttttaatctacaaaaaatctaaaaagttaaacaaagatgagactcaaagtggttattcgactactgaaacgaggtcaattctaaagacaaagatgaattcacagcatgatgaggagtctcagagagcttcgaagtgtgacacagtaggtgtagcccaatttttacattattttcaatatacagagtataaaaggcagagaaatgaagcagaaaattatagactgagaggagagcaactaagcaagtactattctgaagaatatcctttggattttgcggctgttgaatgcgaagattccgttaatgataaatctgatatcatacttagtatgagagctacggaaagaaacattggtaggcaactgaaaggtataagtagtcaaggggcacaaattatatcgcttgatgaggatgttttttga

SEQ ID NO: 81722 - DNA, 201 bp, Saccharomyces pastorianus
  modified_base (147)..(183): a, c, g, t, unknown, or other
ccagtccacgtctccccagctttccgtgtccaagttggtgacattgttaccgttggtcaatgtagaccaatctccaagactgttagattcaacgtcgtcaaggtctctgctgctgccggtaaggccaacaagcaatttgctaaattnnnnnnnnnnnnnnnnnnnnnnnnnnnnnnnnnnnnngtggaggataaaacgtag

SEQ ID NO: 81723 - DNA, 942 bp, Saccharomyces pastorianus
atgactttgagtaattgcgactctttggataacttattccaggaccctccagaggaagaagaaagtagtaaattcgttgaggcggtcagaactttgatgaatagaaacgatatgggatatcctcccgccgctgcaaatggtacgtattgcttaaaaaaaatcaagtctttgaatgccaaacagtggaaaataaacaagaaaagaatgtgcatgttgccagcagtaaagaagaaaaatttcgactttcacgagcaaagaagtttaatcttgaatttaaatttatggaaattcatcaagtttattaattgtagtagtaaaaacaattacaataaaaataataagcatgtgagaagctcgaacaacactgtaaaaaatgaaaatgttttaccgttacaaaaacacaagaaagtggacaatgatcaaagattggagaaccttttttggagaagctggtttaaggcacgcaaaaggagagatataatgggcaagccacgagagaggcatatcaaatttaacgataacgttgaacagtgtattataactgatgagcatttcatacaaaggcttccttctacacggttgaattcgactgatgaacagcgcccttgttcaaagtctgaactagatccctgcattggcaacgcagcaagtaagcgaagtttctatgattataacagcgtttacgtcgcgagtgacgcaattattacgactgccgctgccactgccattatcagtagtaatagtggagactatcagcgtgggcacgatgttcgcgatgttccaagaaatgttttgttacaggcaggagaaacagatttcagtagtgtgctttgggttgactccgatctcaagttatccaacataagtcatcattcccccgtaaaaccttcgtcaacttcaagtcattcgaccttcattttcgagtcggaaactgaccactga

SEQ ID NO: 81724 - DNA, 990 bp, Saccharomyces pastorianus
atggaggaactaggtttaaaaagcacttttccatatgaatatggctcagactttacaatgataagaacggaaatgttaaatactacgaagaacgaaacaaatattttattttccaatataaagagcattttggtcattatttggaaatactcatttacatttttaagatctttttccgattccatcaaacttattattgacgatgttgtcactattggctcccgaaattttgcagagagattacagattgaagcgaaaaaaaacaatgaccaagaagatatctgggcatccacaataattctgggtgtgattatcgggtatttaatctcttctattaagagaaagaacacttttccagtaatgcctacgagctcacctaaaacagatgattgtaggttcaagactggtgaaaccatatccattgtaataaactttaatgaagactgcctcaataatcgaagtgacgttaccgaagagagaaattatgaggaatccacagttttacattcaaaggagtcagttctcagcattggtaggcaaaatatggtaactttgaaccaaagcgatgaaaatttcacctatgacaattttgatgagcacgacttattaactaaagattatacaacagaggtcttaacgcgatcacctggctcaaatcccgagtttaaagcagtggtaaatggtacattacttgatagcgcgaatgaaacgccgtttaaaggtattgaaaaaagtattaacgaaacaatggttaaggttcctatgggatgcgatgtatctctctcccattatggcagacaatacgcgcctggaaatatttcaattatgagaagcttcactgctcgagataatactaaatctgtgagtagagaaattcgtgatatctgtaaatcgtttttgattataaaaagccaatttggtgacgaacttttcctgactatgttcatggaaaaaccagttttctttgataacacatcccaattaaaataa

SEQ ID NO: 81725 - DNA, 1944 bp, Saccharomyces pastorianus
atggacgatagtgtcagtttcattgccaaagaggccagtccagcacaatattcgcacagtttgcatgaaagaacacacagtgaaaaacaaaagagagactttacaataacagaaaaacaagatgaggtatctggacaaacagcggagcctcgaagggcggacagcaaatccatattacagaggaaatgcaaagaattcttcgactcttttaaaaggcagctgccaccagaccgtaattccgaactagagtcccaagaaaaaaacaacctaacaaagtcgatcaaatctcgtcacttagtcatgatcagtctcggtaccggtataggtactggtttactggtcggtaatggtcaggtgctgggaacagctggtcctgccgggttagtccttggttacggaatagcatcgatcatgctttactgtatcatccaagcggcaggcgagttaggtctctgttatgcaggactaaccggcaattacaccagatatccttctattttagtcgacccttcgttgggttttgcagtttctgtggtttacaccattcaatggctaactattctgcctttacaattggtcactgcggcaatgacagttaagtactggacgagtgcaaatacagacatttttgttgccgtggttttcgtttttgtaattgtcatcaatctctttgggtccagaggctatgctgaagccgaattcattttcaattcctgtaagatattgatggtaatcggattcgtcattctggcgattatcatcaattgtggtggtgcgggtgacagaagatacatcggtgctgagtactggcgcaatcctggtccatttgcccacggtttcaaaggcgtatgtacggttttctgttatgctgcattcagctacggtggaattgaagttctacttctatctgccgctgagcaggaaaacccaacaaaatctattcccaatgcctgcaaaaaagtggtataccgtattctgctgatttacatgctcaccaccattttggtttgctttcttgttccatacaacagtgacgaattattagggtctagtgactcctctggatcccatgcctccccatttgtcattgctgttgcatcacatggtgtcaaagttgtgcctcactttataaatgctgttattttgatttctgtcatttctgttgcaaactcttcgttatattctgggccaagattgttattatcattggcagaacaaggcgtcttacctaaatgcttagcatatgttgatagaaacggcaggcctttactttgtttttttgtttcccttgtctttggatgcattgggtttgtagccactagtgacgctgaagaacaggttttcacctggttattggcaatttctagtctttcgcaattatttatctggatgtcaatgtccttgtcacatataagatttagagatgccatggcaaagcaaggtcgttcgatgaacgaagttggatacaaagcacaaactggctattggggttcatggcttgcagttttaattgcaatattcttccttgtgtgccaattctgggtagccatcgcacctgttaatgaacatggaaaacttaacgtcaaagtgtttttccaaaattatttggcaatgcccatcgttttgtttgcctattttggtcacaagatatacttcaaatcatggagcttttggattccagccgaaaaaattgatttggactcacatagaaacatatttgtgtctccatcacttacagagatcgacaaagttgacgataacgatgatcttaaagagtatgaaaattcagaatcgtcggaaaatccaaacagctcgcgttcaagaaagttttttaagaggatgaccatttctggtgctaacagcaattccattcattttccgcttggcttcatcgggctttcgttgccactcttcaggataacaaaatatataattgttttttag

SEQ ID NO: 81726 - DNA, 156 bp, Saccharomyces pastorianus
atgcatatattaacgcgatcgagtaaaaatgcctttcccagaagtagaagtaggcaagacatccatatttcaagccacatccatagagatacctcccaacagcgcgttgttaaagattttggtaattacaagaacgaggttaaattccttcgttaa

SEQ ID NO: 81727 - DNA, 123 bp, Saccharomyces pastorianus
atggtacccgcacctgggtcacgtgcattcccctcacccgtttttttaggtggtgtcttttttgtttttttttttaggtggcgcggcaactataaagtacagcaagtgaggttgaggcaatag

SEQ ID NO: 81728 - DNA, 2037 bp, Saccharomyces pastorianus
atgcgggttttaataactaacgatgatggtcccttaagtgatcagttttcaccatacattagaccttttattcagcacattaaaagaaattatcctgaatggaaaatcacggtttgtgtacctcatgtccagaaatcatggctgggtaaggctcatcttgctggtaaaaatttgacagctcaattcatatattctaaagttgacgctgaagacaatactttttggggcccatttatccagccacaaattaggtcagaaaactctaaattaccttatgttctcaatgctgaaattccgaaagatacaattgagtggatattaatcgatggaactccagcatcgtgtgcaaacatcgggctgcacctattgtctaatgaaccgtttgatctagtactgtcgggtccaaatgttggtagaaatacatctgctgcttatattacctcttctggtaccgtaggaggcgcaatggaatctgttattactggaaatacaaaggccattgctatttcttgggcctattttaatggattgaaaaacgtctccccacttttaatggagaaggcctctaagagatctttagatgttatcaaacatcttgttaagaattgggacccaaaaacagatctatatagtatcaatattcctttagtggagagtttaagtgatgataccaaggtttactatgcaccaatttgggaaaatagatggattccaatattcaacggccctcacattaacctagagaatagctttgctgagatcgaagacggtaatgaatcatcatcgatttcctttaattgggctccaaaatttggggcacataaggattctattcactatatggacgaatacaaggacaggactgttttaactgatgctgaagttattgaatccgaaatgatcagtgtcactcccatgaaagccactttcaagggtgtgaaccaccttcttggagagttgaaactgactgaggaagaaaataatttatcaaaaacaaataacctcatcgtggtaagtatagacccaatggaatatatatacaaacctctaacccacgccctgaaaaaatatctgccacaagtggagattgtatcaaacttgccagaatttgacaatggagggtgtgaaaaagaaatgaaggtttttcattacggtgattacgaacagctagatatggacaaactaatggaactgcccaataattacttcacaaactcttatatatataggaaggcattgataagaaaacactttctttcgcataccatacagacttatactgcgaagaacccagagtccattttaaagaaggcatatttggaatcattcactattgatttagattatgctgaatttctagacgacgcattagatgaaaattgggaattacgccaagagttggagaatgaaagccaagataaatggtggatcgtgaaaccgagtatgagcgataaaggtcaaggtatcagggtatttaagactattgaagatttacaggctattttcgattcctttgacgatgaagacagcgaagcagaagagagtggaaataacgacgatgctgatgatgtaaatggcgaattcatggataataacaaggttaacatttcccaattgcgccactttattatacaagaatatttaaccaatccgttactattggcatctatggataatagaaagttccacataagatgttacgtcgtctgtaggggagatttgcaagtttttgtttatgatagaatgctagcgctctttgctgccaagccatttgttcctctagatccatatgcgtattccgtaactgatttgaaagatttagaatgccacttgactaacacatgtctgcagagcaaaaagaaggataaagattcttctgttttggagtttgactccatagaggaaattccaaatgagagaaagtccaatattaaggagcaaatccatagcataacgaacgacgttttcttagctgctgtaaatgtaaatagattaaacttccaccgttacccaacgcatttggaacatatggcgtag

SEQ ID NO: 81729 - DNA, 1446 bp, Saccharomyces pastorianus
atgagtataacaagtgaagaactaaactacttgatatggaggtattgtcaagagatgggacacgaggtgagtgcattagcattgcaggatgaaacaagagtattggaatttgatgagaagtataaagaacacattcctttgggtacactggtgaatctagtacaaagaggaatcttgtatacagaaagtgagttaatggttgatagtaaaggtgatatcagcgctttaaatgaacatcatctttctgaagatttcaatttggttcaggcgctgcaaatagataaagaaaaatttcctgagatctcttctgaaggaaggttcactttggaaaccaattccgagagtaataaagcaggtgaagatggcgctagtactgttgaaagagaaacccaagaggacgatactaattctattgacagtagtgataacctagacggatttgtcaaaatactgaaggagatagtaaaattagataatattgtttcctccacttggaatccattggatgaatctatactcgcatacggtgaaaaaaattctgttgcaagactagcgaggatagtagaaaccgatcaagaagggaaaaaatactggaaactcacgataatagcggagttgagacatccttttgctctgagtgcaagtagtggtaaaacgacgaatcaagtcacatgtcttgcttggtcacacgatggtaattcaattgtcacgggtgtagaaaatggtgagctaagactatggaataagacgggggcacttctaaatgttttaaattttcatagagcacctatagtatcctttaaatggaacaaagatggaacacatatcatatccatggacgtggaaaatgtcactatactctggaatgttataagcgggaccgtcatgcagcactttgaattaaaagaaaccggtggctcatccaccaacgcagagaaccatagtggcgatggttcacttggggttgacgttgaatgggtagacgatgacaaatttgtcattcctggccctaaaggtgctatatttgtataccaaattacagaaaaaacgcccactggtaaacttattggacaccatggacctatcagcgttttggagttcaatgacaccaataaacttctacttagtgcctcagacgatggtactctaagaatatggcatggcggtaacggcaattctcagaattgcttctacggacactcacaaagcatagtatcggcatcatgggtcggtgatgataaggtaatatcctgctcgatggatggctccgttcgcctatggtcgctgaagcagaatacgctattggctctatcaatcgtggatggtgtcccaatttttgctggaagaatatcacaagatggacagaagtactcatttgctttcatggatgggcaggtaaacgtctacgagtttaaaaatactgaacagcaagtcacgaagtcttaa

SEQ ID NO: 81730 - DNA, 2529 bp, Saccharomyces pastorianus
atgggattttgggagaacaacaaagattccatcacttcagggctgaagagcgccggtaaatacggttaccaaggaacaaagtacgttgccaagacagggtataaggcaagtaagaagcactataacaacagcaaagcgcgtagggaaaggaagagtggtaagaaaaattcaagtgatgaggagtatgaaagcgaagatgagatggagtatgaaagaaagccgaccgatataagaagtttaaaagacccaaagtcctttcctcccccacctttgaaacctggacaaaaaacttatacaggacaacagcaacagcaaatgccaaatggtcaggccagttatgcttttcagggtgcataccaaggccaacctggcgcaggatcgatggaacagtcacaatacgcacaaccacagtataatcagtatccacaacagcagctgcaacaaggtgtagtgccacagcaacagcagctgcaacaaggtgtagtgccacagcaacagcagctgcaacaaggtgtagtgccacagcagccgcctatatatggagagcaagtaccaccgtatgggtcaaattctaatgcaaccagctaccagtcgctgccgcaacaaaatcaaccccaatatgcaattccaagtcaggtatctctgaactctgcttctcagcaaagcacagggtttgtctcgcaaaatctgcaatatggtacccaatcaagtaatccggcaccatcaccgtctttccagaacggtcttcagtgtcatcagcagccgcaatacgtatcacatggctcaaccaatctcggacaatcccaatttccatcgggccaacagcagcagcccacgacacagtttggccagcaagttttaccatcacctgcacaaccacatccacaaacacaacagcaacaacaagggcaaccattaccgcccccgcgcggtcaagtgatcttgccagcgcccggagagcctctgtcaaatggctttgggcaacagcaacagcaacagcaacagcaacagcaacagcaacagcagcctctgaaccaaaacaacgctttgttgccacaaatgaacgtggaaggagtttctgggatggctgcggttcagcctgtctatggccaagccatgtcaagtactacaaacatgcaagattcgaaccctagctatggagcttcacccatgcaaggtcagcctccagtcggtggacaaccgcctgtgcctgtaagaatgcagccgcagccaccgcaaccaatgcaacagggaaacatctatccgattgagccttctcttgattctactagctcaaccccacattttgaagttactccatttgacccagacgcacctgctccgaagcccaaaatcgatattcccacggtagacgttagtagccttccaccacctcccactcatagggatagaggagcagttctacaccaggaacctgcgccaagtgggaaaatacagcctaacacgacctcttcagcggcttcattgccagcgaagcattcaagaactactactgcagacaatgaaaggaactctggaaacaaagaaaacgatgaaagtacctccaagtcttccattttaggacattatgatgtagatgtcaacatcatgccacctccaaaacctttcagacatggacttgattctgtaccttctgagcacaccaggaagaacgcatcagaacgggcagtgccaattctacctcctcggaacaatgttgagcctcctcctcccccatcacgaggcaattttgagaggacagagtcggtgttgtcaacgaatgccgctaatgtacaggaggatcccatttctaattttttacctccaccgaagccatttagacatactgaaactaaacaaaatcagaatagtaaagcatcgcctgtagaaattaaggatgaagttttgccagggcacccctctgaggaagatagaaacgttgaaccatcgttgctacctcaatcgaaatcgcaatcgcaatcgcaatctcaattcagaagagctcatatggaaacacagcctattcaaaacttccagccaccaccaaaaccatttaggcgttcacaatcgtccaattctagtgatagttcttatactatcgacggacctgaggcaaatcatgggcgtgggcgtgggcgtatagctaagcaccatgatggtgatgaatacaaccccaagagtgagaattctacagaaaacggtcgtttgggtgatgcccccaacagctttattagaaaaagagcaccaacccctccagccccatccagatctgagaagttacatgagggtgctataacatccgaagttgatagttcaaaagatgctaataaatatgaaaagtcgatacctcctgtaacttcgtctattcaagcgcaacagtctacgaagaaggcgcctcctcctgttgtaaagccaaaacctagaaatttttctttaaaggccaatgaatatcccaaagaacttactagggaagcaactggacaagatgaagttttaaactccattaccaatgagttgtcgcatatctaa

SEQ ID NO: 81731 - DNA, 243 bp, Saccharomyces pastorianus
atgtctcaaactgggtggaaaagagggtgcttgaattcattaggccatatggttgatgttctcaggttctacttatgtttcctttgtcgatttttgcatgctttgactgtgactttcctgtctgatatctttgtatggcttgttgctaaaacaaggtcaatccaagcagtgatcatcttgcacgttgcctcaatagaacgcgcatatagcaatcatcaagttaattggtcatatatcttttaa

SEQ ID NO: 81732 - DNA, 1419 bp, Saccharomyces pastorianus
atggtacaacaacagcatcctgctcaacaaacgcctattaactcttctgcaacaatgtacagtaatggagcttcccctcaattacaagctcaagctcaagctcaagcacaagcacaagcacaagcacaagcacaagcacaagcacaagcacaagcacaagcacaagcgcaagcacaagctcaagcacaggcgcaagcacaggcacaagcacaagcacaagcacaagcacatgcacaagcgcaagcacaagcacaagcacaggcacaagcacaagcacaggcgcaggcacaacaacaacaacaacaacagcagcaacaacaacaacaacaacaacaacaacaacaacaacaacaacaacaacaacaacaacaacaacaacagcagcagcaattacagcctctaccaagacaacagctgcagcaaaagggagtttctgtgcaaatgttaaatcctcaacaagggcaaccatatatcacacagccaacagtcatacaagctcaccaactgcaaccattttctacacaagctatggaacatccgcaaagctctcaactgccacctcaacagcaacaactacaatctgttcaacatccacaacaacttcaaggccagcctcaagcccaagctccccaacctttaatccagcataacgtggaacagaacgttttacctcaaaagagatacatggaaggtgcaatccacactttagtagatgccgccgtatccagtagcacccacacagagaataacacaaagtctcctcgtcaaccaacccatgccattccaacgcaagctcccgcaacaggaataacgaacgctgaaccacaggtaaagaagcaaaagttgaactctccaaattcaaacatcaacaaattagtaaatactgctacctccattgaagaaaatgcaaaatctgaggtgagcaaccaatcgccagcagtagtggagtctaataccaataatacttcacaagaagaaaaacctgtaaaagcaaactcaataccttcagtaattggcgcacaggaacctccacaggaagctagtcttgctgaagaagctaccaaagcagcttctgtttctccttctacaaaaccgcttaatacggaaccagagtcatctagtgtccaaccaacggtatcatcagaaagttcaacaacaaaagcaaatgaccaaagcactgctgagaccatagaactttctactgctactgttcctgcagaagcaagccctgtagaagacgaagtaagacagcattctaaagaggaaaacggcacaactgaagcatctgcaccttctactgaagaggcggagccagcagcttccagagatgctgaaaaacaacaagatgaaaccgctgctacaacgataactgtaatcaaacctacttcggaaacaatggaaacaagtgaaagaggaggc

SEQ ID NO: 81733 - DNA, 1191 bp, Saccharomyces pastorianus
atggcatatgacgccactttacagttcaatccctcatctgcaaaggctttaacatctttggctcacttgtaccgttccagagacatgttccaaagagctgcagaattatatgaaagagcacttttggtaaatcccgaactatcagatgtgtgggctactttaggtcattgttatctgatgctggatgatctgcaaagagcttacaatgcctatcaacaggctctctaccacctcagtaatcccaacgtaccgaaattatggcatggaatcggcattctttatgacagatatggttcgctcgactatgccgaagaagcttttgccaaagttttggaattggaccctcattttgaaaaggcaaacgaaatttacttcagactaggtattatttataaacatcagggtaaatggtctcaggctttggaatgcttcagatacattctccctcaacctcctgctcccttgcaggagtgggacatatggtttcagttgggtagtgttttggagagtatgggagagtggcaaggtgcgaaggaagcctacgagcatgtcttggctcaaaatcaacatcatgccaaagtattacaacaattaggttgtctttacggtatgagtaacgtacaattttatgaccctcaaaaggcattggattatcttctaaagtcgttagaagcagatccctccgatgccactacatggtaccatctcggtagagtgcatatgattagaacagattatactgccgcatatgatgctttccaacaagctgttaatagagattcaagaaaccctatcttttggtgctcaatcggtgttttatattaccaaatttctcaatacagagacgccttagacgcgtacacaagagccataagattaaatccttatattagtgaagtttggtatgatctaggtaccctttacgaaacttgtaacaaccaattatctgacgcccttgatgcgtataagcaagctgcaagactggacgtaaataatgttcacataagagaaagattagaagctttaacaaagcagttagaaaacccaggcaatataaacaaatcgaacggtgcgccaacgaatgcctctcctgctccacctcctgtgattttacaacctaccttacaacctaatgatcaaggaaatcctttgaacactagaatttcagcccaatctgccaatgtctactga

SEQ ID NO: 81734 - DNA, 183 bp, Saccharomyces pastorianus
atgaatccgggcggtgaacaaacaataatggaacaacccgctcaacagcaacaacaacagcaacaacaacagcagcgacagcaacagcaggcagcagttcctcagcagccactggacccattaacacaatcaactgcggaaacttggctctctattgcttctttgtgcagaaacccttggtga

SEQ ID NO: 81735 - DNA, 198 bp, Saccharomyces pastorianus
atgggtccagtggctgctgaggaactgctgcctgctgttgctgtcgctgctgttgttgttgctgttgttgttgctgttgagcgggttgttccattattgtttgttcaccgcccggattcatttttcctaaattttttcctccagtcgtgttttgtttgttgttgttgctggggatcctctagagtcacctgcagcatc

SEQ ID NO: 81736 - DNA, 153 bp, Saccharomyces pastorianus
atgattaaagcctggtttgacaccaacaaatacgttgctatgcatatgcaaactgaaccctttgtatatataaaaattatatgtataaaagaagaggaacgtccgcacaattccacacacacacacacacacgctttcacacacgcaatttga

SEQ ID NO: 81737 - DNA, 1482 bp, Saccharomyces pastorianus
atgaagtatctaaacttagttttcgtgcttcagcttcttattagcatcaaatacgcctcattcggccgagccttttctctttttgaagatgataccacttttgccaatttggataaacagctaaagcttccacagaatacacagcaaacccttaaattggaccgtttgaatcacgatgatccgctgtttacaacttttatttcttctatggataaggattactgtttgagacttagaacagtagatccttctaaactaggaattgacaccgtcaaacaatggtcgggttacatggactataaggattccaaacactttttttattggtttttcgaaagtaggaacgatcctgctaacgacccaattattctttggttaaatggtggacctggttgttcctcgtttactgggttgctatttgaactaggcccctcatcaattggcgccgatatgaaaccaatccacaatccctattcttggaataataacgcttcaatgatcttcttagaacagccactcggagtcggcttttcctatggtgatgaaaaagtctcctctacaaaattagcaggcaaagatgcgtacattttcctggaattgttttttgaagcttttcctcatttacgctccaacgatttccacattgcaggcgaatcctatgcaggacattatatccctcggattgcacatgagatcgttgtcaagaaccctgaaagaacgttcaatttaacttcagttatgattggtaatggtatcacagaccctttgattcaagcagattattatgaaccaatggcatgcgggaaagggggctatcaccctgttctctcatcagaagaatgtgagaaaatgagtaaagctgcaggtcgttgtcgtaggttgaacaagttatgttatgcttctaaatcaagtttaccatgcatagtcgccactgcttactgtgactctgcacttttggaaccgtacattaacacaggactcaacgtctatgacattagagggccctgtgaagataatagtactgatggtatgtgttatacaggtctccgctatgtcgaccagtatatgaattttcctgaagttcaagaaacgctagggtccgacgtgcataattatcctggctgtgataatgacgtgttcaccggatttttgtttacgggcgatggaagtaaaccatttcaacaatatattgctgaattattaaatcacaacattccggtattaatatatgcgggtgataaggattatatttgtaattggctgggaaaccatgcttggtccaatgagttggaatggatcaataaacgtaggtatcagagaaggatgttaagaccatgggtcagtaaagaaacaggtgaagagttgggacaagtcaagaactatggccctttcacctttttgagaatatacgatgccggtcatatggtgccctatgatcaaccggaggcaagtttggaaatgtcaacgttggatttccggtaa

SEQ ID NO: 81738 - DNA, 228 bp, Saccharomyces pastorianus
atgatatattcaaaaggtgcaatgtcagagaacatatattgcgcccctgtcctgtgtatcagtcatttttcgcgggacttgaatggcgcaccattatcctatacagaaaacattaaattttctgcaaaattttgggcaaatgcttggatacactatgaatccgtcatgaagatactacttgtaaaaaggtatatacatccttctttttcatgtgctagtaagaattag

SEQ ID NO: 81739 - DNA, 213 bp, Saccharomyces pastorianus
atgctttttgactcatccttccgcgaaaggagaactttttacaatgccgccggctctgttagcgtacccttctacaagcagatagcagaacaaacacatgatatattcaaaaggtgcaatgtcagagaacatatattgcgcccctgtcctgtgtatcagtcatttttcgcgggacttgaatggcgcaccattatcctatacagaaaacattaa

SEQ ID NO: 81740 - DNA, 1053 bp, Saccharomyces pastorianus
atgtcttcttcagtagcctcaaccgaaaacatagtcgaaaatatgttgcatccaaagactacagaaatatacttttcactcaacaatggtgttcgtatcccagcactgggtttggggacagcaaatcctcacgaaaagttagctgaaacaaaacaagccgtaaaagctgcaatcaaagctggatacaggcacattgatacagcttgggcctacgagacagagccattcgtaggtgaagccatcaaggagttattagaagatggatctatcaaaagggaggatcttttcataaccacaaaagtgtggccgattctatgggacgaagtggacagatcattgaatgaatctttgaaagctttaggcttggaatacgtcgacttgctcttgcaacattggccgctatgttttgaaaagattaaggaccctaaggggatcagcggactggtgaagactccggttgatgattctggaaaaacaatgtatgctgccgacggtgactatttagaaacttacaagcaattggaaaaaatttaccttgatcctaacgatcatcgtgtgagagccattggtgtctcaaatttttccattgagtatttggaacgtctcattaaggaatgcagagttaagccaacggtgaaccaagtggaaactcaccctcacttaccacaaatggaactaagaaagttctgctttatgcacgacattctgttaacagcatactcaccattaggttcacatggcgcaccaaacttgaaaatcccactagtgaaaaagcttgccgaaaagtacaatgtcacaggaaatgacttgctaatttcttaccatattagacaaggcactatcgtaattccaagatccttgaatccagttaggatttcctcgagtattgaattcgcatctttgacaaaggatgaattacaagagttgaacgacttcggtgaaaaatacccagtgagattcatcgatgagccatttgcagccatccttccagagtttactggtaacggaccaaacttggacaatttaaataagacaacgactgggatcctatag

SEQ ID NO: 81741 - DNA, 588 bp, Saccharomyces pastorianus
  modified_base (376)..(454): a, c, g, t, unknown, or other
atggaaaagttcaatctgacaagtaaatacgcaaaattctatgcctttgattcaaattattatgagggtgttctcaataggttagttaagcatacgagagaatcaaaagatgatatggtcgagctcttgaaaacttcgttcataaataaagagaagatggctgcatttggtagtttcgttacagaggaccaagaaaaaatggaagtgtccttcaatattttcaatgaaataacaatccaggatttgaacttcttgcaattttcaagcattccgaaattgtgggaaaataaactcttgagccaggcgaggaatatcatcatagtaatggtaccaatactgataataacgagactactggcgctgatgatactgacgnnnnnnnnnnnnnnnnnnnnnnnnnnnnnnnnnnnnnnnnnnnnnnnnnnnnnnnnnnnnnnnnnnnnnnnnnnnnnnntgacaatgacaacaatatcaaagatgatgatgatgatgatgatgatgacaatgatgatgattatagtaataatggtgctgacgatgatgaagaagacgatgactatgacagatctttattcccaacaggtttag

SEQ ID NO: 81742 - DNA, 2505 bp, Saccharomyces pastorianus
atgaatatggattctggttttacaagtagtcatgaaagcatggataagacacaaaagcaaagttctgagtgggcagctaaccagaaacataatcaaagagtcgaaaatacaagagttttaatgggccccgctgtccctgcgatgcctccagtaccatcaaattttccgcctgttccaactggtacaataatgtcatctcagttgagcccttttcccgatcaccgtttaagacatcacccattagctcatatgatgcctgctgataagaattttctcgcatataacatggagtctttcaaaagtagagtgactaaagcatgtgattattgtcggaagaggaagattagatgtacggaaattgagccgatttctggtaaatgtagaaactgtatcaagtataataaagattgcacgtttcatttccatgaagaactgaaaagaaggcgagaagaagctttgaataacaagggaaatgggaagtcggttaagaagccgaagttggataaggagaataagttcaaggatgaaaattttgatatcgccgtgcgatcaagaaatacttcttctacagacagctcgccgaaattacacaccaacttatcacaagaatatattggagtttctgccggcaaaagtgcaagcgataaagaagatacttggcctgactttgttcctattgacaggacagtgcttgaaaaaattgaactcaaccatacgaaggttgctgggaaagtttttgttttggaagagatttgtaaaaacatgaagggaacaatagagaagctagctgaaaaaagcaaaattgacgtcattgataaagaatacatgaaaaggcctaaaagaaagcaatattcaaaggccttgttaacaaaacaaaaaatgtttcattttcgacaaaatgttttgtcacatttaactgacgaagaatttctttcgcccatcaatgaaatgtttactactactttcaaatattctattttacagaccaagctggtcctagacttctctttccgatccgcatcatcaccatctagtgataatattttgtatcctctgccccgtttagcaattgcaaagcgtttgctcaaaaatataaaatgtccatcattagcctctcttctccacatagtagatgtagatcaatgtttgcaatttgccgacgtgcactttgatcctgctaaaggaagattgacaccatcacaggtatttttgctaaatatctgcctctgtcttggggccaccgttacgaattttgaggagaagcaggagctagttgatgaagataatcatgaaacctattattttgagaagttcgaattatggagactcagatctttcacttttctcaattctgtctattactatcataaactgtctgtagcacgcgcagatatgacggcactaaaggcattactgttactggcaaagttcgcccaacagaaaataagtgcttcatcagcggtcaaagtactatccgttgctatcaaggtggctttagatttacggctcaatttacattccacctatgaggatctagaacttgatgaaatcattaaaagaagacgcttgtggtgttattgtttttcaacagacaaatttttttctgtggtgttgtcaagaccgccctttctcaaggaggaaaacactgatgtattaacagatgaaagctatgttgaactattcagagataaaattctgcccaatctttctataaaatacgatgattcaaaactagaaggggtgaaagatattgtatccgttgtaaacttactcgcgaatcaccttgaatatgtaccatacattcaatcatattttttgtcgagattatctctcatagagtctcaaatatattactcatgtttttccatcagaacaactttagacgatacactagatgaaattattgaaaatgtactggaaaatcaaaaggcgttagatagaatgcaagacgatttgcctaccatattatcattagaaaattacaaggaaaacatgaggattttatctctggagtcttcgaagttagattttgaagtgagttgttgtactactattctattgcatctcagatggtaccatcaaaagataaccttgagtttatttgtcatatccatcattggagataacttagatcaacgggaaagttcccggcatgatatagctgaaattattagaaggtcaagattggatttcaagcgaaattgcatcgaggtacttaatattttgaaagattttgaatactaccctactgttcagaatgagtttctgtatttttctctcacaacggttttttccatgtttctgtatttgtcagagattatggttaatgacgaacatgccatggagactggttatataattggattattgagggatacacatacccgtatgcttggatctgaagaacgctgtctttcagtacacaatctgaagtggcaaacatctcttttttttttacactttttttctacggagtacgatggaaaagttcaatctgacaagtaa

SEQ ID NO: 81743 - DNA, 768 bp, Saccharomyces pastorianus
atgggcaaatttgagcaaaaagaaagagaaagaataagcacatttagttttcctactacgggcagtcaatctagtacatccattaaatcacttggcagcccactctatggacgtttcagctctctctcttcaacagaatctcagttcgatagcagcaaacaaccccatgagtacgaaaagagcttttattttgaagagtctcaaggcgaagctctgttcaacaagctgaagacctactctttccctggagacaaggatggtgtgaaaacgaggagaaattcctccatatgtccaagaaagcctaatgcggtatcacctttaagggtagaaagtaatgaattatcatcacattcgcattcacgttcattatcacacgaacttacaaagccctcagggcgaaggaaaagttaccacagaaaaagtcatgcaatctcattcagcaggtcttgtaagccaaatttcattgacgggtacgattctaattcaagcataggcgtcaattcaagaaaaacttcattggcaagttctttcttggacaaagaatatcattcttcaccggatacttcatatacccaccaaatgtccccgaaaaacacaatcatgaataccaatgaacaattaagaagaaacgcaagcggtagattcgggagtttgaaagaattcgctgaaaaaaatcagataaatattgagggcaaaatttttgctcataaagtggaaactggagacatattgcaaccactaattgacttagatattgacaataaatga

SEQ ID NO: 81744 - DNA, 402 bp, Saccharomyces pastorianus
atgaatatcgtcccacaagatacctttaaatctcaagtctctacagatcaagacaaaagtgttctttcatctgcagtgccctccttgccagacacattacgccagcaagaaggcggtgcagtacctctttccacacaattgaatgacagacatccattagaatcaacattgaagaactgggaaaccacacagcgccaaagacaaatggaacagtatcgacaaatatttggcattgccgaaccaatgaaaaggacgatggaaatggaaatcgtcaatcgtaccgacttcaaccccctttcaacaaacggtagtatacaccgtgacatactactgaacaaagagtgcagcattgattgggaggacgtctacctggtactggcctacaagccagcaccatggtag

SEQ ID NO: 81745 - DNA, 339 bp, Saccharomyces pastorianus
atggaaccattttcaccgacaatatgcgaaactgtaccattgtatccccaatggaatgggttaattgctggccatttggaaacttctgacatatcggaaacttttatgagctttgttttttacgcaactactatcaatgtaataatagaatttaaaaaactgctcatattaataataaacggaggaaatactcgaggagctattacttccagggacatccgatatctgacgccttttaaaatctccacatgcgcaagatttaaaaaaaaaaaggatctcggaaccggaacgagattgctcatttttcgttccgtttccgcaggttttgcaaatcattaa

SEQ ID NO: 81746 - DNA, 450 bp, Saccharomyces pastorianus
  modified_base (440)..(440): a, c, g, t, unknown, or other
atgggaaatatgataaagaaggcatctttaatagccctcctaccgctgctcactgccgcagctactgcagctactgatgcggagacatctatggaatctgggagttcttcacatttgaagtcttttttaatgtccgtttctatgattgggctttctgaaattggtgacaaaaccttcttgatcgcagccttgatggcaatgcgtcacaaaagacttctggtattctcagcagcagctatctccctcgctattatgaccatcctttctggtgtggtgggtcattcagccgttgcttttctttctgaacgctatacagcattttttgcaggtattttattcttagtgttcggttacaaattgactatggaaggtttggagatgtctaaggatgcaggtgttgaggaggaaatggctgaagtggaggaagaaattgccattanaagacatgaa

SEQ ID NO: 81747 - DNA, 327 bp, Saccharomyces pastorianus
atgccctctctgcgagatttatcactagaaagggaccaagaattaaatcagttacgagcccgtatcaaccagctgggcaaaacaggcaaaaaagaagccaatgattttgttggttcaaatatttcaagtgaacctgtatatgacacggtgattcaaacaggacagagctctaacgcaacgaatagttttgtgcaagaaactattcagaagacgaaacaaaaagagagtggtcagccatatatcatcccccaaaaaaacgaacatcagcgtaacatcgataagatttgcgaaaccagcgatcctttagtgagggttaatgcggccgcg

SEQ ID NO: 81748 - DNA, 183 bp, Saccharomyces pastorianus
atgggagtgaagcaaaccccaccagtccaggtgaaagtaagcgacgcggattccaccaacagaaggaaatctagtagccaggaaggaaaccctcagctggttcacttaaaggcaaagagcgacaaagataaaagaaagggatcttcagattccactgcttctataatgggcagttccaacgca

SEQ ID NO: 81749 - DNA, 5493 bp, Saccharomyces pastorianus
atgacagttagttccgatacaactgctgaaatatcgttaggttggtcaatccaagactggattgatttccacaagtcatcaagctcccaggcttcactaaggcttcttgaatcactactagactctcaaaatgttgcgccagtcgataatgcgtggatatcactaatttcaaaggaaaatttactgcaccaattccaaattttaaagagcagagaaaataaagaaactctacctctctacggtgtccctattgctgttaaggacaacatcgacgttagaggtctacgcaccaccgctgcatgtccatcctttgcatatgagccttccaaagactctaaagtagtagaactactaagaaatgcaggtgcaataatcgtgggtaagacaaacttggaccaatttgccacaggattagtcggcacacggtctccatatgggaaaacaccttgcgcttttagcaaagagcatgtatctggtggttcctccgctgggtcagcatcggtggtcgccagaggtatcgtaccaattgcattgggtactgatacagcaggttctggtagagtcccagccgccttgaacaacctgattggcctaaagccaacaaagggcgtcttttcctgtcaaggtgtagttcccgcttgtaaatctttagactgcgtctccatctttgcattaaacctaagtgatgctgaacgctgcttccgcatcatgtgccagccagatcctgataatgatgaatattccagaccctatgtttccaaccctttgaaaaaatttccaagcaatgtaacgattgctattcctaaaaatatcccatggtatggtgaaaccaagaatcctgtactgttttccaatgctgtcgaaaatctatcaagaacgggcgctaacgtcatagaaattgattttgaacctcttttagagttagctcgctgtttatacgaaggtacttgggtggccgagcgttatcaagctattcaatcgtttttggacagtaaaccaccaaaggaatctttggaccctactgttatttcaattatagaaggggccaagaaatacagtgcagtagactgcttcagttttgaatacaaaagacaaggcatcttgcaaaaagtgagacgacttctcgaatcagtcgatgtcttgtgtgtgcccacatgtcctttaaatcctactatgcaacaagttgcggatgaaccagtcctagtcaattcaagacaaggcacatggactaattttgtcaacttggcagatttggcagcccttgctgttcccgcagggttccgagacgatggtttgccaaatggtattactttaatcggtaaaaaattcacagattacgcactattagagttggctaaccgctatttccaaaatatgttccccaacggttccagaacatacggtacttttacctcttcttcagtaaagccagcaaacgatcaattagtgggaccagactatgacccatctacgtccataaaattggctgttgtcggtgcacatcttaagggtctgcctctacattggcaattggaaaaggtcaatgcaacatatttatgtacaacaaaaacatcaaaagcttaccagctttttgctttgcccaaaaatggaccagttttaaaacctggtttgagaagagttcaagatagcaatggctctcaaatcgaattagaagtgtacagtgttccaaaagaactgttcggtgcttttatttccatggttcctgaaccattaggaataggttcagtggagttagaatctggtgaatggatcaaatcctttatttgtgaagaatctggttacaaagccaaaggtacagttgatatcacaaagtatggtggatttagagcatattttgaaatgttgaagaaaaaagagtcccaaaagaagaagttatttgataccgtgttaattgccaatagaggtgaaattgccgttcgtattatcaagacattaaaaaaattgggtattagatcagttgcagtttattccgaccctgataaatattctcaacacgttactgatgcagatgtttctgtaccccttcatggcacaaccgcagcccaaacttatttagacatgaataagatcatagatgccgctaagcaaactaatgcacaggccattattcctggttatggtttcttgtcggaaaatgcggatttttctgatgcgtgcaccagtgctggcattacctttgttggtccttcgggagatattatcagaggtttagggttaaaacattctgctagacagattgcacagaaggctggcgttcctctagtgccaggctctttgcttatcacatcagttgaagaggctaagaaagtcgcagcggaattggaatacccagttatggtgaagtcaactgctggtggtggtggtattggtttgcagaaagtcgattctgaagaggatatcgagcatatttttgagactgtgaaacatcaaggtgaaacattttttggtgacgctggtgtatttctggaacggtttatcgaaaatgccagacatgttgaagtccaacttatgggagatggttttggtaaggccattgctttgggcgaacgtgattgttctttacagcgtcgtaaccaaaaagttatcgaagaaactcctgcaccaaatttgccagaaaagacgaggttggcgttaagaaaggcagctgaaagtttgggatctttattgaattacaagtgtgctggtacggttgaatttatttacgatgagaaaaaggacgagttttactttttagaagttaatacaagattacaagttgaacacccaataacagaaatggttacagggttagacttggtcgagtggatgatcaggattgccgctaatgatgcacctgattttgattctacaaaagtagaagtcaatggggtttcaatggaggcacgtttatatgctgaaaatccattgaaaaatttcagaccttctccaggtttacttgtcgatgtgaaatttcctgattgggcaagagtcgatacttgggttaagaaaggtactaatatttctcccgaatatgatccaacattggccaaaattatcgttcatgggaaagaccgtgatgatgcaatttccaagttaaatcaagcgttagaagaaacaaaagtttacggatgtattactaacattgactacctgaagtctatcattaccagtgatttctttgctaaagcaaaagtttctacaaacattttgaactcttatcaatatgagcctaccgccatcgaaattactttgcccggtgcacacactagtattcaggattaccccggtagagttgggtactggagaattggtgttccgccctctggtccaatggacgcatattcgtttagattggcgaacagaattgttggtaatgactacaggactcctgccattgaagtaacgttgactggtccatccatcgttttccattgtgaaactgtcattgccattactggtggtaccgctctatgtacattagacggccaagaaatcccccaacacaaaccggtcgaagttaagaggggatctactttatccattggcaagttgacaagcggctgtagagcatacttaggtatcaggagtggcattgatgtgcctaaatacttgggctcttattctactttcactctaggaaatgtcggtggatacaatggaagggtgctaaaacttggagacgtactattcttaccaagcaatgaagaaaataaatcagttgagtgccttccacagaatattcctcaatcattaattcctcaaatttccgaaactaaggaatggagaattggtgtaacatgtggtccccatgggtctccagatttttttaaacctgagtccatcgaagaatttttcagtgagaagtggaaggttcattacaactccaatagatttggtgtccgtttgattggacctaaacctaagtgggcaagaagtaatggtggtgaaggtggtatgcatccttcaaacactcacgattacgtttattctctgggtgcaattaatttcacgggtgatgagccagttattattacttgcgatggtccttccttaggtggttttgtgtgtcaagctgttgtcccagaagcagaactgtggaaggttggacaggttaaacccggtgactccattcagtttgtgccactttcttacgaaagctcgagatccttaaaggaatctcaggatgttgcaattaaatcattggatggtactaagttaagacgcttagactctgtttcaattttaccatcattcgaaacgcctattcttgcacaaatggaaaaagtgaatgagctttcaccaaaggttgtatacagacaagcaggtgatcgttatgttttggtggaatacggtgataatgaaatgaattttaatatttcctatagaattgaatgcctgatctcccttgtgaaaaataataagactgttggtattgttgaaatgtcccaaggtgttagatctgtattgatagaatttgatggttacaaagtcactcaaaaagaattgcttaaagtattggtggcatatgaaacagaaatccagtttgatgaaaattggaacataacttctaatataataagattaccgatggctttcgaagactcgaagactttggcatgtgttcaaaggtatcaagaaacaattcgttcgtctgctccatggttgccaaataacgttgatttcattgccaatgtaaatggaatttcaaggaatgaagtttatgatatgttgtattctgccagatttatggttttaggtttaggtgatgtcttcctagggtcgccttgtgctgttccattagatcctcgtcacagatttttgggaagcaagtacaacccaagtaggacatatacagaaagaggtgcagtcggtattggcggtatgtatatgtgcatatatgctgctaacagtcctggtgggtaccaattagtgggtagaacaataccaatttgggacaaactatgtctggccgcatcttctgaggttccgtggttgatgaacccatttgaccaagtcgaattttacccagtttctgaagaagatttggataaaatgactgaagattgtgataatggtgtttataaagtcaatatcgaaaagagtgtttttgatcatcaagaatacttgagatggatcaacgcaaacaaagattccatcacagcattccaggagggccagcttggtgaaagagcagaggaatttgccaaattgattcagaatgcaaactctgaactaaaagaaagtgtcacagtcaaacctgacgaggaagaagacttcccagaaggtgcagaaattgtatattctgagtattctgggcgtttttggaaatccatagcatctgttggagatgttattgaagcaggtcaagggctactaattattgaagccatgaaagcggaaatgattatatccgctcctaaatcgggtaagattatcaagatttgccatggcaatggtgatatggttgattctggtgacatagtgccgtcatag

SEQ ID NO: 81750 - DNA, 123 bp, Saccharomyces pastorianus
atgaacgcatattggtttcattatagagcgtcaatcaagaaagaggcaccaaactataaacgcacatttctcggtagggctaggaacgctttcctgcttatcttatctgaagcttatttatga

SEQ ID NO: 81751 - DNA, 1302 bp, Saccharomyces pastorianus
  modified_base (1150)..(1194): a, c, g, t, unknown, or other
atgtcattttccaattctaaagacaagtccgttgttgccgtctacaagctggtcaaagcgccaatctactctcattgcttttctcaagataaatctattttagccgttacatgcgaaacagattgtcttgtctatagagtttcaaacaacacacctcccgttttattcgcaacgttgaaagatcatgataaaaccattactgctgtggacatttccatacatggtcgtattgtgacttgctcccaagaccgtaatgcttacgtttgggagccattgagtgatgggacatacaagcccacgttagtacttcttcgtattaacagagcagctacttcagttacatgggcaccaaatggttataagtttgctgttgggtccagtgctagaatcatcgctgtttgttattacgaacacgagaataattggtgggtatccaagcacatcaagaaacccatcaaatctaccatcaattgcctgtcttggcatgcaaatggagtcctattagctgctggtggtactgatgggtttatgcgtgtgttcagcgggtttatcaagggtttggattccaaggaatccgtcgccggatcaccctggggccagaaattcccttttggttgtttaatcagggagtggtatcagggttcttatatccatgatgtggaatggagaagtcagatggaaagaattgcttatgtagcgcatgatggtactttgaatgttgtcgattaccaatctccagtgcaatctgtcaatgctccggaaggtttaccttacaggtccttagtatggataaacgaccacgagattgtttgtggaggatactcttgtcatccggtattgttcagcgaagcctctgaaggctggaaatttgcgaagaatctagacaaatcagacaataacaagtcttctgccttaactgcatctggtaatacagacgagctgagtggtaataatgatgaaagttcaactttcggtatttccgcattgagaaagtttaaagaattagacttgaaaggtaaagttagcacagatgtccaagaaagtgcacatgaaaacgccattgtggaattaagaccttttgcggaatccaacggccaaatcacaaaagtctcttcctgtgggttagacggtaagattgtcatttatacannnnnnnnnnnnnnnnnnnnnnnnnnnnnnnnnnnnnnnnnnnnnccctacctcataatacaccttgagtttgtattgtttttttcttcacttggcatatacagactatattattacaactcacagcacaatgtagtgtaccgtaaaaaataa

SEQ ID NO: 81752 - DNA, 1236 bp, Saccharomyces pastorianus
atgtgcactccagatgaaaacgattacaaaacatcaactgacccagatacatctgcaaatacaaaccatactctcgaaaaaaagaagagaaaaaagagaaaaaacacaaacgtggcatgcgtgaactgttcgagattgcatgtgtcatgtgaggccaaaaggccatgcttacgatgtatcagcaagggcctcacggctacatgcgttgacgctccaagaaagaaaagcaagtacttggctggaataccgaatagagagctcccaatgagcatacaaccggaccttccaccccgcaagatcatgatacccatttataacaactccagcaatagtagcctcaacgtaaatacatgggagacagcaaaattcaccagcccacagcatatagttcacaaagctaaattcctatcgaatgctgcagattccgagtactctattctgtcgaatatcatctatcaagacacattgtctgacaagatccctattgacatcctgtactccaacaccaattccacatccaactccacaataggcaatagcagtaacaatagccctacgggtacaaatacaagccctgaagaaacagaaatggagaaaattcgccagttgtacagcgaacagcgagcaaacatgcccccacatccgtatccatcttccaatcaaaacgtttattctattctactgggaccaaattcagccaagattgtagcttcgcaagttaatcttttcgcgaaccatttccccttagtgcccgttgattcagctgataattccttaaactttaaaagattattgccacgggacccatctgaaaagagctcccaaattaattgggactcaagcataaaccaatattacttgaacagcgaaacggtaacatttcccgagttggctatccccttaaagcggaggaaaaaccatttggtctctgtatccctggaaagctgttcaccagacgctgccaacatcaagagcaatgtaggatgggaacattcattacgttattctactccaatggaaatatacacctccataaatgcccccttttcgcatacacctggattccaccatcttttggtgtacctaaagcatcgattcaaccagcaggatctggtgaagatgtgtcggtccattgccgaattccggcccattttcattgcgtgttctgtaactttaaccgaggaggacatgatttttatggagcaatgctaccaaagaactctattagatatgtaa

SEQ ID NO: 81753 - DNA, 417 bp, Saccharomyces pastorianus
atgttgtgcgccatcaaaagcacaggttatcggtatcctcgcacgggagccttaaatctactacgtggacgaccatttaatatggccacccgaaaaataactactgaaaggatccccggccctcccaagctgccaagagaagagcaggaagagttcgaaagacttcagaggattgccacatcgcaagaggcaatagatcagtataatgcgcaggccaccggcgatcgtacaaaggagagtttgaattcaccgcttttaaccaaaaacgatattgggtcattctcgcctgaattttccaagaccatacctgaattcgaaggtgatgttaaccccaagactggtgaagttgggggtcccaagcaggacccgttgagacacggcgattattcgtttaacggaagagtaacggatttctag

SEQ ID NO: 81754 - DNA, 288 bp, Saccharomyces pastorianus
atgaagttcccagccgattaccattatacgtcgccgtttcgttcatgtaaatattcaaatatactacacttcatatctttgcttcttatattttcgcgcgtaggtttgcctaattacatttttatattcctcatcaataaagccgccaacaaagagcacagggtagaaactctgctgtctgggaactcggctaacgcttgtaagctatttaatattctcaaatcatttcaacacctcttttttttttttttcaaatatgtactattttctctatttccattaagttag

SEQ ID NO: 81755 - DNA, 1737 bp, Saccharomyces pastorianus
atgaccggttccgcatttaacatcatctggggtcaaattccggctctcatgggatacaactcattagtgaataccagagaagcaacgtataaggttgtaattaacactctgaaacatttaccaaacacaaagttagacgccgtttttggcttgattccgttggtaatcctctatgtatggaaatggtggtgtggtacatttggtataactttggcagatagatattatcgaaatcaaccaaaggtagcaaatagactgaaatccttctatttctatgcacaagctatgagaaatgccgtcgtcatagtagtttttactgccatatcgtggagcataacaagaaacaaatcttcaaaagaccgtccaatcagtattctgggtacagttccctcgggcttaaatgaggtgggagttatgaaaatcccagacggtctgctatctaatatgagttcagaaatacctgcttcaattatcgttctggtgttagaacacatcgctatttcaaaatcctttggtagaattaacgactacaaggttgtccctgaccaagaacttattgcgattggtgtgacaaatttgatagggacattttttcactcatatccagcaactgggtcattttccagatctgctttgaaagcaaaatgtaacgtgcgcactccgttttctggggtattcactggcggttgcgttctattagcactttattgtttaactgacgccttctttttcattcctaaagcgacactatcggcggttattattcatgctgtttctgatttgctgacttcttacaaaaccacctggaccttctggaagaccaacccgttagattgtatctcatttatcgttacagtgttcatcacagtattttcatccattgaaaatggtatatattttgcaatgtgttggtcatgtgcaatgttactattgaaacaggctttccctgctggtaaattccttggtcgtgttgaggtggcagaagtattgaacccaacagtacaagaggatattgatgctgtgatatcatctaatgaattacctaatgaactgaataaacaggttaagtctactgttgaggttttaccagccccagagtataagtttagcgtaaagtgggttccgttcgatcatggatactcaagagaattgaatatcaataccacagttcggcctcctccaccaggtgtcatagtctatcgtttgggtgatagctttacttacgtgaactgctcaaggcattatgacattatatttgatcgtattaaggaagaaacaaggcgaggccaacttataaccttaaggaaaaagtcagaccgtccatggaatgatcctggtgaatggaaaatgccagattctttgaaatcactatttaaatttaaacgtcattcagcaacaacgaatagtgacccaccgatatcgaatggaagcagtaacggagaaacatatgaaaagccgctactgaaagtcgtctgcctggatttttcccaagttgctcaagtggattcaaccgctgttcaaagcctggttgatctgagaaaagctgtgaataggtatgcggatagacaagtcgaattccattttgccggaattatatctccatggatcaaaagaagtcttttgagtgttaaattcggaactacaaatgaggaatatagtgacgactctattatcgctggccattctagttttcacgttgcaaaagttttgaagggggatcctctagagtcgacctgc

SEQ ID NO: 81756 - DNA, 552 bp, Saccharomyces pastorianus
atgtcacgtaagagctcgactgaatatgtgcataatcaggaggatgctgatatcgaagtatttgaatcagaataccgcacatatagggaatctgaggcggcagaaaacagagacggacttcacaatggtgatgaggaaaattggaaggttaatagtagtaagcagaaatttggggtaacgaaaaatgagctatcagatgtcctgtacgattccattccagcgtatgaagagagcacagtcactttgaaggagtactatgatcattctatcaaaaacaatctaactgcgaaatcggcaggaagttacctcgtatctctttttcctattataaaatggtttcctcattataactttacgtggggctatgctgatttagtggcaggaattacagttggctgcgtactcgtgccccaatctatgtcatacgcacaaatcgctagtttatctcctgaatatggtttgtattcctcctttattggtgcgtttatatattctttgtttgccacatcgaaagatgtttgtattggtccggtcgctgtaatgtcactataa

SEQ ID NO: 81757 - DNA, 192 bp, Saccharomyces pastorianus
atggaactttttataccttgcccagagcgcctcaagaaaattatgctgaaagaagaattgaggaaggaactactcatcttacgttgtttgtatcatcccacgatccaaatcatgttacctacgttaggtacgctaggaactaaaaaaaagaaaagaaaagtatgcgttatcactcttcgagccaattcttaa

SEQ ID NO: 81758 - DNA, 204 bp, Saccharomyces pastorianus
atgaataggtacttgtttgagaaaaaagtctggaataatgaagagtttttctacgatgggattgactgtgaatggttttttagccacttcttctaccgcgttctatctgcgaagaaatctatgcgggctctatcattgaatgtggaactatggccatacattaaagaagcgcaattatcctgcagtgaggagtccttagcgtaa

SEQ ID NO: 81759 - DNA, 2340 bp, Saccharomyces pastorianus
atggatgatgccttgcatgctttgtcctcgttgactgcaaagaagagaactaccacctacaaaaaagttgctgttcccatactagatgagaacgataatactaatggaaatgggcccaatgacatagacaatccgccagagttgactgggaacgggtttttatttgccaatgccacattaaatcgtgttaagaacagattagaaggcaagaaagcacccgaacagaatcacaataatggaaaagataggagtgagaattcgttaccaactcaattaatctctaatctttacgatggtggtgaagagctggagaaatccgaagttaaagataatagttacagtgagaaaaatgtctcttcttcattcacgcagacgcaaagaatacctgtcagcatccaacaagacaaggtgtttaacgtacctatccattccgttaatgacgggaaacccacccaattaatcaaagaagatggtctcgtcaacgaaacttctcaagcgctgaaaacacctctcacgacaggacggccaggggctacacagcgtatagatagcagcggtgcaacctcacaaactcagcctataaaatcaattgaaccacaatcccaaataattacgacttccagcaatcattctaatgctctgtcgccgaaaattcctataattccaacggaacttattggaactagtcctttatttcagtccattcaaaatcgtggtcctgacacccaaatggatgtaccaccacagactgcgcatgatgaggataagacacaagcaattggtattccacaggctacgcatcaggaacagaaaacccaaatagatacagtcgcacaaacacttcaagatgaagtaccacacacattaaaaattcgggaaatacaaagcgaattggcttcagaagattctaaaagggaaaaagctagaaatgtcgaatacaagaaaccgcaaaagccaataccaaccaaaaaatttttttctaaagagtcttttcttgctgattttaacgattcgtcctcaaatgaggacgatgatataaagctggaaaatgcacatccaaaaccagtacagaatgacgatgaactgcatgaaaacaaaagtgttgaattaaatctaactgatgagacaagaataaatgagaaaagggttccactattgagctcctatgctaataatttgaaacgggaaattgactcctcgaaatgcataacactggacctcgacagcgacagtgacgaatatggagatgatgatatggatagcattaaattatccaaagatgaaagcgttttgccaatctctcagttatcaaaggcgactatattaaacctgaaggcaagactctctaaacaaaatcaaaagttgtctcaaaggccgaataaaagtaaagacccaaaagttgatcataatgtactattaaataccttaaggaaagctagcaggaaacaaattctggatcatcagaaagaagtgattgaaacgaaaggtctgaagctggaggatatggccaaagaaaaggaaatagtagagaacttgctagaacaagaaattcttagaaataaaagaatcagacaaaaagagaagagaagggaaaaacttgaagaaaatgactttcaattgaacgcccatgattccggttctgactcagggtcagagtcttctggatttgcattgagtggtaatgaaattgccgattatgaatcatctggtagtgaaaatgacaatcgtagagaatccgatagtgaaaaggaagatgatgaaattattctaaagcaaaaaaaatcccaccacgtgaaacatatcattaacgaatcagactctgataccgaagtcgaagccaaacccaaagagaaagctgatgaaagtctaccgaaaaggatcgccattaatctgggccattacggtgataatatcggagaggataccgacaaatttcaagaaaccaatgttctagatacacaaaacattgaagaggtgatggccgaaagaaatacaatcgaaaatgaagtcaaagatgatgtatacgtcaatgaagaagctgatgaagcaattcgccgtcagctgattgacaaagagaaattgcaactaaaacagaaagaaaaggagcacgaggctaagataaaagagttgaagaaaagaggtgtcacaaacttctttgaagtggaagccgaagaatccgaggatgaatggcatggtatcggtggtgcagatggagaaggatctgacgactatgattctgacctagaaaaaatgatcgatgattattccaagaacaatttcaatcctcatgaaatcagagaaatgctgccgcagaaaataaggaaatggatatcaaaatga

SEQ ID NO: 81760 - DNA, 276 bp, Saccharomyces pastorianus
atggatatcaaaatgataaacaaaattctttatgacattaaaaatggaggatttcgtaataaaagagcaaaaaatagcttagagctagaactaagtgatgatgatgaagacgacgtactacaacaatatcgtctcaaaaggagagaattgatgagaaaaaggagattagaaattggcgatgatgcaaagcttgttaaaaacccaaagtcgagcgcattttttgaaagtatggtggaagatattatcgatataaaaaccccttcggggctgaagagg

SEQ ID NO: 81761 - DNA, 306 bp, Saccharomyces pastorianus
atgaagttttctgctggtgccgtcctgtcatggtcctccctgctgctcgcctcctctgttttcgcccaacaagaggctgtggcccctgaagactccgctgtcgttcagttggccaccgactctttccatgaataccttcagtcgcacgacttggtgcttgcggagttattagctccatggtgtggccactgtcagaacatggctcctgaatacgttaaagccgccgagactttagttgagaaaaacattaccttggcccgatcgactgtacttgcaaccaggatctgtgtatggaacacaacattc

SEQ ID NO: 81762 - DNA, 1065 bp, Saccharomyces pastorianus
atgagctatggaactataaatgatatgaatgaatcggtaacgaactatcgaataaaaaaagcccaaaacaatatcaagggatggtacgcttactcattttctagcgaaccatttgtcgtttctgcggtttcaacgtatattcccttactactgcagcaatttgcgagtataaatggtgtaaaagttcacgatcactccataccctgcctgtcagaaacgggtagtgattcagataagtgtgttcttggtttgttcaacaatcggatcttcgtagatacttcaagttttgcattatatgccttttcccttagcgttttgttccaaactataatagtcatttccgtttcagggatagtagatctctgggggagcgttaaattcaaaggcagaattctggtttggtttggtattgtgggcgcattgtcgactgttgcgatttcaaaattgaatgatacccagatttattctctggctgggctttatatagtggccaatggttgttttggcgttatcaatgttgttgggaattctcttctgcccatttttgtcaaggattctttgaaatgtcaaagtcaaggagcttatgaacctgataaggtagactcgttaactactgttattagcggtagaggtgcatctttaggttattcaagtgccctcattgttcagatcgtatctatgttcttagtcgcatctaaaaagggcagtaagcaggatgttcaagtggctgttcttttcgttgggatttggtggtttgtgtggcaactgcccatgatctggttgattgacgatgtgacaataccgataagagctgacgattctacatccgcccgcagtccgtatcccggtgagcaagacgccttgggtcaactaaactggaagaattacctttcatatggttgggtttcgcttttcgaatcgtttaaacatgccagactattgaaagatgtgatgatttttcttattgcgtggtttattattagtgattccattacaactataaattctacagcggttttgttctccaaggcagaactgcacatgagtaccctcaatgaatcatga

SEQ ID NO: 81763 - DNA, 99 bp, Saccharomyces pastorianus
atgataagtgttttgaccgttgtaaatgcaatgctgggtgcctttatgattccactatttcttgccacaaagtttcgtggacttctagtcaaactttga

SEQ ID NO: 81764 - DNA, 2172 bp, Saccharomyces pastorianus
atggttttgccgattctaccgttaattgatgagctggcctcatggaatagtaagaaggaatacgtttcacttgttggtcaggtacttttggatggctcgagcctgagtaatgaagagattctccagttctccaaagaggaagaagttccattggtggctttgtccttgccaagtggtaaattcagcgatgatgaaatcattgccttcttgaacaacggagtttcttctctgttcattgctagccaagatgctaaaacagccgaccatttggttgagcaattgaatgtgccaaaggagcgtgttgttgtggaagagaacggtgttttctccaatcaattcatggtaaaacaaaaattctcgcaagataaaattgtgtccataaagaaattaagcaaggatatgttgaccaaagaagtgcttggtgaagtacgtacagaccgtcctgacgggttatataccacactagttgtcgaccaatacgagcgttgtttagggttggtgtattcttcgaaggaatctatagcaaaggccatcgatttgggtcgtggcgtttattattctcgttctagaaatgaaatctggatcaagggtgaaacttctggcaatggccaaaagcttttacaaatctctactgactgtgattcggatgccttaaagtttatcgtcgaacaagaaaacgttggattttgccacttggagaccatgtcttgctttggtgaattcaagcatggtttggtggggctagaatctttactaaaacaaaggctacaggacgctccagaggaatcttatactagaagactattcaacgactctgcattgttagatgccaagatcaaggaagaagctgaagaactgactgaggcaaagggtaagaaggagctttcttgggaggctgccgatttgttctactttgcactggccaaattagtggccaacgatgtttcattgaaggacgtcgagaataatctgaatatgaagcatctgaaggttacaagacggaaaggtgatgctaagccaaagtttgttggacaaccaaaggctgaagaagaaaaattgaccggtccaattcacttggacgtggtgaaggcttccgacaaagttggtgtgcagaaggctttgagcagaccaatccaaaagacttctgaaattatgcatttagtcaatccgatcatcgaaaacgttagagacaaaggtaactctgcccttttggagtacacagaaaagtttgatggtgtaaaattatccaatcctgttctcaatgctccattcccagaagaatactttgaaggtttaaccgaggaaatgaaggaagctttggacctttcaattgaaaacgtccgcaaattccatgctgctcaattgccaacagagactcttgaagttgaaacccaacctggtgtcttgtgttccagattccctcgtccaattgaaaaagttggtttgtatatccctggtggcactgccattttaccaagtactgcattaatgcttggtgttccagcacaagttgcccaatgtaaggagattgtgtttgcatctccaccaagaaaatctgatggtaaagtttcacccgaagttgtttatgtcgcagaaaaagttggcgcttccaagattgttctagctggtggtgcccaagccgttgctgctatggcttacgggacagaaactattcctaaagtggataagatcttgggtccaggtaatcaatttgtgactgccgccaaaatgtatgttcaaaatgacactcaagctctatgttccattgatatgccagctggcccaagtgaagttttggtcattgccgatgaagatgctgatgtggattttgttgcaagtgatttgctgtcacaagccgaacacggtattgactcccaagttatccttgttggtgttaacttgagcgaaaagaaaattcaagagattcaagatgctgtccacaatcaagctttacaactgccacgtgtggatattgttcgtaaatgtattgctcacagtacgatcgttctttgtgacggttacgaagaagcccttgaaatgtccaaccaatatgcaccagaacatttgattctacaaatcgccaatgctaacgattatgttaaattggttgacaatgcagggtccgtatttgtgggtgcttacactccagaatcgtgcggtgactatgactta

SEQ ID NO: 81765 - DNA, 1353 bp, Saccharomyces pastorianus
atggtagcaacaataatgcagacgacaacaactgtgctgacgacagtcgccgcaatgtctactaccttagcatcaaattacatatcttcgcaagctagttcctcgacgagtgtaacaacagtaacgacaatagcgacatcaatacgctctacaccgtctaatctactcttttctaatgtggcggctcagccaaaatcatcttcagcaagcacaattgggctttcaatcggacttcccatcggaatattctgtttcggattacttatccttttgtgttatttctaccttaaaaggaattcggtgtccatttcaaatccacccatgtcagctacgattccaagggaagaggaatattgtcgccgcactaattggttctcacggttattttggcagagtaagtgtgaggatcagaattcatattctaatcgtgatattgagaagtataacgacacccagtggacctcgggtgataacatgtcttcaaaaatacagtacaaaatttccaaacccataataccgcagcatatactgacacctaagaaaacggtgaagaacccatatgcttggtctggtaaaaacatttcgttagaccccaaagtgaacgaaatggaggaagagaaagttgtggatgcattcctgtatactaaaccaccgaatattgtccatattgaatccagcatgccctcgtataatgatttaccttctcaaaaaacggtgtcctcaaagaaaactgcgttaaaaacgagtgagaaatggagttacgaatctccactatctcgatggttcttgaggggttctacatactttaaggattatggcttatcaaagacctctttaaagaccccaactggggctccacaactgaagcaaatgaaaatgctctcccggataagtaagggttacttcaatgagtcagatataatgcctgacgaacgatcgcccatcttggagtataataacacgcctctggatgcaaatgacagcgtgaataacttgggtaataccacgccagattcacaaatcacatcttatcgcaacaataacatcgatctaatcacggcaagaccccattcagtgatatacggtactactgcacaacaaactttggaaaccaacttcaatgatcatcatgactgcaataaaagcactgagaaacacgagttgataatacccaccccatcaaaaccactaaagaaaaggaaaaaaagaagacaaagtaaaatgtatcagcatttacaacatttgtcacgttctaaaccattgccgcttactccaaactccaaatataatggggaggctagcgtccaattagggaagacatatacagttattcaggattacgagcctagatga

SEQ ID NO: 81766 - DNA, 1902 bp, Saccharomyces pastorianus
atgtcgtcgtcgaagtctctatacgaactgaaagacttgaaaaatagctccactgaaatacatgccacggagcaggataatgaaattgaatatttcgaaacaggctccaatgaccgtccatcctcacaacctcatttaggttacgaacagcataacacttctgccgtgcgtaggtttttcgactcctttaaaagagcggatcagggtccacaggatgaagtagaagcaacacaaatgaacgatcttacgtcggctatctcaccttcttctagacgggctcaagaactagaaaaaaatgaaagttcggacaacataggcgctaacacaggtcataagtcggactcgctgaagaaaaccattcagcctagacatgttctgatgattgcgttgggtacgggtatcggtactgggttactggtcggtaacggtaccgcgttggttcatgcgggtccagctggactacttattggttacgctattatgggttctatcttgtactgtattattcaagcatgtggtgaaatggcgctagtgtatagtaacttgactggtggctacaatgcataccctagtttccttgtggatgatggttttgggtttgcggtcgcttgggtttattgtttgcaatggctgtgtgtgtgtcctctggaattggtgaccgcatccatgactatcaaatattggacgacatctgtgaacccggatgtgttcgtcattattttctatgttttggtgattactattaatattttcggtgctcgtggttatgcagaagctgagttcttcttcaactgttgcaaaattttgatgatgactgggttcttcattcttggtattatcatcgatgttggtggcgctggtaatgatggttttattggtggtaaatactggcacgatccgggcgctttcaatggtaaacatgccattgacagatttaaaggtgttgttgcaacattagtgactgctgcttttgcctttggtggttcagagtttattgccatcaccactgcagaacaatctaatccaagaaaggccattccaggtgcggccaaacaaatgatctacagaatcttattcctattcttggctaccattattctactgggtttcttggtgccatacaattccgatcaattattgggttctaccggtggtggtactaaagcctcgccatatgtcattgctgttgcatcccacggtgtccgtgtcgtcccacacttcattaacgccgttattctactttccgtgctgtccatggctaactcctccttctactccagtgctcgtttatttttaactctatccgagcaaggttacgctcctaaggttttctcctacatcgacagagccggtagaccattgattgccatgggtgtttctgcattgtttgccgttattgccttctgtgctgcatctcccaaggaagaacaagttttcacttggttattggccatttctggtttgtctcagcttttcacatggactgccatttgtttatcccatcttagatttagaagagccatgaaagtccaagggagatctcttggagaattgggtttccaatctcaaactggtgtttggggatctgcctacgcttgcattatgatgattttaattcttattgcccaattttgggtcgctatcgcccccattggtgaaggtaagctggatgcacaagcctttttcgaaaactacttggctatgccaatcttgattgcactttatgtcggctacaaggtctggcacaaggattggaaactgttcatcagggccgacaagatcgacctagattctcatagacaaatctttgatgaagaattaatcaagcaagaagacgaagaatatagggaacgtttgaggaacggaccttattggaaaagggtcgttgccttctggtgttaa

SEQ ID NO: 81767 - DNA, 483 bp, Saccharomyces pastorianus
atgactgtagtgaataccgagacccattctgctgctaaaccatcgagtactataggcccatggaagcttggtgaaacactgggctttggtagcaccggcaaggtccaacttgcgcaacatgagcgcacgggccatagaacagccgtcaaagtaatctcaaagtccattttcaacaacaacggaaaccacagtaacgacgattcagtgctgccatacaacatcgagcgtgagattgttattatgaaacttttgagccacccaaacgttctgagtctttacgacgtttgggaaaccaacagtaacctgtaccttatcctggaatacgccgaaaagggagaactgttcaacttgcttgtggaccacggtcccttgcccgagcgtgaggccatcaattgcttcagacagataattataggcatttcatactgccatgcgctaggaatagtacatcgggatttagccagaaaatcttttgctcgatag

SEQ ID NO: 81768 - DNA, 1161 bp, Saccharomyces pastorianus
atgacctcagaaaagaaatcctcccctaaaagggcagtcgtttcatctcccaaaattaaaaagaaaagtgcttctttttccacaaaagaatcacaaactgctaaatcttctcttcgagcagttgaattcaaatctgatgacttgatcggaaaaccacctgatgttggaaatggcgcacatcctcaagaaaataccagaatatcttcagtagtaagggacacaaaatatgtctcctacaatccctctcagcatgtgacagaaaatgccagtaacgaaaaaaatgtcgaaccaaaagcggatcaatccacaaagcaggataacatttccaattttgcagatgtagaggtatctgcgtcttcttatcctgaaaaacttgatgcagaaacagatgatcaaataattgggaaggcgacgaattcgtcatcagttcatggaaataaagagctgtcagaccttgctgaggtgactacagcaaatagggtttctacaacatcggctggggaccaacgtattgatacccaaagcgaatttttacgcgcagctgatgttgaaaacttaagtgatgacgatgaacacagacagaatgaaagtagagtttttaatgatgacctctttggtgattttattcctaagcattaccgtaataaacaggagaacattaacagctcgagtaatttgtttccagagggaaaggtgccccaagaaaagggtgtatcaaatgaaaacactaacatatctctcaaaactaatgaagatgcatctacattgacgcagaaactctctccacaagcgagtaaagtgctgacagaaaattctaatgaattaaaagataccaacaatgaagggaaggacgcaaaggacataaaattaggagatgattacagtgataaagaaacagcgaaagaaataactaaaccaaaaaattttgttgaaggaataactgaacggaaagaaatattccccactattcctaggttagcgccgccagcttcaaaaattaactttcaaaggtcaccatcctatattgagctctttcaaggaatgagggtggttttagataagcatgatgcccattataactggaaacgcttggctagtcaagtctccttaagtgagggactgaaagtcaatactgaggaagatgcggcagatatgatttaa

SEQ ID NO: 81769 - DNA, 231 bp, Saccharomyces pastorianus
atggccaaagatttactctgtgtaaatgagaatttgataaaaaacttagaacatcaattggaagaggtcaagcacccttcaacagacgaacatagggctgttaatagcaaactttccggtgcatctgatttcgatgctactcacgagaagaaaagatcatacggcaccataacaacatttagaagctataaaagcgacttgaaggacagtccatcaggcgataatagtaat

SEQ ID NO: 81770 - DNA, 1695 bp, Saccharomyces pastorianus
atgcatttgctgtcatctgttacagcgctatccattactttcaccatcagacttatcacaaatatgtccaataaatcggaaaattgcgactatgaccccccttatgctggagatttggctagtagttgccagttaataacagcagttcctccagaagatctggggaagcgcttctttacatcaggacttctgcaaaatagatttgtcagctctaccctgttagatgttatttatgaaaacaatgaaaccaccatcgaactaaataataggttggtattccatctgggtgaacaacttgaacaactttttaacccagtcacagaatactcaccggaacagacagaatatggttataaggcgccagaggacgaattacccacagaatcggatgatgatcttgtcaaggccatttgcaacgagttattacaactacaaacaaattttactttcaatttggtagaatttttgcaaaaattcctgatcgccttgagagtcagagtactcaatgaagaaattaatgggttatccacaaccaaattaaatcgactcttcccacctacaatagatgaagtcacaagaatcaattgtatttttctagactcgctaaagacagcaatcccttacggttccctcgaagtactgaaggcatgcagcattactattccttatttctacaaagcatatacaagacacgaggcggccacaaagaacttcagcaaagatattaaattgtttattaggcatttcagcaatgtaattccagaaagagaggtctacacggaaatgaaaatcgagagtataattaagggacctcaggaaaaactactgaagctaaagttaattatagggagattgtggaagtcgaaaaaatggagaccgaaaaatcaagaaatggcaaaaaaatgctacaacaatatcattgatgtcattgattcgtttggaaaattagattccccacttcattcttatagtaccagagtatttactccatcgggaaaaatccttacagaattagccaaatgctggcccgtggaactgcaatacaaatggctgaagagaagggtagtcggtgtgtatgatgtagtggatttgaatgatgaaaataagagaaatttattagtcatattcagtgattatgtggttttcatcaatatactggaggcagaaagttactacacttcagatggatcaaacaggcccttaatctcagatattttaatgaactcattgatcaacgaagttccgttgccctccaagatccctaagttgaaagtggagcgtcattgctatatagatgaggttctagtttctatattagacaaaagcactctacgttttgatcgattgaagggaaaagattctttctcaatggtatgtaaattatcctctgcatttatctcttcttcgtcagttgctgacttgattacgaaggctagaattttggaaaaagacactgcatttcatttatttaaagctagtagaagccattttacattatattctactgctcacgagctttgcgcttatgattccgaaaaaataaaatcaaaatttgccttattcctgaacataccaccatccaaggagatattggaggtcaacaaccttcatttggctttttttgcaagattttgcagtaacgacggtagagataacatcgtaatcttagacgtcttaaccaaacatgacgattaa

SEQ ID NO: 81771 - DNA, 324 bp, Saccharomyces pastorianus
atggagaaagacctgtcgtctctttactctgaaaagaaagacaaagagaacgatgaaaccttatttaacatcaaactatccaaatctgttgtcgagaccacaccgctaaatggtcattcattgtttgatgatgataaatcactttcagactggacggataatgtgttcactcaatcagtattctatcacgggtcagatgacttgatatgggggaagttctttgtctgcgtgtacaagtcccccaacagcaataagttgaacgctataatattcgacaaattaggaacatcatgcttcgaatccgtcgatatatctccaactcgc

SEQ ID NO: 81772 - DNA, 651 bp, Saccharomyces pastorianus
atgctgagatcgttattgcaaagcggccaccgcagggtggttgcttcttcatgtgctaccatggtgcgttgcagttcctcgtcgacctccgcgttggcgtacaagcagatgcacagacacgcaacaagacctcccttgcccacactagacactccttcctggaatgccaacagtgccgtttcatccatcatttacgaaacaccagcgccttctcgtcaaccaagaaaacagcatgtcttgaactgtttggtgcaaaacgaacccggtgtcttgtccagagtctcgggtacgttagctgccagaggctttaacattgattcgttggtcgtgtgcaacaccgaggtcaaagacctaagtagaatgaccattgttttgcaagggcaagatggcgtaatcgaacaagcacgcagacaaatcgaagacttggtccccgtctacgccgtcctagactataccaattctgagatcatcaaaagagagctagtgatggccagaatctctttattgggtactgaatacttcgaagacctactattgcaccaccacacttccaccaatgctggcgccgctgactcccaagaattggtcgccgaaatcagagaaaagcaattccaccctgccaactgcccgccagtgaggtattacggttga

SEQ ID NO: 81773 - DNA, 423 bp, Saccharomyces pastorianus
atgtctgcaaacggcaagatctctgttcccgaggcggtggtcaattggctgttcaaagtcattcaacccatttataacgacggaagaacaactttccacgattctttagcgctgctggacaattttcacagtttaaggccaagaacaagggtatttacgcactctgacggcactccacaactactgttgtccatatatggtaccattagtactggtgaggatggttcatctcctcacagtattcctgtgatcatgtgggtacccagtatgtacccggtaaaacctccttttataagtataaacttggaaaatttcgacatgaacaccatcagtagttacttgcccatacaagaatacatcgactcacatgggtggattgcgctgaccatactccactgctgggatcctgccgcgaagaacctt

SEQ ID NO: 81774 - DNA, 396 bp, Saccharomyces pastorianus
atggagctggcaaaggaacgtaatggcccacatcaaaaacatcatggccaatgtcaaaatcactgtacttctccaaacactgtacgacaaaacaaaacaaacaaactcttgttagtaaaaaagaaagggaaactagtaatatggagacacatcgtacaaaaaatgttgcacatacgcttggttgttctttggagccattatccagaacagcacggacatggcactaaccactatgaatacaccaacaacagtatagctaaattggacgcgcagagagttagtagaagaagaaggaagaagagggaggcggagagaagagattatgacacatacaaatactcattactctttgttctttattattcgttggacctttgtttcttaaagtatagataa

SEQ ID NO: 81775 - DNA, 495 bp, Saccharomyces pastorianus
atgatggttttaaggcagttatactattataggtcaactaaacatatttatcagggcatttccattacttccataataattataagtgtgttccttgtattaggcatatttacatatggctgttccatctctaatttaccgttgaaaaattcaggtaaatttggcgttttctatttggaacacataaattatttgtgggtaatggcaaatctgcttaaatgtttcaagtatgtgcctcaaatgagtataaactggatgggatgctcaacagtaggtttatcatcaaagtttgcattgatatcatttttggctgaatctatcgatttattaggtagactggtaataccgaccaatgcattgttttacgaaataccatttaattcaacgcccttttgggtaaaattgatacaatttgtcaccttattggtcatactttgtcaagttcagtatgtttacgtaggacggaaaccacggttgccaaaaggaaaactataa

SEQ ID NO: 81776 - DNA, 159 bp, Saccharomyces pastorianus
atgatagtgcataacactaaaaagttgaaagaatcccgtatcatggacgattttcttgaacatttgagcaaagacgataacaaagcatggtatggcgcggaagaaaaccgagagagctgcaaaattagatgcaatagaaacactacttattacagatag

SEQ ID NO: 81777 - DNA, 510 bp, Saccharomyces pastorianus
atgttcaatgcgagagcgcaagggatcactgttcctaatgttgtcgtcggttgtgctatgttttatggtggtttggtgcaattgattgctggtatttgggagatagctttggaaaatacttttggtggtaccgcattatgttcttacggtgggttttggttgagtttcgctgcaatttacattccttggtttggtatcttggaagcttacgaagacaatgaatctgatttgaataatgctttaggattttatttgttggggtgggccatctttacgtttggtttaaccgtttgtaccatgaaatccactgttatgttctttttgttgttcttcttactagcattaactttcctactgttgtctattggtcactttgctaatagacttggtgtcacaagagctggtggcgtcctgggagttgttgttgctttcattgcttggtacaacgcatatgcaggtgttgctacaaagcagaatcatatgtactggctcgtcaattccattacatct

SEQ ID NO: 81778 - DNA, 201 bp, Saccharomyces pastorianus
atgcatttgactcagaaagatattttccaaagggaagcaggcttaaatgatgtcgatgaatttcttggtaagattgaacagtcaggaattcaatgtgtgaaaaccagttgcatcacaaagtgggtccagaatgataaatttgcgtttcaaaaagatgatttgattaaatttcaaccatccattatcgtttatatcagataa

SEQ ID NO: 81779 - DNA, 135 bp, Saccharomyces pastorianus
atgatacaagcttcaaaacctcttaagcgactcttacagggggataaaggaagagcttcccttgttactgacaaaacgaagtacaaaaacaatgaattgattatcggagcgttgaaaaggttacaaaaaatatga

SEQ ID NO: 81780 - DNA, 1251 bp, Saccharomyces pastorianus
  modified_base (1131)..(1214): a, c, g, t, unknown, or other
atggaaaattgcgatttcaatgttcgttccggtgaagaagcacatactaaattaaggaatatcgggcctagtattgccaaaaaaatacaagttatattagatacgggagttttaccaggtttaaatgattcagtaggattagaagacaagttgaaatacttcaaaaattgttacggcattgggtcggaaattgctaaacgctggaatcttctgaattttgaaagcttttgtgttgcagctaagaaggacccagaggagtttgtatcagattggacaattttatttggttggtcatattacgacgattggttatgtaagatgtctcggaatgaatgtttcacacatttaaagaaggttcaaaaagcgctgcgtggcattgatcctgaatgccaagtcgaattacagggaagttataataggggctattccaagtgtggtgacattgatcttttatttttcaagccgttttgtaatgacacgaccgagttggcaaaaatcatggaaacgctttgtattaagttgtacaaggatggctatatccattgttttttacagctaacgccaaacttggaaaagctattcttaaaaagaatagtggagagatttcgtacagcgaagattgttgggtatggagaaagaaagaggtggtattcttctgagataatcaagaaatttttcatgggagtcaaattgtctccaagagaattagaagaactgaaagaaatgaaaaatgatgaaggcacattgttaattgaagaagaagaagaagaagaaacaaaattaaaaccgattgaccaatatatgtctctgaatgccaaggatggaaattattgcagaagattagactttttttgttgcaagtgggatgagcttggagcaggaagaatacactatactggatctaaagagtacaatagatggataagaatattggcagcgcaaaaaggcttcaagcttacacaacacggtttatttcgaaataatatccttctcgaaagctttaacgaacgcagaattttcgagttattaaacttaaaatacgctgaacccgaacatagaaatatcgaatgggaaaaaaaactgcataaaggcattaaaagaggagcgaatttttttttaataaaaatcttnnnnnnnnnnnnnnnnnnnnnnnnnnnnnnnnnnnnnnnnnnnnnnnnnnnnnnnnnnnnnnnnnnnnnnnnnnnnnnnnnnnngcgtaaaggatggggaaagagaaaagaaaaaaattga

SEQ ID NO: 81781 - DNA, 1506 bp, Saccharomyces pastorianus
atggcgcgtccaaagcttactttcaaagaacaaatggatggtttcccctgggtccaacttgttgttgtgtccttagttaggttcagcgaaccaattgcgttttcgtcactatttccttatgtttatttcatggttagagattttaatattgctcccaatgatgctcaagtgtccaaatattcaggttatttatcttcatcatttgcgttatgccaagtcatatctgcgtaccactggggtagattctctgaaaagcatggcagaaaaataacattgacttgcgggcttataggaacatctgtatcattgttaatactgggattttcacgcaatttctatcaggctttggtggcaagaagtttaatgggattgctaaatggtaacgtcggcgttattagaaccattattggtgaaatagcaactgaaagaaaacatcaggctttagctttcagtactatgcctttattatttcaatttggagccgttgttgggcctatgatcggtgggtttcttgtatttagagatggaacaatgaatgaagtgccactatggtttccacattttgcaaaaagaataattaggtcatatccgtacgccttgccaaacgtggtagtgtgcatgtttttgatgtttggtttaactaatgcaacattgtttttggaagaaacacatcctgcttttaaaaatagaagagattacggtttagaggtcggtgattttattaagaagaatatatttggtatacagccgaaaagaagaccctggcaaaagcgcattcaggatgattcggaaaacattcaccaccgtaatgagaatgtgaacagcattcgaggacaagatagtgaagaggatgaaaatagtcccctagtgaatactaccaatgacgatgatactgaaagcatacaatcgattgatcctattttaacaagaagacagtctgtaggcctgattaggacatattctctgcatgaaccaacagacgctgtgcatgccaatatagatacagctccagacggttgtaaagaaagtagtatatttcatcacgtttttcatacaaaagtattttaccctatatcggtgaattttattatggctttacatttgattgtatacaacgaatttttgcctgtttttttagcttatgatttagccgtagatccagaaaatccaaagaagctggcttcaaaatttccgtggaaaatatctggcggtataggttatgaaccagaacaaaccggtactcttttgtcgacaacaggtatctttggttgttttgtggttattttcatttttcccatagttgatcgaaatttcgattgtttaacaattttcagaactttagtcaagctgtaccctattatgtacgttatggttccttacgttgtttttctacagaatgaacggattcctagctggtgtactgtcgtctacttgtacataatcacagggataaaaacattttgtggcgctttaacgtcaccacaaatatatgttattaattcataa

SEQ ID NO: 81782 - DNA, 132 bp, Saccharomyces pastorianus
atggttatgatatttgaactaaaacgagtgtgtgtttcgtatttagacagatcccgtaaaatccaaattgttcgcttttttccttttatcactattattttttccactcttaacaatgtgtgtgattgttaa

SEQ ID NO: 81783 - DNA, 594 bp, Saccharomyces pastorianus
atgaattcaattattaatgctgcttcgaaagtcttaagactccaagacgatgtgaagaaggctactataatattaggagatatactgatattacaaccaattaatcacgaagttgaaccagatgtagaaaacttggtacagcatgaactaaccaagataatacaaggttatcccatacaggataatatgattattaatagcaaaaaaggcacagttgaagatgacttatgcgaactcaataactatacctgttttgcactttcgaaaagctttgatttatgccatgatagcagaaatttcaacatagcgcagccgaaacgatggatacaattattagagacattaactgactcagttagtttcgcagttattgttcaaattattctcactttatctaacatttcgctaataaataaacaaaccttggggaagttaaaaaaactgaggattcgaattttcgaaatactatcaaataaaaacgatagttggaaatctacattactacagaaaaatcttatagaatggtacatttttatgctttccgtggattgcacacctttagaattgcaaaactatatctccataaggagttga

SEQ ID NO: 81784 - DNA, 804 bp, Saccharomyces pastorianus
atggaaaatatcattattgatgttaacccaaatgatattcttcaagatttcaccgaatcgtctaattttacggtaaaatttgaggaaagcacaaactcgaaaaatattccggaagtgggtaagtgctatttctataggagttcaaacttggtttcaaaatttgtgtccattgattctatacggcttgcgtttttaaacatgacagaatccggtagtatagacgatctgtttcatcatgtatcacatctgatgaatcttttacgaaatattgatattcttaattggtttaaaaaagactttggctttcctttatttgcttatactttaaaacaaaaaataacacaagatttatctcagcctctgaatatccaatttttcaatttattcttagaattttgcgggtgggatttcaacgatatttccaaatccataattctagatactgatgcctacgaaaacatagtccttaacttggatttatggtatatgaatgaggatcaaagttctctggcgtcaggcggattagaaattatcagatttcttttcttccaaatttcaagtttgatggaagcctctatttattctaagttcaattccaataaattcaatgatatgaatatcctagaaaaactatgtttaagctatcaggctgtcacaaaaagagaaaatcagaacagtaaatttaatgagctatcaagtgatttaatttctgtatttgttactttattgaaaagcaatactgataaacgacatctgcagtggtttttacatctctcatggggatcctctagagtcgacctgcag

SEQ ID NO: 81785 - DNA, 1824 bp, Saccharomyces pastorianus
atgatattacttcatgccatatatactctttgggtaattatactacttccgttactcaatgcagagaaatttgtcccaaaagtaacggaggctcctatagaaacatcatttaatctagtgagttttgatgattccaacacttctatcagattagatggttggggggttgtatggataagtttcgacgctggagaaaattgggaaacggtcaaagaaattgaagagcgcattttcagatttactgttgatcctttccatggacaggaaagaggtttcgcttttatatgtgaatcacccaaattctacattaccgacgaccgtggggagtcatggagggctttaactataccctcatcagaagaatatttagatggcgactgttttataactactcatcctagaaacaaagaacttcttattgcgaattgctatagctatatgatagacgcagacgttttatatgacccaagtgaaatttacttgagcaatgatggggaatccttttttaaaattaaaccttccttggaaaagaaaaaagacgacgatataacaacttcaagctgtcatttcattcagtctagcaaggattctgactttactggtaatgatacttcgatactctgtttgttctctaaccgtgaatacgatgaagaatatcgcttaactgctacctacacacagttggctttcagtagtgatggaggcaaaacgtttagagattttgatgaatttaaagataagattgttactcaatacaagatattgaagtcatatgtggtcgttttaacgcaagatgacgggcataacgagatgtcatctacggacatctggatatccaatgatgcatctacttttcaaaaggcacagctgcctactcaattacggcacgtcaaagtgattaaaattcgtgaagattctatcggaaggatcatccttcttatatcgacagaaatcacaaatgaggaaaatgctgatccagatctctcagagattttcatatcagattcgcaagggttgaaattctcacctgttgaatggacaccaaaccatcagtttggaaattttaggctcacttttcctgatttcttgaaagggacaatatttggatcgtttcatccttccattgactattctaatcaccaagtaaactatactgaaaatatagccagaggagaaaccaaaatatccgttgataacggcctcacatggtcaaatttgaaagttgttgatgaagaaaatgccgattcgttcggctgtgatatcactaggcctgagagatgttcgcttcagggttatttttacaatctaaaactttcaaatccttctgctgggatcatattaatgacaggttctgttggcgatgacaatgaattcgatcggaaggaccgaaaaactttcatttctcgagacggtggtctaacatggagggtggcccataattcttctggattatatgctactggtgatctgggaaatattattgtatatatcccgtctccttcatataaagatggtgatgtacaatccaaactttatttttccttggaccaaggtagaacatggaatcaatatgagcttgccgatgctttattttatatccatccattagagttgattaatacaacgccagatggatcaggctcaaaatttattttaagcggacatctcatcactacggctagtcaagaaggaaacaacaccaacatctcatatattgcaagaagtgtcctgtatgcgatcgatttttctgctgcatttgactataaaacgtgtgaggaggaagattttcgaagactggaatttggcagatgggaaatgccttaa

SEQ ID NO: 81786 - DNA, 843 bp, Saccharomyces pastorianus
atgagtaagatactattctgcaaatctaaagtgttcttacacccaacaagcgatgctagagataatattgctggtttcctgctactcacattggaagcgaataagctatctcaccaagcaattctccaatatatcccagaatctggcttatccacattagagatatcaaaactactaaaacatgaagctaaagtgggcacatgtccaacttctacaccatttgttattgaaaattcaataaactttagtaacctggtcaatacttctttaggtcaagctttcgaaatttctctctcacaaatatactgcatccaatttaggcctcctagtccaaatggttggtatgtcggatctctggtaatatatcccttgacggaacagtttacgggctttcaacctcctgtcttgttctttcatgaccaactctgcccatcaactacggacaagttaaaaagactacgcaaatccatgaacccatttgatgactcggacgaattgtattggggtggcgtagatttgagaaacaaaatcaacgaactgatggaactcaagaaatcaaacttagagccagagttttggttagtaaatccctctttgaatgatttgagaaatttcgtttccaaggatctattggaaagttataacaattcgaagaaagatacaactgaacccgctaccgccggtgtgaaactaaacgagaaattccaagaatggaaatggaacgtaatgagcaagatagcagacgtgactaccaagtctaccaattttatcgatagttggctgactaacaactcacccatacaaaatcacaaatcgacaatgaatacttgcaaaagcttctga

SEQ ID NO: 81787 - DNA, 1785 bp, Saccharomyces pastorianus
atgagtatgtcaagcaaaaacgagaataagatatcagtagaacaaagaatatccactgatatcggtcaggcttaccagttacaaggccttgggtctaacctaaggtcgattcgctccaagactggtgccggtgaagtgaactatatcgacgctgctaaatctgtaaatgataaccaactgcttgcagagatcggttataaacaagaattaaaaagacaattttcaacattacaagttttcggtattgcgttctccattatgggtctattgccctccattgcatctgtgatgggtggtgggctcggtggtggtccagcaacattagtgtggggttggttcgttgctgcgtttttcattttacttgtgggtattaccatggctgaacatgcaagttccattcctaccgctggtggtttgtactactggacgtattactatgctccagaaggttataaagagattatttcttttattattggttgctcaaactccctagcgttggcagccggtgtgtgttccattgattacggtttggctgaggaaattgctgctgctgtcacattaaccaaagatggaaattttgaagtaacgagtgggaaactttacggtatatttgctggagcagtggtggttatgtgtatttgtacatgtgttgcttctggggccattgctcgtcttcagacgctaagtatattttccaatcttttcattattgttttattgttcattgcgctaccgattggtaccaagcatagaatgggaggtttcaatgatggtgactttatatttgggaaatatgaaaacttaagtgactggaataatggttggcaattttgtcttgctggtttcatgcctgctgtctggactattggttcctttgattcatgtgtccatcaatctgaagaagccaaagatgccaagaaatcagtccccattggtataatctcatctattgctgtttgttggattttaggttggttgattattatttgtttaatggcctgtatcaatcctgatattgacagcgttttggactccaagtacgcctttgctttggctcaaataatttatgattcattaggaaaaaaatgggccattgcatttatgtcattgatcgcattctgtcaatttctaatgggtgcttccattaccacagctgtttctagacaagtctgggcattttcccgtgataacggtttgcccctatcaaagtatattaaaagagtggattctaaatactcggtcccttttttcgctattttggctgcctgtgtaggttccttgattttaggattgttatgtttgattgatgatgccgccactgatgcattatttagtctggctgttgcaggaaacaatttggcatggagtacccctacagttttccgtttaacatcaggtagagatttatttagacctggtccattttatttgggtaaaatctggtctccaattgttgcttggacaggtgttgctttccaattgttcattattattttggttatgttcccctctcaacaacatggtattactaaatccacaatgaattatgcatgcgttattggtcccggtatttggatccttgcaggtatctactacaaagtttacaagaagaaatactaccatggtccagcaaccaatttgtcggatgatgattatactgaagccgttggtgctgatgttatcgacacaattatgtcaacaggaaccataaatgttcaaacctttataaagattttatattcagagtttataaggtctagcttatatagtcagtatttttaa

SEQ ID NO: 81788 - DNA, 1008 bp, Saccharomyces pastorianus
  modified_base (993)..(993): a, c, g, t, unknown, or other
atgccaaaaaatcgtggtgtcttggatgccatcacttgcagtgtgatagatggtagtgatcaggagtcgagctcatctttcaactcggacaaggaatatgcggctgtgacgaagggcctcagcagctcaagagtacaaaagaagtcatctttaaggcggatgaaaagcaaagtcgaggagcttcaatccttagtgaagcattaccgagaaaatgaagccgctttagtgtctagcgccaagttattgtccggcgagatcataggctatgaaattaagatggctagtttacatggaaaaatgaaaagtatcctggatgagaacaacgcgttaaaggaaacgcacaagagctcttctgaaaagagaatcgaacttgttcgacttccctctagcaaagaagaacgcaactacgatgaatacactttgcttgttaatctcaaaaaggaaatctgcgccaagttacaggactacaaaaacgtccagaacacggtgaacaccaagttagatgagattcacacgttccatgaaaaatactacgaaggactagaactaagtttagacagcaaggtgtttgatgcagaaagctcaaaagagctggctaaagtgaggcgagaactgaataacgtgagaaaaaattccgaaatcaaagtgaataacttgaaaatgcaactgctacaagcaaccaaatcactggagcacttgaagaagcaggctaaagcaaaggatgactatcttaaatgtattcctgagctggtcgacaaagccaatctcacgatgttatcctacaagaaaagcatcgctaaccagagggagactatcgaagcattacaagcagaactatcgcaacaatcagaaacaaaggggcaaatagaaacagaaacacaaaatcaagtacaaatccccaccaatgtgactttggtggacccctttgaggaaaacaatccagaggatttgttcgctatccaggaacaggaattgcaagatccctatctagancgtatgatgcggccg

SEQ ID NO: 81789 - DNA, 267 bp, Saccharomyces pastorianus
atgccctccgagtcaaggaaaagattgtcttccaaaaaaggtgcaactgtgcgtttagaattggtggagaattatgtgatatgcttcttcaccgtcctctgcttctgcctaataccacactcatcaattgactggagatctggcctatcttactactacttcatagatttttttttttcatctatccccttccatccccttctggttctaccccttcagcgtgaaaaatcaccatacacgatcaatccgcccgagaacgaaaagtga

SEQ ID NO: 81790 - DNA, 1173 bp, Saccharomyces pastorianus
atggctggtgcaattgaaaacgctcgtaaggaaataaaaagaatctcattagaagaccatgctgaatctgaatatggtgccatctattctgtctctggtccggtcgtcattgctgaaaatatgattggttgtgccatgtacgaattggtcaaggtcggtcacgataacctggtgggtgaagtcattagaattgacggtgacaaggccaccatccaagtttacgaagaaactgcaggccttacggtcggtgaccctgttttgagaacaggtaagcctctgtcggtagaattgggtcctggtctgatggaaaccatttacgatggtattcaaagacctttgaaagccattaaggaagaatcgcaatcgatttatatcccaagaggtattgacactccagctttggataggactatcaagtggcaatttactccgggaaagtttcaagtcggcgatcatatttccggtggtgatatttacggttccgtttttgagaattcgctaatttcaagccataagattcttttgccaccaagatcaagaggtacaatcacttggattgctccagctggtgagtacactttggatgagaagattttggaagttgaatttgatggcaagaagtctgatttcactctttaccatacttggcctgttcgtgttccaagaccagttactgaaaagttatctgctgactatcctttgttaacaggtcaaagagttttggatgctttgtttccttgtgttcaaggtggtacgacatgtattccaggtgcttttggttgtggtaagaccgttatctctcaatctttgtccaagtactccaattctgacgccattatctatgtcgggtgctttgccaagggtaccaatgttttaatggcggatgggtctattgaatgtattgagaacattgaggttggtaataaggtcatgggtaaagatggcagacctcgtgaggtaattaaattgcccagaggaagtgaaactatgtacagtgtcgtgcagaaaagtcaacacagagcccataaaagtgactcaagtcgtgaaatgccagaattactcaagttcacgtgtaatgcgactcatgagttggttgttagaacacctcgtagtgtccgccgtttgtctcgtaccattaaggtgtcgaatattttgaagttggggatcctctag

SEQ ID NO: 81791 - DNA, 1056 bp, Saccharomyces pastorianus
atgctaagaaacattttggtgagaaatactggcagcaatttcaaatttgctggcagatatatgaaatcatcagctcttttaggatactatagaagagttaactattattcgaccaagatacaaaccagactgactagcgaaaactatccagacgtgcatagagaccctagattcaaaaaattaacgtccgatgatctaaattattttaaatctattttatcggaacaagaaatattaagagccagcgaatcagaggatctttcattttataatgaagattggatgagaaagtacaaaggacagtccaagttagtgttgagacctaagtcagtggaaaaagtttctttaatcttaaattattgtaatgatgaaaaaattgccgttgtcccacaaggcggtaacacggggttggtaggtggttctgtgcccatttttgatgaattaattctatctttagcaaatttaaacaaaataagagattttgaccctgtatcaggtatcttgaagtgtgatgctggtgtaatcttggaaaatgctaacaattacgtaatggaacaaaattatatgtttccgttggatctgggagctaaaggttcctgccatgttggtggcgtggttgcaaccaacgctggaggactaaggttattgcgttatggctcactacatggaagcgttttaggcttagaggtggtaatgcccaatggtcaaattgttaatagcatgcattccatgagaaaagacaacaccggttatgatctgaaacagctgttcattggctcagaaggtactatcggtatcatcactggtgtttcaatcttgactgttcctaagccaaaagcgtttaatgtatcttacttgtctgttgaaagttttgaggacgttcaaaaagtcttcgtcagagccaggcaagaattatctgagattttatccgcttttgaatttatggatgctaaatctcaagtattggccaagagccaattgaaggatgctgccttccctttggaggatgagcatccattttatattcttatcgaaacgtcagggtcaaacaaagat

SEQ ID NO: 81792 - DNA, 1404 bp, Saccharomyces pastorianus
atgttgtggaagcgtacttgcacaaggctaataaagcctattgcacaacctagaggaaggctggtgagaagatcatgctacagatacgcctcaacaggcacaggcagcaccgacagcagcagccagtggttaaaatactctgtcatcgcctcttcagctactctattcggttatttgtttgctaagaacctctattctagggagactaaggaggacttgatagagaaactggaaatggtcaaaaagatcgacccagtaaattctacgttaaagctgtcctcattggactcaccagactatttgcacgacccggttaagatcgataaggttgttgaggacctgaagcaggtgctgggaaacaagcctgaaaactactctgatgcgaaatccgatttggacgcccattcagatacctacttcaacacgcatcacccctctcccgagcaaagacctagaattatattattccctcatactaccgaagaagtttccaaaattttgaaaatatgtcacgataacaacatgccagttgtacccttctcgggcggaacgtccttggaggggcacttcctgcctacaagaattggagataccataaccgtagacctgtccaagtttatgaataacgtcgtaaaatttgacaagctggacctggacatcaccgtgcaggccggtctaccctgggaggatttgaatgactatttgagcgaccacggtttgatgtttggctgtgaccctggtccaggtgcacagattggtggttgcattgctaattcttgttcaggaaccaacgcgtaccgttacggtaccatgaaggagaatattataaacatgactatagtgttgccggacgggaccattgtcaagacgaagaaaagacccagaaagtcgagcgctggctataacttaaatgggttatttgtgggaagtgaaggtaccttaggtattgttactgaagctactgtcaagtgtcatgtcaagcccaaagctgaaactgttgcggtggtatcctttgatactatcaaggatgcggccgcatgtgcttctaatctgactcagagtggtattcatttgaacgccatggagttactggatgaaaatatgatgaagttgatcaacgcatctgaatccacggacagatgtgattgggtagagaagccaactatgtttttcaagattggtgggagatctcccaacattgtcaatgctcttgtggatgaagttaaggctgtcgcccagttaaatcactgcaacagttttcagtttgctaaagatgatgacgaaaaattggaattatgggaagctagaaaggtcgcgctatggtctgtgctagacgctgataagagcaaagacaaatcagctaaaatttggacaacgtgtatctgttcctgtgtcgcagggatc

SEQ ID NO: 81793 - DNA, 774 bp, Saccharomyces pastorianus
atggctacgttcaacccacaaaacgagatggagaaccaggcacgtgtacaagagtacaaggtctccactggcagaggcggagctggcaacatccataaatctatgtccaagccgtctcccgtacttcttccattgaaatccaattcaaagacagtagcaaacaacaataataacggtagcaaccaggaaaaggttcctcgttttgcaattggtagaggtggtgccggtaatatctttcatgatccgcacctgacgagatccgcccaacaactggactctaacgacaatatcaactataacgacgtgatcaatgacatcgacgattatatttcccctataacttcggatatggtggatgaaggtgggtcaaacccggtgaccaacaccaggtctcgtatcagcgctacaaggagccatcagtctttgcatgccaccacttcgtctccgaacaacaacgccccaattgtcgttggtagaggtggggcaggaaacattttcttcaacaaaaaaaaggtggccagcaatggtggaaatgaagaggatgagatacgaggcggcaatatcgaggatgaggatactatcaatgcaaacgaggacaacctgtttgtggtgacttccaatggcaatgctttggcggctatcaagtccacgttcaagaagcctaaaaataagctcaagggcaaaagcgcaccggaaaaatttgctattggaagaggtggcgctggaaacataatttctccaaagtcaagcaggacactatcaaccataacttaa

SEQ ID NO: 81794 - DNA, 2646 bp, Saccharomyces pastorianus
atgccagtgttgaaatcagacaatttcgatccattggaagaagcttacgaaggtgggacaattcaaaactataacgatgaacaccatcttcataaatcttgggcaaatgtgattccggacaaacgaggactttacgatcctgattatgaacatgacgcttgtggtgtcggtttcgtagcaaataagcatggtgatcagtctcacaagattgttactgacgctagatatcttttagtgaatatgacacatcgtggtgccgtctcatctgatggtaacggtgacggtgccggtattctgctaggtattcctcacgaatttatgaaaagagaattcaagttagatcttgatctagacatacctgagatgggcaaatacgccgtaggtaacgtcttcttcaagaagaacgaaaaaaataacaagaaaaatttaattaagtgtcagaagattttcgaggatttagctgcatccttcaacttatccgtattaggttggagaaacgtccccgtagattctactattttaggagacgttgcattatctcgtgaacctactattctacagccattattggttccattgtatgatgaaaaacaaccggagtttaatgaaactaaatttagaactcaattgtatcttttaaggaaggaggcctctcttcaaataggactggaaaactggttctatgtttgttccctaaacaataccaccattgtttacaagggtcaattaacgccagctcaagtgtataactactatcccgacttgactaatgcgcatttcaaatcccacatggcgttggtccattcaagattttccactaatactttcccctcttgggatagagctcaacctttacgttggctagctcataatggtgaaattaacaccttaagaggtaacaagaattggatgcgctccagagaaggtgtgatgaattcagcaactttcaaagatgagttagacaaactatacccaattatcgaagaaggtggttctgattcagctgcattggataacgttttagaactattgactattaatggcacattatctctacctgaagctgttatgatgatggttcctgaagcgtatcataaggatatggattctgacctaaaagcatggtacgactgggctgcatgtctgatggaaccttgggatggtccagctttgttaactttcactgatggacgttactgtggtgctatattggatagaaatggtttaagaccttgtcgttattacatcactagtgatgacagagttatctgtgcttcagaggtaggtgtcattcctatcgaaaattcattggttgttcaaaaaggtaaactgaagccaggtgatttattcctagtggatactcaattgggtgaaatggtcgatactaaaaagttaaaatctcaaatctcaaaaagacaagattttaagtcttggttatccaaagtcatcaagttagacgacttgttatcaaaaaccgctaatttggttcctaaagaatttatatcacaggattcattgtctttgaaagttcaaagtgacccacgtctattggccaatggttataccttcgaacaagtcacatttctgttaactccaatggctttaacaggtaaagaagctttaggttccatgggtaacgatgcgccactggcttgtttaaatgaaaatcctgtcttactttatgattatttcagacaattgtttgctcaagtgaccaatcctccaattgacccaattcgtgaagcaaatgttatgtcgttagaatgttatgtcggacctcaaggcaaccttttggaaatgcattcatctcaatgtgatcgtttattattgaaatctcctattttgcattggaatgagttccaagctttgaaaaacattgaagctgcttacccatcatggtctgtagcagaaattgatatcacattcgataagagtgagggtctattgggttataccgacacaattgataaaatcactaagttagcgagcgaagcaattgatgatggtaaaaagattttaataattactgacaggagaatgggtgccaaccgtgtttccatctcctctttgattgcaatttcgtgtattcatcatcacctaatcagaaacaagcagcgttcccaagttgctttgattttggaaacaggtgaagccagagaaattcaccatttctgtgtcctactgggttatggttgtgatggtgtttatccatacttagccatggagactttggtcagaatgaacagagaaggtctacttcgtaatgtcaacaatgacaatgatacacttgaggaagggcaaatactagaaaattacaagcacgctattgatgcaggtatcttgaaggttatgtctaagatgggtatctccactttagcatcctacaaaggtgctcaaatttttgaagcccttggtttagataactctattgttgatttgtgtttcacaggtacttcttccagaattagaggtgtaactttcgagtatttggctcaagatgccttttctttacatgagcgtggttatccatccagacaaaccattagtaaatctgttaacttaccagaaagtggtgaataccactttagggatggtggttacaaacacgtcaacgaaccaaccgcaattgcttcgtgtacaagatag

SEQ ID NO: 81795 - DNA, 1125 bp, Saccharomyces pastorianus
  modified_base (1055)..(1055): a, c, g, t, unknown, or other
atgccttttctttacatgagcgtggttatccatccagacaaaccattagtaaatctgttaacttaccagaaagtggtgaataccactttagggatggtggttacaaacacgtcaacgaaccaaccgcaattgcttcgtgtacaagatagctgtcagaaacaaaatgatgtctcttggcaattatatgtaaagaaggaaatggaagcaattagagactgtacacttagaggactgttagaattagattttgaaaattctgtcagtatccctctagaacaagttgaaccatggactgaaattgccagaagatttgcgtcaggtgcaatgtcttatggttctatttctatggaagctcactctacattggctattgccatgaatcgtttaggggccaaatccaattgtggtgaaggtggtgaagacgcagaacgttctgctgttcaagaaaacggtgatactatgagatctgctatcaaacaagttgcttccgctagattcggtgtaacttcatactacttgtcagatgctgatgaaatccaaattaagattgctcagggtgctaagccgggtgaaggtggtgaactaccagcccacaaagtgtctaaggatatcgcaaaaaccaggcactccacccctaatgttgggttaatctctcctcctcctcatcacgatatttattccattgaagatttgaaacaactgatttatgatttgaaatgtgctaatccaagagcgggaatttctgtaaagttggtttccgaagttggtgttggtattgttgcctctggtgtagctaaggctaaagccgatcatatcttagtttctggtcatgatggtggtacaggtgctgcaagatggacgagtgtcaaatatgcgggtttgccatgggaattaggtctagctgaaactcaccagactttagtcttgaatgatttaagacgtaatgttgttgtccaaaccgatggtcaattgagaactgggtttgatattgctgttgcagttttattaggggcagaatcttttaccttggcaacagttccattaattgctatggnttgtgttatgttaagaagatgtcacttgaactcttgcgctgttggtattgccacacagatccatatttga

SEQ ID NO: 81796 - DNA, 2811 bp, Saccharomyces pastorianus
atgtcacttgaactcttgcgctgttggtattgccacacagatccatatttgagaagtaagtttaagggtcagcccgaacatgttatcaacttcttctattacttgatccaagatttaagacaaatcatggccaagttaggattccgtaccattgacgaaatggtgggtcattctgaaaaattaaagaaaagggacgacgtaaatgccaaagccataaatatcgatttatctcctattttgaccccagcacatgttattcgtccaggtgttccaaccaagttcactaagaaacaagaccacaaacttcacacccgtctagataataagttaatcgatgaggctgaagttactttggatcgtggcttaccagtgaacattgacgcctctataatcaatactgatcgtgcactcggttctactttatcttacagagtctcgaagaaatttggtgaagatggtttgccaaaggacaccgttgtcgttaacatagaaggttcagcgggtcaatcttttggtgctttcctagcttctggtatcacttttatcttgaatggtgatgctaatgattatgttggtaaaggtttatccggtggtattattgtcattaaaccaccaaaggattctaaattcaagagtgatgaaaatgtaattgttggtaacacttgtttctatggtgctacttctggtactgcattcatttcaggtagtgccggtgagcgtttcggtgtcagaaactctggtgccaccatcgttgttgagagaattaagggtaacaatgcctttgagtatatgactggtggtcgtgccattgtcttatcacaaatggaatccctaaacgccttctctggtgctactggtggtattgcatactgtttaacttccgattacgacgattttgttggaaagattaacaaagatactgttgagttagaatcattatgtgacccggtcgagattgcgtttgttaagaatttgatccaggagcattggaactacacacaatctgatctagcagccaggattctcggtaatttcaaccattatttgaaagatttcgttaaggtcattccaactgattataagaaagttttgttgaaggagaaagcagaagctgtcaaggcaaaggctaaggcaacttcagaatacttaaagaagtttagatcgaaccaagaagttgatgacgaagtcaatactctattgattgctaatcaaaaagctaaagagcaagaaaagaagaagagtattactatttcaaataaggccactttgaaggagcctaaggttgtcgatttagaagatgcagttccagattccaaacagctagaaaagaatagcgaaaggattgaaaaaacacgtggttttatgatccacaaacgtcgtcatgagacacacagagatccaagaaccagagttaatgactggaaagaatttactaatcctattaccaagaaggatgccaaatatcaaactgcgagatgtatggattgtggtacaccattctgtctatctgataccggttgtcccctatctaacattatccccaagtttaatgaattgttattcaagaaccaatggaagttggcattggacaaattgctagagacaaacaatttcccagaattcactggaagagtatgtccagcaccctgtgagggagcttgtacactaggtattattgaagacccagtgggcataaaatcggttgaaagaattatcattgacaatgctttcaaggaaggatggattaagccttgtccaccaagcacacgcactggctttacagtgggtgtcattggttctggtccagcaggtttagcgtgtgctgatatgttgaaccgtgccggacacacggtcactgtttatgaaagatccgaccgttgtggtgggttattgatgtacggtattccaaacatgaagttggataaggctatagtgcaacgtcgtattgatctattgagtgccgaaggtattgactttgttaccaacaccgaaattggtaaaaccataagcatggatgagctaaagaacaagcacaatgcagtagtgtatgctatcggttctaccattccacgtgacttacctattaagggtcgtgaattgaagaatattgattttgccatgcagttgttggaatctaacacaaaagctttattgaacaaagatctggaaatcattcgtgaaaagatccaaggtaagaaagtaattgttgtcggtggtggtgacacaggtaacgattgtttaggtacatctgtaagacacggtgcagcatcagttttgaatttcgaattgttgcctgagccaccagtggaacgtgccaaagacaatccatggcctcaatggccgcgtgtcatgagagtggactacggtcatgctgaagtgaaggagcattatggtagagaccctcgtgaatactgcatcttgtccaaggaatttatcggtaacgatgagggtgaagtcactgccatcagaactgtgcgcgtagaatggaagaagtcacaaagtggcgtatggcaaatggtagaaattcccaacagtgaagagatctttgaagccgatatcattttgttgtccatgggtttcgtgggtcctgaattgatcaatggcaacgataacgaagttaagaagacaagacgtggtacgattgccacactcgacgactcctcatactctattgatggaggaaagacttttgcatgtggtgactgtagaagagggcaatctttgattgtctgggccatccaagaaggtagaaaatgtgctgcctctgtcgataagttcctaatggacggcacctacgtatctaccaagtaa

SEQ ID NO: 81797 - DNA, 1785 bp, Saccharomyces pastorianus
atgcgcagattactgaccggttgccttctttcatctgcacgtcccttgaaatcaagattgccattattgatgtcatcctcattaccttcctctgccggtaagaagcctaaacaagccactttggctagattcttcacttccatgaaaaataagccaacagaaggtactccttctcccaaaaaatcatccaaacatatgctggaagacagaatggataatgttagtgggggagaggaatacgcgaccaagaaattgaaacagacggctgttacacatactgtagcagctccaagctccatgggtagcaatttttcttctataccatcatccgctccctcttccggtgttgctgattcaccgcaacaatctcagaggttggtaggtgaagttgaagacgccttgagctcaaataataatgatcactattcgtctaatatcccctattctgaagtttgtgaggtttttaacaagattgaggccatatcttcccgtttagagattataagaatctgttctgatttctttattaagataatgaagcaatcgtctaagaacttaatacctacaatataccttttcatcaatagattgggccctgactacgaagcaggcttggaattgggccttggagaaaatcttcttatgaaaaccataagcgaaacttgcgggaaatccatgagccaaattaaacttaaatacaaggatattggggatttgggtgaaatagcaatgggtgcgagaaatgtccaacccactatgtttaagcccaaacccttgaccgtgggtgaggtcttcaaaaatcttagagctattgctaagactcagggcaaagattcacaattaaaaaagatgaagctgatcaagagaatgcttactgcttgcaaaggtatagaggctaagtttttgattagatccctagagtcaaaattgagaatcggtcttgctgaaaagactgtcttaatatccctatcaaaggctcttttgctccatgatgaaaatagggaggactctccagacaaagatgtccccatggatgtgttagaaagtgctcaacaaaagataagagacgcattctgtcaagtacccaactatgaaattgttataaactcatgcctggaacacggtattatgaatttagataaatattgtactctaagaccaggaattccattgaaacccatgttagccaagcctaccaaggcaattaatgaagtattggatagatttcaaggcgaaacttttacgtcagaatacaaatacgatggtgaaagggctcaggtgcatttactaaatgatggtacaatgaggatttattccagaaatggcgagaatatgactgagagatatccagaaattaacataacggattttatccaggatttggatactactaaaaatttaattctagactgtgaggctgttgcttgggacaaagatcaggggaaaattttgcctttccaggtcttaagtacaaggaaacgtaaagacgtggagctgaatgatgttaaagttaaggtctgtctctttgcatttgatatactttgctacaacgatgaaaggctgattaataagtcactaaaggaaagaagagaatacttgacgaaggttacaaaagttgtcccgggagaattccaatacgcgactcagataacaacaaataaccttgatgaacttcaaaaattccttgatgagtccgttaatcactcatgcgaaggtttgatggtcaaaatgttggagggccctgatcccattatgaaccaagtaaaaggtccagaaactggttga

SEQ ID NO: 81798 - DNA, 2085 bp, Saccharomyces pastorianus
atgtctcatgaatggctcataagcgcatcggaaacaatgagatgcattggtaatgaggaaggtttgcgggataaaggtgctgtcgttgccaacaatgacggagaatttaacgaaggtgagacaaatcgtgaagaggatagctctaccattttctcgttcgattttgacgaggagattgtaatgtgtattgacttttctggaggaaaactcgggtgttctattttagattatcataccaagactttgcaagcgtttgaccaggactacgtggtcaataaaacaacaatttcgtctcatgatcttatcgatgatgcagatatgtcttcaaacgacataagtctgttacttggacttttaataatggaagcaaacccaactgtatgcctagtgccggcaagattggaggattggattttcgactacattaagacaaaatgcgatgagataaactgtaggctagaactacaaccaataaaacgtttcaaaaaatgggacttattgcagtcattgcagttaaggggtcatgataatcagactatattgaacgacatattatcaaatagcaaatttaccaccacagtcaccttaggtacagtaggatgcatccttgcaaatcatgaacaacttggtgaatacaatgacagtactgcttcaagtaatatggtaacaggacgattagttcagaacgcttttgaagatgtgatacatggcataaggtatatcgacataagggatcggatggtactggatgaaaatactatatcggctttgaatatttttccaacagctcataaactgggtcatgataagatgatgagaaatggtttctttagtgtatttgaactattcaatcaagtgtcttcggactacgccaggagaattttgaagtcttggcttattaacccactaaccaataaaaaacggatagaaacaagatacagcatcataagaaccttattggataaacaaaacgccatcatttttagtgaccttacccaatcaataaaaagatgtccagacgcttttgggtttataaatcagttaagaagtggtaaatcgacattagggacatggtccaaggttgcaagttttttagaaaaaggaatagctatatttcaactggtgtcgtccttgaaattaggttcaaacgaaggcaacattttacatgatatcaaaaataaggttgatatatcagctttaaaggaatgtttgagaaaagtagaaacggtaatagattttgacacatcaagagataccaagacgctcacgataaatacgggggttgacaacagattagatgaatgcagaaatatttatgatcatttggaagggatcttacttgatgtcgcaagagaaactcaactttttttactgaatactctgcctcaagaagattgtaagacaacaaagagtttagaaaaattagtgaatgctgtttatattccccaattaggatacttagtaaccattagcgtcttaatggaacctttattggatggcattccaaaccttcaatgggaagagatctttaggagttcagaaaatatatacttcaagaatggcagggttcttgagctggatgaaacatacggcgatatttatggcgcgatttcagattttgaaattgaaatcctgttttccttacaagaacaaattctgagaagaaagactcaactcactgcttacaatatactgcttagtgaactggaaatattattatcgttcgctcaagtgtctgctgaaaggaattatacagagcctcaattggtggaagatgagtgcatattagaaattattaacggaagacatgctttgtatgaaacattccttgataattatatccccaatagcacaatgattgatggcgggctattttctgaattaagttggtgtgaacaaaataaaggaagaatcattgtagtcactggcgctaatgcatctggaaagtctgtatatcttacacagaatggtttaattgtgtacttggcacaaataggttgttttgttccagcagagagagcgagaattggaatagcggataaaatattgactagaatcaggactcaagaaactgtttataagact

SEQ ID NO: 81799 - DNA, 678 bp, Saccharomyces pastorianus
atgagcagtaataaaggaaatgggcgcttgccatcattaaaagattcctcctccaatggaggaggatctgccaagccctcattaaagtttaaaccaaaagcagttgcaagaaagtccaaggaagaaagagaagcagctgcgtccaaagtaaagctagaggaggaatctaagagaggtaatgacaagaaacatttcaataacaagaataaaagagtaaccggcgctggcggccagcaaaggcgaatggccaaatacttaaataacacacacgttatctctagcggtccattggcggctgggaattttgtaagtgagaagggtgattttagaagaggattcatcaaatcagaaggaagcgggtcatctcttgtgcaaaagggcctagaaactattgacaatggtgctgagagctccgataatgaggcagaagacgatgataatgaaggtgtagcgtccaaatctaagaagaagttcaatatgggaaaagaattcgaggcacgcaatctcatagaggacgaagatgacggcgaaagtgaaaagagcagtgacgtcgacatggatgacgaagagtggagatctaaacggattgaacagttattccctgtgagacctgtccgcgtaagacacgaagatgttgaaactgtcaaaagagaaatacaagaagctctttcagaaaag

SEQ ID NO: 81800 - DNA, 162 bp, Saccharomyces pastorianus
atgaaggcgattcatttctcaacaataagtattcttggagaaagcaatttcagccaggtcaaaagccggagctatttagaaataggtaagcatgctctcggccctggccatcatatttcccctgctatatattctacaaggaattccggcaagaactgggat

SEQ ID NO: 81801 - DNA, 2667 bp, Saccharomyces pastorianus
atggagagagatgaataccagttacccaactctcatgggaagaatactttcttatcgcgaatatttggtttacaatcggatgaagttaatccttctctcaatagccaggagatgagcaacttccctttaccagacatagagagaggctcatctttattgcattctactaacgacagccgcgaagatgtagatgagaatgacttacgtgttcctgagtctgaccaaggcactagtacagaagaagaggatgaagtagatgaagaacaagtccaggcgtatgctccacagattagtgatggattggatggagaccaccagctaaattctgtaatgagcaaagaaaatgtacttgaaacggaaaaaagcaatttagaaagactggttgaaggctctaccgatgattctgtgcccaaagtcggacagctttcgtcagaagaagaagaggataatgagttcataaataatgatggatttgatgacgatacgcccctttttcaaaaaagcaagattcatgaattcagctccaaaaaaaggaatactatagaggacggtaaacgacctttgtttttcaggcatatcttacagaataaccgccctcaacgtaatacccaaaagctatttacctcgtcgaacgccattcactatgataaggacaagagtgcaaataatggttcccgtaacattaatggtaatcaaaagcatggcactaaatactttggtagtgctacacaacctcggtttactggttcgcccttaaacaatacaaacaggttcactaagttgtttccattaagaaagccaaatttactgagcaatatatctgttttaaacaataccccggaagatagaatcaatacgctgagcgtgaaagagcgggctctgtggaaatgggcaaacgtagaaaacctcgatatatttcttcaagatgtttacaattattatctgggaaatgggttctattgcatcatactggaaaaaatattgaatatatgcactttgctttttgttgtttttgtttctacatatatgggtcactgtgttgactactccaaattaccgactagtcaccgggtttcggatattattatcgacaagtgttattctaatagtataacggggttcacaaagtttttcctttggatgttttatttcttcgtgattctcaaaattgttcaactctactttgatgttcaaaaattatcagaattacaaaacttttacaagtatcttttaaatatatcggatgacgaacttcaaactttgccctggcaaaatgtgatacagcagctaatgtacttgaaggatcaaaacgctatgacggcaaatgttgtggaagtcaaagccaagaatagaatcgacgcgcatgacgttgccaatagaatcatgagaagagaaaactatctcatagcactttacaatagcgacatcctgaatttatccttgcctattccattatttaggaccaacgttctgacaaaaacactagaatggaatattaatttatgcgtcatgggctttgtgttcaacgagtccggatttattaaacaaagtattttaaaaccttctcaaagagaattcacgagagaagaattacaaaaaagatttatgctggcaggatttcttaatattatattggcaccatttctggtcacatactttgttttgctttattttttcagatattttaatgagtataaaacttctcctggatctattggtgctcgtcaatacacaccaattgctgaatggaaattccgtgagtacaatgaactttaccatatttttaagaaaagaataagtttgagcacaaccttagctaacaagtatgttgatcagttcccgaaggaaaagaccaatttgtttctgaaatttgtttcctttatttgtggatcatttgtggccattttagcttttcttactgtattcgatccagaaaactttttaaactttgaaatcacctcggacagatctgtcattttctacattactattctgggtgctatatggtctgtaagtagaaatacaataacccaggagtaccatgttttcgaccccgaagagacgctcaaggagttgtatgaatatacacactatctaccaaaggaatgggaaggaagatatcacaaagaggaaatcaaactagagttctgtaaattgtacaacttgagaatagtaatacttttgagggaactcactagcctgatgataacaccgtttgtactttggttttcgttgccctcgtcagccggcaggattgtagatttcttcagagataattctgaatatgtggatggattaggttacgtttgcaagtatgctatgtttaacatgaaaaacatagacggtgaagatacacacagcatggatggagacagtttaacgaaaaagattgccgtgaacggaagtcatacactcaacagtaaacgaaggagtaaatttaccgccgaagaccatagcgataaagatttggcaaataataaaatgttacaatcatatgtatattttatggatgattattccaacagtgaaaacttaacagggaagtaccaattgcctgcaaaaaaaggctatccgaataatgaaggcgattcatttctcaacaataagtattcttggagaaagcaatttcagccaggtcaaaagccggagctatttagaaataggtaa

SEQ ID NO: 81802 - DNA, 195 bp, Saccharomyces pastorianus
atgatcatcctaagattgttaagaatattatcaaagcttaccaagcaaaattggatcgacggtaataaggccacgttcggacaatacaccgctgttttactgagacacatcattattctaagcaatcaacactaccttaaaaacgttcccagttttaaacgtacacgaaatgcattgatctcaattctaaaatcc

SEQ ID NO: 81803 - DNA, 1254 bp, Saccharomyces pastorianus
atggccggttcacaacttaaggatgtgaaggccgccttgaaggcccgtggactcacaggtcaaacgaacgtcaaaagtaagtatttaattaattccctaagacaagcgaaggagtatgatcgtgaagaaaaaaaaaaggccattgctgaaatcagagaagagtttaatccgtttgaaataaaggctgcaaggaataagaggagagatggtctgccttctaaaactgctgatcgtattgctgtgggtaagcctggtatctctaaacagatcggtgaagaacaaagaaagcgtgcatttgaagcaagaaaaatgatgaagaataaacgtggtggtgtgatcgataagagatttggtgaaagagacaagttgttgactgaagaagaaaaaatgttggaacgtttcaccagagaaagacaaagccaatcaaagagaaacgcaaatttatttaatcttgaagacgatgaagacgacggtgacatgtttggagacggtcttacacatttaggtcaatcgctgtccctagaagatgagcttgccaatgatgaagaggattttttagcttccaaacgattcaatgaagatgatgctgagctacagcaacctcaaagaaaaaaaaccaaagctgaagtcatgaaagaggtcattgccaaatcaaaattttacaaacaagaaagacaaaaggctcaaggtataatggaagatcaaatagataatctggatgataatttcgaggatgttatgtctgaattgatgatgacgcaacccaagaagaatccaatggaacctaagaccgatctagataaggagtatgatatcaaagtgaaagaactacaattggacaaaagagctgcaccttctgatagaactaaaactgaagaggagaaaaacgctgaagctgaagaaaaaaaacgggagttggagcaacagcgtcttgatcgtatgaacggtatgattgaattagaagaaggcgaagaaagaggagtagaggatttggatgatggattctgggaaaatgaagaagactatgaagacgataatgacggtattgctgattctgatgatgatatcaaatttgaagatcaagacagagatgaagggttttctcaaattttaaagaaaaagaacatttccatttcatgccctagaactcatgatgcgttattagatcaagtaaaaaaattagacttagatgatcatcctaagattgttaagaatattatcaaagcttaccaagcaaaattggatcgacggtaa

SEQ ID NO: 81804 - DNA, 240 bp, Saccharomyces pastorianus
atgattcaaatggtgcccatttattcatgctccgcattacttcggagaactataccgaaaaggccattctatcatgtgttatcagggttaactgtacgctttaaggtaaacccgcaattaaattacaatcttttcagagatctcactaggagggaatatgctaccaatccgagtaaaactcctcatataaagagcaagttgctcaatattcccaacattttgactttatcacgaatagga

SEQ ID NO: 81805 - DNA, 327 bp, Saccharomyces pastorianus
atggtaggacaacagtattctagtgctccactccgtacagtaaaagaggtccaattcggtcttttctcacctgaagaagttagagcaatcagtgtggccaaaattagatttccagagacaatggatgaaacccagacgagagcgaaaattggtggtctaaacgaccctaggttaggctctattgatcgtaatttgaagtgtcaaacttgtcaagagggtatgaacgaatgtcctggtcattttggtcacatagatttagcaaaacctgtatttcatgttggttttattgccaaaattaagaagtatgtgagtgtgtctgtatgcact

SEQ ID NO: 81806 - DNA, 240 bp, Saccharomyces pastorianus
atgaacgatagccaaaactgcctacgacagagggaagaaaatagtcatctgaatcctggaaatgacttcggccaccaccagggtgcagaatgtacgataaatcataacaacatgccacaccgcaatgcatacacagaatctacgaatgacacggaagcaaagtccatagtgatgtgcgacgatcctaatgcataccaatttcctacacaaataatgagccggcgggagatggagctatag

SEQ ID NO: 81807 - DNA, 636 bp, Saccharomyces pastorianus
atgtctgtcttggtaggcatatttgttgccgtggggggcttcttgtttgggtatgatactggacttataaacagtatcacggatatgccgtatgttaaaacctacattgctccgaaccattcatatttcaccactagccaaatagccatactcgtatcattcctctccctaggaacatttttcggtgcgttaatcgctccctatatttcagattcatatggtaggaagccaacaattatgtttagtaccgctgttatcttttccatcggaaactcattacaggtggcatccggtggcttggtgctattaatcgtcggaagagtgatctcaggtatcgggatcgggataatctctgctgtggttcctctttatcaagctgaagctgcgcagaagaaccttagaggtgccatcatttccagttatcagtgggctatcactattgggttactcgtgtccagtgcagtatcgcaaggaactcattccaaaaatggcccgtcttcatatagaataccaattggtttgcagtacgtttggtcaagtattttagctgtgggcatgatattccttccagagagtccaagatattacgtcttgaaggatgaactcaataaagctgcaaaatcgttatctttttaa

SEQ ID NO: 81808 - DNA, 1692 bp, Saccharomyces pastorianus
atgtctgagactctgcctagatctgatgatttagaggccacttggaactttatagagccaggaattaaccaaatactgggtaatgagaaaaaccaagcatccacgtctaagcgagtttacaaaattctttctccaaccatgtatatggaagtctataccgcaatttataactactgtgtgaacaaatcacgctcgtctggacattttagtactgacagtagaactggccaatcaacaattttggttggcagtgagatttacgaaaagttaaagaattatttgaagaattacattttaaattttaagcagtctaattcagagacctttttgcagttttacgtcaagcgctggaaaaggtttacaataggtgccatttttttaaaccatgcattcgattatatgaatagatattgggttcaaaaggaaagaagtgacggcaaaagacatatttttgatgtaaacaccttgtgcttgatgacatggaaagaagtcatgtttgatccgaataaagatgttttaataaacgaattattagaccaggtaaccttggaaagggaggggcaaataattcaaagaagtaatattagcactgccataaagtctttagttgcactaggtatcgatccacaggatttgaaaaagttgaacctaaatgtctacatccaagttttcgaaaagccatttttaaagaagactcaggagtactacacgcaatatacaaacgattatttagagaaacactcggtaactgagtatatttttgaagcacatgaaatcatcaaacgtgaggaaaaagcaatgacaatatattgggatgatcatacaaaaaaaccactatccatggcattaaacaaggtcttgatcacagaccatattgaaaagttggaaaatgagtttgttgtccttctggatgccagagatattgaaaaaattacttctttgtatgcactaatacgcagagactttacattaatcccaagaatggcttcagtgtttgaaaattatgttaaaaagacaggtgagagtgaaatttcgagtctactggcaatgcataaacacaacattatgaaaaacgaaaacgcaaaccctaaaaaactagcactaatgacagctcactccctttctcctaaagactatatcaagaaattactggaagtacacgatatattctctaagatttttaatgaaagtttccccgacgacatacctttagctaaagctctagataatgcgtgtggtgctttcatcaacatcaacgagttcgcattacctgctggatctccaaaaagtgccacctcgaagacttccgagatgctagctaagtacagtgatatactattaaagaaggccaccaaacctgaagtggcaagtgacatgtcagatgaagatattataacaatattcaaatatttgaccgacaaagatgcgttcgaaactcattatagaagacttttcgccaagcgtttaattcatggcacttcaacatcagcagaagacgaagaaaatattattcaaaggctgcaagcggcaaatagtatggaatatacaggcaagataactaaaatgtttcaagatattagactttccaagatcttggaagacgattttgctgtcgccctgaagaatgaaccagattactctaaagcaaaatatccagatctaacaaccatttgtattggcagaaaatatgtg

SEQ ID NO: 81809 - DNA, 666 bp, Saccharomyces pastorianus
atggccattatgtcgtggcgaattgaaggcagatattggaaacccggcaggatgccgttcaactttacggtaacactgtttcaaatggcaattttgctactatataacgatgctgatgtattaaccttagaaaatattcaagagggcacgagcttaaccattcagcacatcgcagcggcaatggtaccattcatcaaattcaaactgattcaacaggtcccaccagggctagatgctctcgtgaaacctgaaacacaattcaagctatcacgtccttataaggcgcttaagaccaatattaatttcgctagcggagtcaaaaacgacattctgcaatcgctatccggtggaggccacgataatcacggtaataagttaggaaacaaacgcttgacggaagacgaaagaatagaaaaagaattgaatacagaaaggcagattttcttggaagcttgtattgtgagaataatgaaagcgaaaagaaatctgccacatacaacattggtcaacgaatgcattgcgcaatcacaccaaaggttcaatgcaaaggtttctatggtcaagagagccatcgatagcttaatacaaaagggatacctacagaggggagacgatggtgaatcgtatgctccttgcttaatcatctttgaaggggggatcctctag

SEQ ID NO: 81810 - DNA, 171 bp, Saccharomyces pastorianus
atgtctgactctattatttcctttgctgctttcatcctagctgatgctggtttggaaatcacctctgacaacttattgactatcaccaaggccgctggtgctaatgtcgacaacgtatgtacaaaaatgcaacctaaaacgactttgggtgactacgaagagaaagattag

SEQ ID NO: 81811 - DNA, 807 bp, Saccharomyces pastorianus
atgtcaaactacgaagctttgctgaaattcaataggaaggctgtatctaaggaaatggtgcaatatctagcatcgaccacagcttccattatcaaaattaagaagacgaatagtatgatagatattgcattgccagcaccaccgttgactaaattcatcaacagactgatcaagcattctaacgttcaaactccgactctgatggctacctctgtatatttggccaaattaagatcaataataccgagtaacgtttatggtatagagaccaccaggcatagaatattcttaggttgcctaatattagctgcaaaaacgttaaatgattcctcccctcttaacaaacactgggccgaatatacggacggccttctcatcctaagggaggttaatactattgaaagggaactattagaatattttgattgggacgtcaccatttccacagatgatttaattacatgtctctcgccattcttgaagcctatcaaagaggagcagttgtacaaatcgcaaagagactgtcgcacgttgaaaattttttctgctcaagaaaaagacatagtaaacaaaacatccatttcccattcgcgctcatcgtccaatatgtctatcccatctttagcttccacttcgaccctctccactttggaatctagaagatcgaatttatccaactatagtaacagaatacgaactttgcacgaactacacgaatccaataacattagcgacaagttttctccgcggacatacaacatagactccaaacacgataacaggaaaatagccaataccgacaattaa

SEQ ID NO: 81812 - DNA, 561 bp, Saccharomyces pastorianus
atgtcatttcaccaacagttctttaccttgaataatggaaataaaatccccgcaatcgccatcattgggacaggtactagatggtataaaaacgaagaaacggatgctaccttttccaacagtttggtcgaacagattgtttatgctctgaagttacctggcattattcacattgatgctgctgagatctacagaacatatccagaagttgggaaggcactcagcctcaccgaaaaaccaagaaatgcaatattcttgacagacaagtactcacctcaaatcaagatgtcagattccccagcggagggactagatttagctttgaagaagatgggcactgactatgtcgatctataccttttgcatagcccatttgtttccaaagaggccaacgggttaagtttggaggaagcctggaaggacatggagcaattgtacaaatcaggtaaagctaaaaatatcggtgtttccaactttgctgtggaagacttgcaaagaattctgaaagttgcggaagtcaagccccaagttaatcaaattgagttcagtcccttcttgtag

SEQ ID NO: 81813 - DNA, 267 bp, Saccharomyces pastorianus
atggatttgtttattgaaagcaagataaacagtttattacaatttttatttggttcccgacaagattttttgagaaattttgaaacttggagtaacaacaataacaatctatcgatttatttattaatttttggcatagtagtatttttttataaaaaaccagaccatctaaactacattgttgagagcgttagtgaaatgacaacaaacttcagaaataataatagccttagccgttggttgcccagaagtaagtttacccattag

SEQ ID NO: 81814 - DNA, 675 bp, Saccharomyces pastorianus
atggaattatcccctacttatcaaacagaacgcttcacaaagttctcagacactttaaaggaatacaaaattgaacaaaataatgagcaaaaccccattgacccgttcaacatcataagagagtttcgctcagccgcggggcagcttgcgttagatttggctaattctggagatgaaagtaacgtcatatcttctaaggattgggaactggaagctagattttggcatttagtagaactgttactggttttcaggaacgctgatcttgatctagatgaaatggaacttcatccttataactcgaggggtttatttgaaaagaaattaatgcaagacaacaaacaactttatcaaatatggatagtgatggtttggctcaaagaaaatacatatgtgatggaaagacccaaaaatgtaccaacttcaaaatggttaaatagtattacttctggaggattgaaaagctgtgacttggattttcctttacgagaaaacaccaatgtcctcgatgttaaagataaagaagaagatcatattttcttcaaatacatttacgaattaattttggccggtgcgattgatgaagcattagaagaagctaaactttccgacaatatttcaatttgtatgatcctgagtgggatagacctgcagcatgcagcttgcactgccgtc

SEQ ID NO: 81815 - DNA, 345 bp, Saccharomyces pastorianus
atgatggaagaattctcgtacgatcacgattttaacacacattttgctacagatttggattatttgcaacatgaccaacaacaacaacagcaacaacatgatcaacaacataatcaacagcaacaaccacaaccacaaccaattcaaactcaaaacctggagcacgaccacgaccaacatactaatgatatgagtgcttcatcgaatgcatcagatagtggacctcagaggcccaagagaactcgcgcaaagggtgaagcactagatgtcctaaagcgtaaatttgaaataaatccaacaccctctttggtagacagaaagaaaatatcagatctgataggaatg

SEQ ID NO: 81816 - DNA, 354 bp, Saccharomyces pastorianus
atgcgacagagagtaggaaggtccatagctagggctaaatttataaatactgccttattaggaagaaagagaccagttatggaaagagtcgtcgatatagcgcatgtagattcaagtaaagcaatccaaccattgatgaaggaactagaaaccgacactacagaagcacgatacaaagtactacaaagtgtattagagatatacgatgatgaaaagaatatagaacctgctctcacgaaagagtttcacaaaatgtacttggatgtcgcttttgagatatcgttacctccacaaatgacagcactagatgcttcacaaccgtggatggacctgcaggcatgcagctgcatgccg

SEQ ID NO: 81817 - DNA, 1650 bp, Saccharomyces pastorianus
atgctgcccagacttggttttgcgaggactgctaggtccatacaccgtttcaagatgacccagatctctaaaccttttttccattccactgaagttggtaagcccggaccacagcagaagctatcgaaatcttacactgcgctattcaagaaatggtttgtcagaggtttaaagttaaccttttacacgacgttggccggcacattgtatgtgtcatacgagctgtacaaagaatcgaacccacccaaacaggttccccaatcgaccgcttttgctaatggtttgaaaaagaaggagctggttattttgggtacaggctggggcgccatatctcttttgaagaaattagacacgtctttgtataacgtgaccgtggtgtcgccaagaagcttctttttgttcacaccgttattaccctcaacgcctgtgggtacgatagagatgaagtctattgtcgaaccggttagatcgatcgctagaagaacgcctggagaagttcactacattgaggcggaagcgttggacgttgatccaaaggccaaaaaagtaatggtgcaatcggtgtcagaggacgaatatttcgtttcgagcttaagttacgattatcttgttgttagtgtaggcgctaaaaccactacttttaacattcccggggtctatggcaatgctaacttcttgaaagagattgaagatgctcaaaatattcgtatgaagttaatgaaaaccatagaacaggcaagttcatttcctgtgaacgatccggaaaggaagcgattattaacgttcgtggtggttggtgggggccctacgggggttgaatttgccgccgaactgcaagattacatcaatcaagatttgaggaagtggatgcccgacttaagtaaagaaatgaaggttatcttaattgaagccctgcctaatatcctaaacatgttcgataagacgttgatcaagtatgccgaggacctttttgccagagatgaaattgacttgcaagtgaatactgccgtgaaagtcgtagagccaacctatatacgtactctgcaaaacggccaaacaaacacggatatcgaatacgggatgctggtttgggccacgggaaatgaaccaatcgatttttcaaagacactgatgagtagaataccggagcaaactaataggcgtggtctgttaattaatgacaagttggagcttctcggttctgagaattcgatttatgcaattggtgattgtaccgcacacacgggtttctttcccacggcacaagttgcacatcaggaaggcgaatacttggccaagatcttggataaaaaattacagatagaacaattggaatgggacatcctcaacagtaccgatgaaactgaggtatcacgtctacaaaaagaggttaatttgaggaaatctaagttggataagttcaactacaagcatatgggtgcccttgcgtacatcggctctgaaaccgcaattgcagatttgcatatgggcgactcatcataccagttgaaaggtatgtttgccttcttgttttggaaatccgcttatttggccatgtgtctctctatcaggaataggattttaattgcacatggactggaccaaagtttactttcttggaagggattcctccgtgtagtccttgtttaa

SEQ ID NO: 81818 - DNA, 384 bp, Saccharomyces pastorianus
atgttagtacgagacatagccgccgaggtttatttcgctcaatctgtttgtttcactttttccgcgttctctctttttcgctcttttctggctaccgcgcccgccttatatataaaatctcttccgaataacaaagtggccgaaacaagcgccaacgtcgaccattttgccaccgtgtcactgtgcacgagcaacgaaaaactggcgtcggttgcgcctcacgaattgcttgagcctcttcccaatatcatcgcgcatttatttgagtcattctctgccgctttattattaaaagtctgtgtgctatcaaaatgctcttgctcctgttcaccctctatgcgtaaacactttgcgcgtttctccctttctcgggatcctctagag

SEQ ID NO: 81819 - DNA, 696 bp, Saccharomyces pastorianus
atgtctcgtactaacatggatacaagacacgcacattctgctttactggcagcaccacagagtgctactgcaaatagcaggagcagcaacagcagcagcgagagtagtagtaacaaaaacaatatcaatgtcggcgtcggtgacgatagcggtaatgtcagcgcggtaagtatcgacgatggaccccacttcagggatatcttccactatggacacgaggaaaattacaaacttgcgagcagcggtatcactaacctgaattcttcatcccacgcccaccaaactttgtctcccatttccattagtaatgcatccactccggaaagttttcccgagcaccctttgggcctagaacgggaaacagagccggcgttggaagctgaaatggaagcggaggaactaccaccacaccaaagtaaataccttttaagctccattaaggcgaccaaacgattaaaagatgctagaccgtttctgaagccggttgatcctattgctttgaacatcccgcattatttcaactacgttcaaaccccaatggatttgtctttaattgaaacaaaattgcagggcaacgtgtatcattcagtagagcaagtcacatcggacttcaaaacaatggtggataattgtttaaactttaatggtccagaatcttcaatctcttcgatggctaaaaggatcaaaagtatttga

SEQ ID NO: 81820 - DNA, 111 bp, Saccharomyces pastorianus
atggactcgataagctggcttatcaagaatttcgttgaaaatttaacccatttagctcatttgcgaatacctgcccatttgccgaaggaaatgggatacttccagctctaa

SEQ ID NO: 81821 - DNA, 192 bp, Saccharomyces pastorianus
atgcttacaataacatttacgaatttcaatcagtttaatataatgaacaaaaacttcaattacattcataacttagatcgagctcgagtagtgaacatggactcgataagctggcttatcaagaattcgttgaaaattaacctattagctcatttgcgaatacctgccaatttgccgaaggaaatgggataa

SEQ ID NO: 81822 - DNA, 354 bp, Saccharomyces pastorianus
atgaatctcgacatgttaaggacaaaagtgtttgcaactactgttgctcgaatatctgggattcgcaggaatattcccatcagaactataaacacggtgacgaaaaagaatattagtaagatagaaaaactgtgtgaagtccttgaagttaatcctgacggatataaaggaaaggaacgcataccgactaaagaactaactaaactgctatataccacaagcaggaatatgttggtacgagtaccaatgactggagacttgagcacaggaaatacatttgaaacaagaaacgaaactttacaaaaattgggtgaacagctcattcacttggaaataataagatgcttacaataa

SEQ ID NO: 81823 - DNA, 1251 bp, Saccharomyces pastorianus
atgagtatgttatctagaagattattttccacctctcgccttgctgctttcagtaagattaaggtcaaacaacccgttgtcgagttggacggtgatgaaatgacccgtatcatttgggataagatcaagaagaaattgattctaccctacttggacgtagatttgaagtactacgacttatctgtcgaatctcgtgacgccacctccgacaagattactcaggatgctgctgaggcgatcaagaagtatggtgttggtatcaaatgtgccaccatcactcctgatgaagctcgtgtgaaggaattcaacctgcacaagatgtggaaatctcctaatggtaccatcagaaacattctcgccggtacagtgttcagagagcccattgtgattcctagaattcctagactggtcccacgttgggaaaaaccaatcattattggaagacacgcccacggtgatcaatataaagctacggacacactgatcccaggcccaggctctttggaactggtctacaagccatccgaccctacgactgctcaaccacaaactttgaaggtgtatgactacaagggtagtggtgtggccatggcaatgtacaatactgacgaatccatcgaagggtttgctcattcgtcttttaagctggccattgacaaaaagctaaatcttttcttgtcaaccaagaatactattttgaagaaatatgacggtcggttcaaagacattttccaagaagtttatgaagctcaatataaatccaaattcgaacaactagggatccactatgaacaccgtttaattgatgatatggtcgctcaaatgataaaatctaaaggtggctttatcatggcgctaaagaactatgacggtgatgtccaatctgacatcgtcgctcaaggatttggctccttaggtttgatgacttctatcttagttacaccagacggtaaaactttcgaaagtgaagctgctcatggtaccgtgacaagacattatagaaagtaccaaaagggtgaagaaacttctacaaactccattgcatccattttcgcgtggtcgagaggtctattgaagagaggtgaattggacaatactcctgctttgtgtaaatttgccaacattttggaatccgccactttgaacacagttcagcaagacggtatcatgacgaaggacttggctttggcttgcggtaacaacgacagatctgcttatgttaccacagaagaaattttggatggccgctga

SEQ ID NO: 81824 - DNA, 153 bp, Saccharomyces pastorianus
atgatgaaaaagctagagagtacgattgagagcaatgaaacggagttgaaatcctcaatggaaaccataaggaaatcagatgaaaaattagacagtcgaaaaaaagtgctgaggaggatattaaaaacttgcaacatgagaagtcagatttga

SEQ ID NO: 81825 - DNA, 216 bp, Saccharomyces pastorianus
atgttgcttgaaactaaatacaacgatttggtgaataaagagcaagcatggaaaagggatgaagatactgttaaaaagaccaccgattctcagagacaagaaattgaaaagttggctaaagaactggataacttgaaggcagagaactctaagttgaaggaggctaacgaagatcgttcggaaattgatgacttgatgctcttggtactgacctag

SEQ ID NO: 81826 - DNA, 1305 bp, Saccharomyces pastorianus
atggacatcattcaaggactgatacagcaaccaaaaattcaatctgtggatgaaaccattccgacgttgtgcgatcgagttgagaactccactttgattagtgacaggagatccgctgtgctgggattaaaggcatttagccggcagtatagagaatcagtgattgcatccgggctaaaaccgttgctcaatactttgaaacgtgattatatggatgaagattcggtaaaggctatattagaaacaattttgattcttttcatcagaggcgatggccatgacgacttaactagaggttggatttctcaacaatcgcggttgcagaatggcaagtatccctcaccattggtgatgaagcaagaaaaggaacaagtagatcagttctcgttatggattgctgatgctttgacgcagtctgaagatttaattcacctacttgttgaattctgggaaatcgataatttccatattagattgtacacaattcaattactagaggcagtgatggccacgaggccgttgaaggcgagaagtgctttgatttcacttccaacgagcatatccacaatggtctcactcctagatgacatgcatgagcccatcagggatgaagctattttattattaatggcagtagtgaacgattcacctcacgttcaaaaattggttgcttttgaaaacatttttgaaaggctattttctatcatcgaagaagaaggtgggttaagaggctctctcgtcgtcaatgattgtttatcgttgatcaataacatcctgaagtataacacttctaatcaaactttattccttgaaacaggaaacttgccaaaactggcacaccttttgagtgaaccaatatctcaagacgaagcttttttttggaatgatcaaagaatagttaatatcaatacagctttagatatcgtcagcctaacagtagagccaggaaatactgtcaccactaagcaccaaaatgcgttgcttgactcaagcgtattaatggttgtgttgcgacttgcattctttcataatatcccaaaaaaagttagaccggttgctcttttgactgccgcaaacatgattagaagtaatgaacatgcacagctagagtttagtaagatcgatgttccatatttcgatccttcattacctgtaaactctactgcaaacggtggtccaattaaattaattcctgtagtcagcatcttgataaattggatgctctatgccaactccgttcacacgtttgatacaagagttgcgtgtcctagactattacaggcttatttcatggataatttcgat

SEQ ID NO: 81827 - DNA, 2025 bp, Saccharomyces pastorianus
atggataattttgatcttcaaagagattttttactaaaacaagtccaattgtgtaataattcaacaaataatgtcggcgacaatgctaaagaaaatggtggttccaacaaatctgataaagaaggtgattcagataaagataccgacgggaaggatggcactgaatatgaaggttctttcaaggcaaatctattcgaagtcctgttaaattatgacgcagaattgaatctgaacccttttaaattattcttcacaactgatatttttatgttttttttccaacaggatcacaaatatagcgaagaactacgtgaaataacaagaaatgttaccaccggtaacgatctcgaagacgaagaacccttaaaggcaattcaaacaataagtgaattgctaactacttcccttactgctgctgacataagaattcctatttcctacttaacgttcctaatatattggctctttggcgactttaaggccacgaacgattttctttcggataaatccgtgattaaatccttgctttccttctcttaccaaattcaagatgaagacgttactatcaaatgccttgtaacaatgttactaggtgtggcatacgagttttcctcgaaagaatctccattcccaagaaaggaatacttcgaattcatcactaaaagtttaggaaaagacaattatgcttctcgaatcaaacaatttaaaaaagattcatatttctcaaaagttgatatgaatgaagacagtatactaactccggagcttgatgaaactggtttaccaaaagtttatttcagcacttacttcatacagttatttaatgaaaacatatacaggatcagaactgcattgtctcacgaccctgacgaagaaccaatcaataaaatatcttttgaagaagtcgaaaaattacaaaggcaatgtacaaaattgaagggtgagataacttctttgcaaacagaaacggaaagcacccatgagaacctcaccgaaaaattgattgcgttgactaatgaacacaaagagttggatgagaaataccaaattttgaattcctcacattcttcgttgaaagaaaacttttccattttggaaactgaattgaagaacgtcagagattccttggatgaaatgacgcaactgagagatgtactggaaactaaggacaaagaaaatcaaactgctttactggagtacaaaagcacaatccacaaacaagaagactctatcaaaactttagaaaaaggacttgaaactattttgtctcaaaagaaaaaggcagaagatggtataaacaaaatgggtaaagatttattcgctctgagtagagagatgcaagcagttgaggagaattgtaaaaatttacagaaggaaaaagataaaagcaatgtcaaccatcagaaagagactaaatcactaaaagaagatattgcggcaaaaattactgaaataaaagctatcaatgaaaatctggaaaaaatgaaaattcaatgtaataatttatcaaaagaaaaggaacatatttcgaaggagcttgttgagtacaaatcccgctttcagagtcatgacaatctagtagcgaaactaacagaaaaattgaaatccttagcaaataactataaggatatgcaagctgaaaatgagtctctaataaaagctgtagaagagtcaaaaaacgaaagcagcatacaattgtctaatttacaaaataaaattgattctatgtcacaggaaaaagaaaattttcaaatagaaagaggcagtatagaaaaaaatatcgaacaactaaaaaaaaccatctctgacttagaacaaacgaaagaggaaattatctctaaatccgattcttcaaaagatgaatatgagtcccagattagtctcttgaaagaaaaattagaaacggcgacaacagcaaacgatgaaaacgtgaataaaatctcagaattgactaaaactagggaagagctggaagccgagttagcagcttataaaaatctcaaaaatgaacttgaaaacaaatag

SEQ ID NO: 81828 - DNA, 75 bp, Saccharomyces pastorianus
atgctaccgccggcccctatgccggctgataatggcggttggtataatccacgcaagagactctctctgactgca

SEQ ID NO: 81829 - DNA, 648 bp, Saccharomyces pastorianus
atgctgatagtattattcttaacattattttgttcggtagtgttccgaacagcttattgtgatgtggccattgtggctccagaacccaactcagtttatgatttatctggtacaagtcaggctgttgtcaaagtaaagtggatgcatacagataacacaccacaggaaaaggattttgtcagatacacgtttactctgtgttcgggtaccaatgccatgatagaagcaatggctactcttcaaacactcagtgcgagtgatctgacagacaacgagttcaatgcgataatagaaaacaccgttgggacggacggtgtttacttcatacaagtctttgcgcaaacagctatcggttacaccattcattacactaacagatttaaactaaaagggatgattggtacaaaagccgctaatccgagtatgataaccattgcaccggaggcacaaacaagaattaccacaggagatgtgggtgccacgattgattctaagagtttcaccgttccctacaacttacaaacaggtgttgtgaaatatgctcccatgcaactccaaccggctactaaggtaacagcaaagacatggaaaaggaagtacgcgaccagtgaggtaacgtattactacactttaagaaactccgtttga

SEQ ID NO: 81830 - DNA, 150 bp, Saccharomyces pastorianus
atggacaataataacgatggagtagatgagttgaataaaaagtgtacattttgggatgctatatcaaactttattacgttcaatttttctttaaacaagccgaacaagaacaagccgatgtatgacagtattatttttgggcaacgttaa

SEQ ID NO: 81831 - DNA, 159 bp, Saccharomyces pastorianus
  modified_base (17)..(17): a, c, g, t, unknown, or other
  modified_base (154)..(154): a, c, g, t, unknown, or other
gtaaaaacatggtttantgtgttaaggcgtggtatcagtatagagaaaagttctctagggagagaaggccaaacaactcatgatttccgacaaccacaaaagataattgaagctaagccatctttaaagaataacggtacgatccctgtttgtnaatag

SEQ ID NO: 81832 - DNA, 330 bp, Saccharomyces pastorianus
atgaactatttagaaggcgttgggtcaaagaaaggaggtggtggtatagcctcagaatctcagtttaacgtacaacgaaggaaagaagtcgaatcattacttagtaaaggcgaaaatgtcccgtacactttccaagatgaaaaggacgaccaagtaaggtccaatccgtacatttacaagaatcattccggtaaactggtttgtaaactatgtaatacaatgcacatgtcgtggtccagcgttgaaaggcatttgggtggtaaaaaacatggtttaaatgtgttaaggcgtggtatcagtatagagaaaagttctctggggatcctctag

SEQ ID NO: 81833 - DNA, 165 bp, Saccharomyces pastorianus
atgattggccccttgggcgtctctggtttcaaaacgtcattggacattgacactactgaagctgctgacactgccaagggatccatgtcattagttggtttgagctccatcgatgccacttctccgagcgcagatttagtgtgcccaagtggatctgttgtgtag

SEQ ID NO: 81834 - DNA, 1041 bp, Saccharomyces pastorianus
atgtctaggaaaagaagtactaagcccaagccagcagctaaaatagctttgaaaaaagaaaatgaccagttcctcgaggcattgaaactatacgaagggaagcaatacaaaaaatctctcaagctgctagacgcaattttgaaaaaagacggtagtcacgttgattccttggctttaaagggtcttgatttatattctgtaggtgagaaagatgacgctgcttcctacgtggctaatgccatcagaaaaattgaaggcgcttcagcatcaccaatctgctgtcatgtattaggtatctacatgagaaacaccaaagagtacaaagaatctattaaatggttcacggcagctttgaacaatgggtccactaacaagcaaatatatagagacttagcaactttgcaatcacaaattggcgatttcaaaaatgctttagtgtccaggaaaaaatattgggaagcattccttggttaccgtgctaactggacatcattggctgtggcacaagatgtgaacggtgagaggcaacaagctattaacactttatctcagtttgaaaaactcgctgagggaaaaatatctgattccgagaaatatgaacacagcgagtgtttgatgtacaaaaacgacgttatgtataaagctgccagtgataaccaagacaagttacaaaatgtattgaaacatttgaatgatatcgagccatgcgtctttgataaatttggtttattagagagaaaagcaactatttacatgaaattgggtcaattgaaagacgcgtccattgtttatagaactctgatcaagagaaatccagataattttaagtactacaaattactggaagtatccttgggaatccaaggtgacaataaattgaagaaggctttgtatggaaaacttgaacaattttatccaagatgcgaaccacaaatttattccattaactttccttcaagacaaagaagagctcagcaaaaaattgagagaatatgtttgcctcaattggagcgcggtgttccagcaacttttccaacgtga

SEQ ID NO: 81835 - DNA, 1449 bp, Saccharomyces pastorianus
atggaaaacttgaacaattttatccaagatgcgaaccacaaatttattccattaactttccttcaagacaaagaagagctcagcaaaaaattgagagaatatgtttgcctcaattggagcgcggtgttccagcaacttttccaacgtgaaacccctttaccaaagaaggaagtccaaggtttcaccactattgagaaaatagtcctggattatatgtccggattagatcctacgcaggatccaattccttttatttggaccaattattacttgtctcaacatttccttttccttaaggattttccgaaagcccaagaatatattgatgctgcccttgaccacaccccaactttagttgagttttacatcctcaaggcacgtatcctgaagcacttaggcctaatggacacagcggctggaattttggaggaaggtaggcaacttgatttgcaggatagatttatcaactgtaaaacggttaagtactttttaagggctaacaatatcgacaaggcggtggaagtcgcgtcccttttcaccaaaaacgatgattctgttaatggtattaaggacttacaccttgtggaagcttcttggttcatcgtagaacaggcagaagcctattatagactatacctggatagaaaaaagaaattagacgatttagcatcgctaaaaaaagaggttgaaagtgataaaagcgaacaaattgcgaatgatatcaaagaaaaccattggcttgttcgcaaatataaaggtttggcgctgaaaagattcaacgctattccaaagttttataaacaattcgaagatgaccagttggatttccattcatactgtatgagaaaaggtacgccaagagcctatctggagatgttagaatggggaaaggcactttataccaaacccatgtatgttcgcgcaatgaaggaagcatcaaagctttactttcaaatgcatgatgatcgcttaaaaagaaagtccgattctttagatgaaaattcagatgaaatccaaaataatggccaaaatagtagcagccaaaagaaaaaagctaagaaggaagcagccgctatgaacaaacggaaagaaactgaagccaagagtgttgctgcttatccgagtgatcaagataacgatgtattcggcgaaaagttgattgaaacctccactccaatggaggacttcgctaccgaattttataataactactccatgcaagtcagagaagacgaaagggattatattttggactttgaatttaactacagaattggaaagttagctttgtgctttgcttctctaaacaaattcgctaagagatttggcaccacgagcggtttatttggtagtatggccattgttttgttacatgccacaagaaacgacaccccctttgatcccattttgaagaaagtagtcacgaagagccttgaaaaagagtatctg

SEQ ID NO: 81836 - DNA, 1743 bp, Saccharomyces pastorianus
atgtatcgtacaagaagctctgacgaggtaaccacatcaacagatctaactagctcaagtgacgttgctacttcagttgacccaactacttctgttatcagttcaacttcagcagacccaactacttcagcagactcaactacctcgaccgttcaaactacttcagctgatccaactacctcgaccgttcaaactacttctgttgatccaactacttctgtagtcagttcaactttagctgactcaactacttcaaccgttcaaaccacctcagctgatctaagtatctctgttatcagttctacttcagttgacccaactagttcaagcgctgtgactacttcgaccgttcaaaccacttcagctgatccaactagttctgtagtcagttccgctccagttgatccggctagttctgttgtcagtttaacttcatcttacccaactagctcaagcactgtgactatttctgctaattcaaacggttcagctactttaacagctcaaactacttcaattgatccagttagctccatcgttagttcaagcggtgcaactactatcatcagtagcgcctcaattgatccagctagttctgtagttagttcaacttcatctgaaccaaccagttttattgtcagttcaacctcagtttattcaactagaccaagtggtccaactacttcaacagatccagctactttctctgacacaatcattctaagggtttcaaccacttcaaccagccaagatacccaaacagtatcatctagtctaactgatatggtttcctcaactggttcagctgatttgagcgtctcatccattcaaagatctcaagtagacccaagcactttcgctgtctcgaatagcccagtatatccaacagcttcgaccggatcaacttccacgggcattccaattgcgtcggaaagtctaagcctttctagacagcaaggaatttcggccacttcaagttcttcgattgtaactttaaccccagttgattcggcttcctcgagtaggtcaagcgcaacaagtataatcaagcctaatatgccagttagcagcaatgattcgaagacccaaagttctgtttctgtagttgacgcattccaatcaactaaatcttcatatcctagcataacttcagcagacccaacgactctagccagtgaaaatggtttagtcggctcatcttcctcagctcatccaatcacattagatagaacttatgcatcagctcacgcaagcgtcaccgatattgtcagtagagttactgactcgactcgccatacaacactagtaacttcaaacattaacattcagtctgaggttgggaacccaaattactcgggtcccaaagacactaccatcaccaaacaatctgcatttatgacttctcctgcatcaacgtctactataagtaacgttcaatcaactgcttccgtaatgaatcacagtattgaggacaatatttctgcagctgcctctctagaaagtgtttctggtacctcaactaaagattattctagtcaatccagtgccattcattatacaaattccttcacgaccaccactactaacgcatttatcacatcaaagcattccattgctgctgtatcaacaggagccattacatcatctgccagcatttcattaatcatggaaggcagcgcaaacattgaagcagtaggaaaattggtgtggctcgctgccgctcttcctctagctttcatttag

SEQ ID NO: 81837 - DNA, 363 bp, Saccharomyces pastorianus
atgagatcatgtctgaagacttttcgtctcttatccattttagaaaggaagaacattccgaggcaaccggcaataagggacacggcagacgcagttatagctattattcttaactgcaacagttgcggagccgtgaatgtagaggtcatccccggcaaccccagcagctggttaaccgtggtagtgttaagctgtcggagagaatcaactctcttttctagtaaggatgaccctttcaacgcgtttaaattcgggggaaatccctcagttatcattttgagttggagagtttgctttattcgtcacacttcggatcacttgtttgtcgtttttttttttggtgactcttactgctttttatag

SEQ ID NO: 81838 - DNA, 1458 bp, Saccharomyces pastorianus
atgaatttacttgaaacaaggaggtccttgttggaggagatggagattattgaaaatgccatagcagaaagaattcagcggaatccagagttatattaccactatatacaagaatcgagcaaggtgtttcctgatactaaactgcctagatcatcgttgattgcagagaataaaatatacaagtttaaaaaggttaagaggaagagaaaacagataattttgcagcaacatgagataaatatttttcttcgagactaccaagagaaacaacaaacttttaataaaatcaatcgtccagaagagacacaggaggatgacaaggatttgcctaatttcgaaagaaaactacaacagctagagaaggaactgaaaaatgaagatgagaactttaaattggatatcaactctaaaaaagacaaatacgctttattctcatcttcttctgatccatcgaggcgcacaaatatattgtctgacagagctcgagacctagacttaaatgaaatatttactagagatgagcaatatggtgaatatatggagctggaacaatttcattctttatggttgaatgtaattaaacggggcgattgttcactgcttcaatttctcgacatcctagaattatttttggacgacgagaaatatttgctaaccccaccgatggatcgcaagaatgatagatacatggcctttttgctaaagttgagcaaatatgtagaaacttttttcttcaaaagttatgctttgcttgacgctgcggcagttgaaaatctaatcaaatctgacttcgaacattcatactgtaggggatctcttcggtccgaggcaaaaggtatctattgccctttttgttcgaggtggttcaagacatcttccgttttcgaaagccatttagtagggaaaattcataagaaaaatgaatctaaaagaagaaattttgtgtactctgaatataaactgcatcggtatttgaaatatttaaaggatgaattttctcgaacgagaagttttgttgaaagaaaactggcatttactgcaaatgaaagaatggcagaaatggatatcttaacacagaagtatgaagcacctgcatatgattcgacggaaaaagagggggccgaacaagtgggtggtgagcagagagatggtcaactgcaggaagagcacctctctggtaaatcgtttgacatgccactgggtccggatggattgcctatgccatactggctatacaaactgcatgggcttgacagagagtatcgctgcgaaatttgttcgaataaagtttataatgggcgacgcacttttgaaagacatttcaatgaagaaagacatctttatcacttgcgatgccttggtatcgaaccctcttcagtattcaatggcataaccaaaattagggaggcacaagagctctggaaaaatatgcaggggcagtcacagttgacatctatt

SEQ ID NO: 81839 - DNA, 756 bp, Saccharomyces pastorianus
atgtcaacaaactcattccatgattatgtggatttaaaatcgagaactaatacacgacagttttcagatgacgaagagttcactacgcctccaaaactaagcaatttcggatcagctttactttcccacacagaaaaaacttcagcatcagagatattatcaagtcataataatgacaagatcgcaaatcgattagaagaaatggacaggagttcatcaaggagtcaccctccaccgtcaatgggcaatttgacatccggtcatactagtacctcatcgcattcaaccttgttcggacgatatctgagaaataatcaccagactagcatgacgacgatgaacactagtgacatagagataaatgttggaaatagtcttgataagagttttgaaaggataaggaatttgcgacaaaatatgaaagaagatattacgtcaaagtatgctgaaaggagaagtaagagatttttaatatccaataggacaacgaagctgggtcctgcaaagagagcgatgactttgacaaatatctttgatgaggatgtgcctaactctccaaaccagccaataaatgcaagggagacagtggaattaccacttgaggattctcaccaaacaaactttaaagagacgaagagaaatacggattatgattcaattgattttggagatttgaatcctatccagtatattaaaaaacataatcttcccacaagtgaccttccactaatatctcaaatctacttgataaactaa

SEQ ID NO: 81840 - DNA, 108 bp, Saccharomyces pastorianus
cccgtacaattgtcggcaaccaccttggctataggagtaccccagttaccagatccaatcacagttaccttgaaaggcttttcggcagccttcaaagaaacagaatga

SEQ ID NO: 81841 - DNA, 288 bp, Saccharomyces pastorianus
atggccgacaaactatcatcaaccgatgctatgggctgttggagtcccaccttctgttttatttcattaatttcttcgtctacttcagagctccccttattcgtggtagaagtcggcatagcagcatattccctggaagatcctgcagccatattgtccatattagtactaaatgctttagaagtttcctcttttatctctaccgtcaagaagttcgcattttgcgctacgaaaaacactaacaacaataatagcgttgtaacgcttaaaattctagcatttctctga

SEQ ID NO: 81842 - DNA, 627 bp, Saccharomyces pastorianus
atgataccttccaataagagaaatgctagaattttaagcgttacaacgctattattgttgttagtgtttttcgtagcgcaaaatgcgaacttcttgacggtagagataaaagaggaaacttctaaagcatttagtactaatatggacaatatggctgcaggatcttccagggaatatgctgctatgccgacttctaccacgaataaggggagctctgaagtagacgaagaaattaatgaaataaaacagaaggtgggactccaacagcccatagcatcggttgatgatagtttgtcggccattaaaaacgataaagggtcgcgaataaccaaagcttttaatgttcaaaaagaatactccctcatactagacttgtctccgattataatatttagtaaaagcacctgttcatatagcaagggcatgaaggaactgcttgaaaatgagtatcagtttatcccaaattactatattatagaacttgacaaacatggacatggggaagagctgcaagaatatatcaagttggtgaccggtagaggaactgttccaaaccttttggttaatggagtatcaagaggaggtaatgaagaaatcaagaaactgcacactcaagggaacttttag

SEQ ID NO: 81843 - DNA, 219 bp, Saccharomyces pastorianus
atgaaggcattaagcgttttatgttttcacaacccttttaagagatgtcttggacaaaaaagcttcttcgttgatgatagcttctttagtccaactccgaaatgccttgtgctaggaaaactacgcctttccaactacactgcatttcacgacctaatcattcacgacctctttatttatatatttattcttattttttttcttctttcctttttgtaa

SEQ ID NO: 81844 - DNA, 456 bp, Saccharomyces pastorianus
atgttacgttcaattattggaaagagtgcatcaagatcattgaatttcgtcgctaagcgttcatatgcagaagctgctgccgcatcatcaggtttgaagttacaatttgctctaccacacgaaactttatatagtggctccgaagttactcaagtgaacctgcctgctaagtcaggacgtattggtgtactggccaaccatgttcccaccgttgaacaattactaccaggtgtcgttgaagttatggaaggctctaactctaaaaaattctttatatcaggtggatttgcaacagttcaaccagactcgcagttatgtgtaactgcaattgaagcttttccattggaatccttttcacaagaaaatataacaaatttgttggcagaagctaagaagaacgttagttcatctgatgccagggaagccgcagaagctgcaattcaagtagaagtttag

SEQ ID NO: 81845 - DNA, 2115 bp, Saccharomyces pastorianus
atggaccagccaaggacccattcaggacccacgacggccagcaatcctgcccccagctccaccaactcgtcatctgctcccagcgcgactaattcaaagcaggaaagatcctcttcgtcactgtccaaaccttcgtcagtggttccttcaaaggattcaccagatggtgacgctattgctaagactcaagcagccgctttaaaaaacgacatgaaatctggtgataccagtacattagatgggtcatctcaaaatataattccaaacagagcctcaatgcaaaaatatattgaccagtcatcagatctgctgtcgaggagctccggcgtaataacgccctccatgtctttgaatgcaagcactaacgccactaacaacgatagcagtggcaattcagctaatagtagtgatttgaagatccctatagacagggacaatactatattcaagacgttcgacaccaagactggtcaattcttgaaaaacgatgataatgaagaagaaataaggaggaacaataaagttgattcgatacccccaaagaatatttatactaatatcaacaatccatctccctccccaccaccgtcgtcaaagcaaccaccgtctgcatccgcgccgcaattgccaccagcaacggaaccacacaaagaacaagcagcacaacaacagccaccaggaaatgcttctaactttttaaggatcttttcaaataaaaaaatgaggtcgcattccgtacccactattttgcattcttctttaagaaaattatcatcccacaatcaatactatcgtaatcaaaatattcttttaaatcatccaactccttccggcatatcaaagaaaaaattttctagaaaccatcatcaaccatatttgcattctaataatcctctcagttcaaaccctctttcattaaagcgcgcaatttttttaaatcaacaaatatcaggtaacgcaagcactaacgctaataatgacaacattaataattccactgccacttcaatgacaaatcaaagcttcctatcaagctcaaactttgacttaactttggaagatagaataaactacataaaggctactccaacgcctgttccatttcctcctataaatttgcagggcttaaaagagattgacttacaggaaattctgaaaaacccacaactaagacatgatataatattcgacccgctactacaattcaggccaaatcttgatggcgaaagagggaataaaaaaagacaattggcgaatatctattggaatgatgttcaaaatgaaatttatgtttactctaagaggcctgaaatattccaatataacaggtcaagactagtcccactttttgacactttaagggatgtattgttaacgatagtcccacaaaaagagtctccgatgataaataatgtactggacacagaattgaacattcaagaactattgaaaggttctctgataatgtctaacttgtcaggctggttggctgatttatttaaacatcattgtgcccccatgagggacccatgggtggataaaatgagcaacaaatttaaagaagctgaaagagactcttctttaacaaggttaatagaaggtttaaggttggtttttcaaattttggaaacaatgaaattggatattgccaatcatcaaataagaatactaaggccagctctgttaagtaatgctgtagaatttgagaaacagtatttcaacactcttatagcctctaaaagggtgaatttaaatacttccctactttggtttgataaaaaattcaacgtaaatgttaccgctggccttgttagaaatccaagttctatcactatccctgatgtctacaatatttgcattagaagtataattaacctattgtcatgtaggaagatggtgagagagtacccaactctgctttcttttgatcatgcaagattgattcttttgcgtgccgatatacgtcaaattgtttgtattttagtttgccgtttacttttccaacaattggtggccaacgatccttcaatggataaagctacaaaggaatatgttattcatacatactcaactaaaaggctgaagaatgaaattatcagcattataaccagatga

SEQ ID NO: 81846 - DNA, 111 bp, Saccharomyces pastorianus
atgttgcagtcttttggaaatacgagtcttttaataactggcaaaccgaggaactcttggtattcttgccacgactcatctccatgcagttggacgatatcaatgccgtaa

SEQ ID NO: 81847 - DNA, 354 bp, Saccharomyces pastorianus
atgtgcgcggaaccagacgactgggaaaggatcgaaaggcatccgcggaaacttaaaatagctccgcggatgctagatttctacgagtcatacatagtctggcgtgaaggtaatttttttttatgtctccgttcttttccaaatggggtgatccgtggagggcggtgcttctttcgcgccacttccttgccgtggaaaaatgtgtacggttaccatggtcacataacctctgtgtgcggagccactctgactcgcatcaaccgggctatggttgcatcggatgctggaatgggttctattggccctaagagtcgcagtagcgcctattggactcaccaacttgtttctttatag

SEQ ID NO: 81848 - DNA, 690 bp, Saccharomyces pastorianus
atgatgaaacgatataaagcagatgttatttacaatggtgagttggatgttcatttcccttatttaacagttaagcaaactttggatttcgctattgcctgcaaaacgcctgctctcagagtcaataatgtttccaaaaaggaatacattgcatccagaagagatttatatgcaaccattttcggtctaaggcatacctataataccaaagttggtaacgatttcgttagaggtgtatctggtggtgaacgtaagcgtgtttccattgccgaggctttggcagccaaaggttccatttactgttgggataatgccactagaggtttggatgcgtctacggccttagaatacgcaaaagccatccgtattatgacaaacttattgaaatcaaccgcttttgttacaatttatcaggcaagtgaaaacatttacgaaacatttgataaagtcactgtcctttattctggtaagcaaatttattttggtttgatccacgaggcaaaaccttatttcgcaaaaatgggttatttgtgtcctccaaggcaagcaacagctgaatttttaaccgcgttgactgatccaaatggattccatctgatcaagccaggttatgaaaataaagtaccaagaaccgctgaggaattcgaaacatattggttaaattcttctgagtttgctcgaatgaaatga

SEQ ID NO: 81849 - DNA, 96 bp, Saccharomyces pastorianus
atgagacagatcataagcaatgtcaatgccctggcagaagcgggtgaaatgattttggttcttggaaggcctggtgctggttgtcctcctttttaa

SEQ ID NO: 81850 - DNA, 396 bp, Saccharomyces pastorianus
atgagcaatatcaaaagcacgcaagatagctctcataatgctgtcgctagaagctcaagcgcttcttttgcagcttcagaagaatcatttacgggcataacccatgacaaagatgagcagagcgataccccggcggataaactgacaaaaatgctgacaggacctgcaagagacactgcgagccagattagtgccactgtgtctgaaatggcgccagatgtcgtatctaaagtggagtcatttgcagatgcgctatcccgtcatacaacgagaagcggtgcctttaatatggattcagatagtgacgatgggttcgatgcccatgccatctttgaaagttttgtaagagacgctgatgagcaggcatccatatccgcaggctggtgttaccataga

SEQ ID NO: 81851 - DNA, 198 bp, Saccharomyces pastorianus
atgatggctagtacatccaatgatgaagaaaagttgatatcaaccactgacaaatacttcatcgagcaaaggaatatagtattgcaggagatcaatgatactatgaattcaatcttgaatggtctgaatggtctcaatatatcattggagagctcgatagctgtgggaagagaattccagtcagtttctgatttgtga

SEQ ID NO: 81852 - DNA, 912 bp, Saccharomyces pastorianus
atgaagcattcccaaaaataccgtcggtatggaatttatgaaaagactggtaatccctttataaaagggttgcaaaggctgcttatcgcttgcttgttcatttcaggctcgctgagtattgtcgtctttcagatctgtctacaggtgcttctcccttggagcaagattagatttcaaaatggtataaatcaaagtaagaaggcttttatcgttttattatgcatgatcttgaacatggtggctccctcttctttgaatgtcacttttgaaacatcgcggccattgaagaactcttctaacgccaagccatgctttcgatttaaagacagggctataataattgcaaatcatcaaatgtacgcagactggatttatctctggtggctttcctttgtttcaaatttgggtggtaacgtttatatcatcctgaagaaagctttacagtacataccattactgggatttggcatgcgaaattttaagtttatatttttaagtaggaactggcaaaaggatgaggaagctttaacaaatagtttggtttctatggacttaaacgcgaggtgcaaggggccccttacaaattataagagttgttattccaagacaaatgaatccattgccgcttataatttaatcatgttccctgagggtacaaatctaagcctcaagacaagagaaaaaagcgaagcattctgccaaagagcacatttggaccatgtccgattaagacatttgttactaccgcactctaaaggcttgaagtttgcagtagaaaaactagctcctagtttagatgctatctacgatgtcactattggatattctcccgccttgagaacggaatacgtcggcaccaaattcaccttgaagaaaatattcttaatgggtgtctatccgcgcacacggtag

SEQ ID NO: 81853 - DNA, 195 bp, Saccharomyces pastorianus
atgttggacatcaaccaatttatcgaagataagggcggtaacccagagttaatcagacaatctcagaaagcaagaaatgccagtgttgaaatcgtcgatgaaattatttccgcctaccaagattgggtcaaaacgagattcgaattagatgaattgacaagcaattcaacaagcttcacaaggatattggtttga

SEQ ID NO: 81854 - DNA, 801 bp, Saccharomyces pastorianus
atgagcgagcttaaggagctagcacagaatatcaagaccattgacgcagagaatataagaaaaaaaatttcacatttagaaatgatttttaagaggaagaatgtagagaaactagaacagggattattacaggcgaagttagtgctgaacaaaacagatgagtgtaagtcaatgtatgaggagaacaagttggataactgcttagagctgataaaatccatcgattatctgattaagggggatgattcaataaacgaagatgttcagagttggactaggtgttggccctataaattaagcaatttgaggacgataccagctttgtcagcaacgagagagtttttaaccaatatgaagattgaaataggaggaaagttcagcctacaattatcgattttactaatagatgatttaagatccttttgcaaatcaatcaaaccaaaggaaacactacataggatacaaacgggatctaatgataaaaagcaaactatatttactgataatttttcttcaaagataaccgaattaatagtcagattgaatagatgcgaagaattaacgagtgcctttgacctatacagggaaaaatctatcactgagcttaaatctatcataaaaatttatttgccaacagagaatgcacacgctgacaataaccacgatgaaaaacatcttaacaatggctctactagtgggtctaaactttcaagattaataaaggagcaaactcctgcagaatttcagtccatgctagtaaacatattcacgcacgcgctagaagctcttcgaagactttag

SEQ ID NO: 81855 - DNA, 264 bp, Saccharomyces pastorianus
atgcatgaggagtcgtttgaagcaaatctgaggcaaggggatgccgagctaataaatagtatacctgacttgtacttttcagacaaatttcaagtaggtaaccctcgaacttttcataaagtgttggacgctatcgatttatttgtaacgaaactagacatgaagagacaagcggaaagggatgaggctttttttgagttgagggacaggctaaacgattttttggatatcgtagaaacattactggttacagagatatcctga

SEQ ID NO: 81856 - DNA, 576 bp, Saccharomyces pastorianus
atgtcaataagcgaaacatctcataataaaagccagggactgcaaaaagcggctggtcgtcctaaaattgttgttcctgagggatcgccttctcgtaatagtgatagtggctcttttactatagagggtgatacttcccttaatgacgacttgttaagtatatctggcagtgtcacaccaagagcgagaagatcttcgagattaagtctggattcaataacgccgcgaagaagttttgattctaggacactttctgttgcaaatagtagatcattcggttttgaaaatgaaacacatagtgggtccatggacttttcgccattgggaaataactccatctatgaaattgtgatgaacacaaggaggaaaaactggctcaattaccccactgttgctgatattccacaagttagcctaagcaaaaatgatctggatgaccattggaaaactcatgttatcgaatacgtcaaaaacattaaaagtgattaccaaatatttcaaagcacaaataatataagaaacatgaatcagatggaacagttaaaagaactgcgagaaggggaaaattgcatgagg

SEQ ID NO: 81857 - DNA, 543 bp, Saccharomyces pastorianus
atgttcgaatctgtcaatttggatgaaaattctccagaggatagagaactggctaaggttttgtccccaccgggtagttatctttctccagcttcactagacagtggttcatcgttcacaaatagtgggacttcaactagttgctttgaaccaaaaaacaatctaccctccttatcgtttttaaatgctagagcgggatctttaggtggcatttttaatcataaacagatgacctcgccgtcaaattcgaatataggaggcgaaaatgtaggatcgaccacaagtagtaatgacggcagtaatgaaaatgcaggtcatcccactacttcagagcaagatcaaaatgcagatcaccccactatttcacaggcagatgataatggacactcatcgttgacccctaatcctgctgtaacttcaactgttacggataagaagggaaatacagtaaaacggaagtactccagaaatgggtgctccgagtgtaagagacgaagaatgaaatgtgatgaaactaaaccgactgttggcagtgcgcaagat

SEQ ID NO: 81858 - DNA, 2085 bp, Saccharomyces pastorianus
atgacctcgccgtcaaattcgaatataggaggcgaaaatgtagaatcgaccacaagtagtaatgacagcagtaatgaaaatgcaggtcatcccactacttcagagcaagatgaaaatgcagatcaccccactatttcacaggcagatgataatggacactcatctttaacccctaatcctgctgtaacttcaactgttacggataagaagggaaatacagtaaaacggaagtactccagaaatgggtgctccgagtgtaagagacgaagaatgaaatgtgatgaaactaaaccgacttgttggcagtgcgcaagattgaatcgtcagtgcgtttacgttttaaacccaaaaaataagaaaagaagaacctcaaatgctcaaagagtaaaagaatttaggaagcacagtactagcctcgataatgatcataataatgctcgcaagcgtcagcattcgtcatgcaaggctgggaagaagaaaaaagtacgacaaaatttaagtgaagacaccacggaccctaaaccgattacagataacggcaagaatgtacctttggatgaaatagaatccctagagattccaaatttggaccttaccaccacaatgaatggatatgacgttaatttactaatgcagaacttgaatgatatggttaatatgaaacttcatgactcttacttattgaatgaagaactgaaaggattagatttgcccgatttggacatacctgaacttttgcccgcttcgaatgtaaacagtagcgtaccaatatcctttctggtgaataatgtaataactttcaacacaaaactaagctcgttcaaactaggtggaatccacgataagtatctaaagatattttactacgattgcttagattctattgcgccctttttccaaaatcaagggaacccgttaagagatatcttactttcatttgcgaaaaacgaggcctatcttttatcttccatattagctacgggagcatctatagcatatagaaagtctaataacttggaagatgaacgaaactattgtgcttatttgtcacattgcctgagcctgttgggtgaacaattcaagaatgagtcaaacgttttaaataggatagagcctatcatcctgacggtcatcatgcttgcatgggattgtatttattcaatgaattctcaatggaggtctcacttaaaaggtgtaactgacctttttaaaaaaatcaatgccgggaattcctccaaagtacttaacgttgcaaaatgttggtttaaaattatggaaacattcgccagtataagtacggtatttggcggatctttaattgataataatgaccttgatgcaatttttgatccatatgattaccaatatgttgactcgttaaaatttttaaatattatgactccactaaatgagtttaatcttttaagaggacataaagaagatttcgatcttgttattaaagaagttttcaaatcactcaatacaattaggtcaactgaaaaaaattacttttctaaagaagaaggtttgttcactaagaaattagactatctgcttttatcatcccaaacttcgtccgaaaagtccaaagaccagatatcatatttcaatacgcagaaaattctagtggaaattgacaagcaattagattacgaatttattgacaaatctggaattataccctcagacaatcagtcacaccctagaattagtaatattcatgataatgccatcgatatggtgacattaaagaacggtgaagaagttgccatcagctggtatgatatttctcatcagacacaagttttatctttcttattaattgtattattaaaacttttaggtatgccaaaagagtcaagtaccattcaacaagtggtcaagaaaattatgtctttcttcaaattcttagacagtgactcgccgccacaaaattcaaggacttgttatagtaattttgctgtattgattgcaggtttgaatgcaatggacgaggaaacaagagcgattgttaaaagatattataaaatcaatggtggaaaatttcaaaggctccctgcacattattataatatatgtggataa

SEQ ID NO: 81859 - DNA, 735 bp, Saccharomyces pastorianus
atgttcattaaaaacgatcacgccggtgacaggaaacgcttggaagactggagaatcaaaggttatgatccattaacccctccagatctgcttcaacatgaatttccaatttcagccaaaggtgaggaaaacattatcaaggcaagagactccgtctgtgatattttgaatggtaaagatgatcgtttagttatcgtgatcgggccatgttccctacatgaccccaaagccgcttacgattacgctgacagattggctaaaatttcagaaaagttgtcaaaagacttattgattattatgagagcgtatttagaaaaaccaaggactactgttggctggaaagggttgattaacgaccctgatatgaataactcttttcaaatcaataaaggtctacggatttcgagagaaatgttcataaaactggttgaaaaattacccattgctggtgagatgttggataccatttctccgcagtttttgagtgattgtttctccttgggtgccatcggcgccagaactactgaatcccaactgcacagagaattagcatccggtctatctttccctattggatttaagaacggtactgatggtggtttgcaagtcgccatcgacgctatgagagccgctgcacatgaacattactcctttctgtcacaaagccaggtgtcactgctatcgtgggcactgaaggtaacaagataccttcctgatcttgagagtgacctgcag

SEQ ID NO: 81860 - DNA, 576 bp, Saccharomyces pastorianus
atggacggtatcaccatgggtggcggcgttggtctatccattcacacgccctttagaattgctacagaaaacaccaaatgggccatgcccgagatggacattggtttttttccagatgtaggctcaacttttgctctccctagaatcgtgacattggctaactcaaactcacaaatggccctgtatctatgtcttacaggagaagtagtcacaggagcagacgcttatatgctcggcttagcgtctcattacgtcagtagtgaaaatttagatgctttgcagaaaagattaggtgaaattagccccccttttaataacgatccacagtctgcatacttcttcgggatggttaacgaatccatcgacgaattcgtatcaccattaccaaaagattatgttttcaagtattctaacgagaaattaaacgttattgaagcctgttttaacttgtctaaaaatggtactattgaagacataatgaataacttacgtcaatatgaagttctgcggaaggtaaggctttcgcacaagaatcaaaacgaaattgtaaccagtcaccatcctctcttcaatcgc

SEQ ID NO: 81861 - DNA, 165 bp, Saccharomyces pastorianus
  modified_base (35)..(35): a, c, g, t, unknown, or other
  modified_base (41)..(41): a, c, g, t, unknown, or other
  modified_base (45)..(45): a, c, g, t, unknown, or other
  modified_base (50)..(50): a, c, g, t, unknown, or other
  modified_base (52)..(52): a, c, g, t, unknown, or other
  modified_base (55)..(56): a, c, g, t, unknown, or other
  modified_base (58)..(59): a, c, g, t, unknown, or other
  modified_base (64)..(64): a, c, g, t, unknown, or other
  modified_base (67)..(67): a, c, g, t, unknown, or other
actacaaacttattcattttaaattcatccaaccnaccacnttcnttctntnctnntnntaatntanctactgtggcaatattcaattttaacaaagaatttgccaattccatcaaattttttactgatgaatattctttgaattttcaaatagcacttacttga

SEQ ID NO: 81862 - DNA, 306 bp, Saccharomyces pastorianus
atgctcagaaatacgctaaaatgtgcccaattgtcgtctaaatacggatttaaaactaccacacgtacattcatgactactcaaccccagctaaatgtcaccgacgcaccacctgtgctatttaccgttcaagatacagctagagttatcacgctaaataggcccaaaaagctcaatgctttgaacgccgaaatgtcagaatccatgttcaagactttgaacgagtatgcaaagagcgatactacaaacttagtcatattaaagtcatccaaccgagcacgttcgttctgtgctggtggtgaatag

SEQ ID NO: 81863 - DNA, 759 bp, Saccharomyces pastorianus
atgatcgaagctttacaccgtaggaagaagttctgcgcaatgacaggtgacggtgttaacgattctccatctctaaaaatggccaatgttggtattgcaatgggtattaatggttcagatgtttccaaagaagcgtctgatattgttctaagcgatgacaattttgcttctattttgaatgctgtcgaagaaggtcgtaggatgacggataacattcagaagtttgtcctacaattattggcagaaaatgttgctcaggctttgtatttgatcattggtttagtattcagagacgagaacggaaaatcagtatttcccttatcaccagtggaagtattgtggattattgtcgtcacctcttgttttcctgctatggggctaggtctagaaaaggctgctccagatttgatggatagacctcctaatgattcagaggttggtattttcacatgggaggttattatagatacatttgcatatgggattataatgacagggtcctgtatggcttcatttactggatcactgtatggaataaatagtggtagattggggcacgattgtgatggcacctataacagcagttgtcgtgatgtttatagatcacgttctgcggctttcgcaactatgacgtggtgcgctttgattctggcttgggaagtggttgacatgagaagatcctttttcagaatgcatccagacactgacagcccagtcaaggaagacctgcaggcatgcaagcttgcactgccgtcgttt

SEQ ID NO: 81864 - DNA, 102 bp, Saccharomyces pastorianus
atggtcatgaccggatctcagtttgacggactaagtgaggaggaagtggacgatttgcccgtcttacctttagattattgcacgttgctctccgaagactaa

SEQ ID NO: 81865 - DNA, 2136 bp, Saccharomyces pastorianus
atgggcgaaggaactactaaggaaaacaataatgcagaattcaatgcttatcacacgctgactgcagaagaagccgctgaattcataggcacaagtctaactgaaggtttgacccaagatgagttcgtccacagattgaaaacagtgggtgagaacacattgggtgatgacactaaaattgattacaaggcaatggtcctccatcaggtatgtaatgccatgatcatggtccttctaatatccatgataatctcgtttgccatgcatgattggattactggtggtgttatttcctttgtcgtgggtgttaacgtcggtattggccttgttcaagaatataaggctacaaagacaatgaactctttgaaaaacttgagctctcccaatgctcatgttattaggaacgggaaaagtgagactataaactcaaaagatgtggttccaggtgatatttgtctggtgaaggtcggtgatactattcctgctgatttgcgtttaattgaaactaagaattttgatactgatgaatcactactgaccggtgaatctttgcctgtctccaaagacgccaacttagtgtttggaaaagaagaagaaacctccgtgggtgatcgtttgaatttagcattctcttcgtctaccgttgtcaaaggaagggcgaagggtattgtcatcaagacagctttgaacagtgaaattggtaaaattgcaaaatctttacaaggtgatgcaggtcttatttcgcacgatcccaataaatcatggttacagaacacatggatatcgacaaaaaaaatcactggtgcatttttaggtacaaatgtcggtacgcccctgcacaggaaactgtctaagttggcggtattgcttttctggattgccgtactttttgctatcatcgtcatggcctctcaaaagtttgacgtagataaaagggtagctatctatgccatttgtgtggccctatccatgattccctcttcattagtcgttgtcttgaccatcaccatgtctgttggggctgctgttatggtttctagaaacgttattgtaagaaaattagattctctggaagctttaggtgccgttaacgatatctgttctgacaagaccggtactcttacacagggtaaaatgttagcgaggcaaatttggatccctcgctttggtaccataactatctcgaattctgatgacccctttaatcccaatgagggcaacgtgagtttgattccaaggttttcaccttacgaatattctcataatgaggatggtgacgttggtattctccagaatttcaaggatcgcctatacgaaaaagatttaccagaagatattgacatggatctatttcaaaaatggctcgaaaccgccactttggctaacattgctactgttttcaaagatgacgcaactgactgttggaaagctcatggtgacccaacagaaattgcgattcaagtgtttgctactaagatggacttgcctcgcaatgcccttaccggtgagaaatcgactaatcaaagtaatgagaatgatcaatcctctctttcacaacacaatgagaagcctggcagtgcacaattcgaacatattgctgaattcccattcgactcaactgtgaagagaatgtcatctgtctactacaacaatcacaacgaaacatgtaatatttatggcaagggtgctttcgaaagcatcatcagttgttgcagttcttggtatggtaaggatggtgtaaaaatcacaccattgaccgattgtgatgtcgaaatgataaggaaaaatgtttacagtctatcaaatgagggtttaagagtcttgggttttgcctccaaatctttcactaaagatcaagtgaatgacgatcaattgaaaaacattacttcaaacagggccaccgcagaaagtgatttagttttcctagggttgattggtatttacgatccacccagaaatgagactgccggtgcagtcaagaagtttcaccaagctggtattaacgttcatatgttaactggggactttgtgggtacagcaaagctatcgctcaggaggtggcatcttacccaccaatttgtaccattactcccaagagattgtagacagtatggtcatgaccggatctcagtttga

SEQ ID NO: 81866 - DNA, 462 bp, Saccharomyces pastorianus
atggagcaaatattatataatcaaagccttaaaatttctaccctttctacttttcaaggtttaaagtttctaaaggtcctcattttttctattttccaacaactattttataacccagttatacaattatttggaacgaaagcctcaataatggaatctgattccactactctgctcgaaagtagttggagtactgagcgaaactttctcaatatgaatccagattccatatctgctaccaagaatgtttttatattattttttaccattttcagattagcggagtatattgtatacaaactctctgaccagaagtatcggttacacacatccctgaatgtccaacatttcaggtggattcgaagaagaatacaaacagaaaaaggacactttcctttagcaaagcttacttaccaagaacaaatatataccgatttttgtagccgatggactaaaaataga

SEQ ID NO: 81867 - DNA, 543 bp, Saccharomyces pastorianus
atgtcagatcctatagtaacgtcttccaaaatggaaaaaagtgcagagtttgaagtaacagactctgctttatataataacttcaatacatcaacaacagcttcactaactccggagattaaggaacattctgaggaatctcgcaatgggttagttcacagattcgtcgactcattcagaagagccgaaagccaacgtttagaagaagacaatgacttggaggatggtaccaaatcgatgaaatctaataaccacttaaaaaagtcaatgaaatctagacatgttgtaatgatgtctttaggtacagggataggaacaggtcttctagttgccaacgccaaaggtttgagtcttgcaggcccggggtctttagtcatcggttacgttatggtgtccttcgtcacgtattttatggtccaagcggctggtgagatgggtgtcacttatccgacgcttccaggtaacttcaatgcatacaattcaatctttatttcaaagtcgtttgggttcgcgaccacttggttattttgcattcagtggtaa

SEQ ID NO: 81868 - DNA, 204 bp, Saccharomyces pastorianus
atggctagaactttctttgtcggtggtaactttaaattaaacggttccaaacaatccattaaggaaattgttgaaagattgaacactgcttctatcccagaaaatgtcgaagttgttatctgtcctccagctacctacttagactactctgtctctttggttaagaagccacaagtcagacctgcaggcatgcaagctggcact

SEQ ID NO: 81869 - DNA, 636 bp, Saccharomyces pastorianus
atgagtagtcgcaaaagcaccgcttctagcttactgttacggcaatatagagaacttactgatcctaagaaagctattccctcatttcatatagaactagaggatgattcaaatattttcacttggaacataggtgttatggtgctaaatgaggattccatttatcatggagggtttttcaaagctcaaatgagatttccggaagactttcccttttctccaccacagtttcgatttacgccggctatctaccatccaaacgtttacagggatggcaggctttgtatttctattttacatcaaagtggggatcctatgaccgacgaacctgatgctgaaacgtggtcccccgtgcagaccgtggaaagtgtgttgatctctatagtatctctattagaggaccccaatatcaactcgccagcaaatgtcgatgccgctgttgattacagaaagaaccctgaacaatacaagcaaagagtcaaaatggaagtggaaagatcgaaacaagatatccctaaaggtttcataatgcccacttctgaatcggcgtacatatctcaaagtaaactagatgaaccagaatcgataaggatatggacctgcaggcatgcagcttgcactgccgtcgtttacacc

SEQ ID NO: 81870 - DNA, 162 bp, Saccharomyces pastorianus
atgagtttttggtgttataattccagcatcaacattcatgaaagaaatttcattgaaaactttaactctgaaatcgaagttgacgatctggatataaaggataaagtttccctggattaccgtgcgatatattgcaaggacagccacagaatcaaaagatga

SEQ ID NO: 81871 - DNA, 108 bp, Saccharomyces pastorianus
atgcactgtacgaatggtgaattgataatatctctcgtggtagcatgtatgagaaagttttcatattggagtacggtatccatactaaatgagtttttggtgttataa

SEQ ID NO: 81872 - DNA, 300 bp, Saccharomyces pastorianus
atgacactagtgactccgttacaattttcgaccgtacagccaaatttatatagaggatcttacccacgagaaatcaatctcccattcctgagaacccttagattgaaatacatattatctttgacaccagaacctttgagcactgatcctctaatggtaaagttttgtgaagaaaataacattaagacaattcatataaaatgtcaaagtgaaagaaaggcagacaagaccaaaccccagattaaaaggaacaagaaaacagttcctattgaatacgaagttgtagtacgatgcgtctaa

SEQ ID NO: 81873 - DNA, 1977 bp, Saccharomyces pastorianus
atgaacatttacaacactttgctggaaaccttattaaaagatgaaaacattgcaaaaataaaaagtttcattaagtcttccataaaacaaacaaaattgaaccatgagcaagaagaatgtaacctgatgagaacgggttcctatatcacttccaatcaattaaactccctaataagttcatcagcaaattctgcttcctcccaaatggagatactactgatagatatacgatcaaggttggaattcaacaagtcacatattgatacaaaaaatattatatgcctggagcctatttcttttaaaatgtcatattcagatcatgatttggagaaaaaatcattaattacttctcctaatagtgagattaaaatgtttcaaagtagaaatcttttcaagtttatcattctctatacagacgcaaacgaatacaatgttaaacagcagtctgtcctgttggacattctggtgaatcattcctttgaaaaaccaatatccgatgactttaccaaaattttcattctggaatctggttttccaggttggcttaagtcaaattatgggaggcaagtatcatcatcttttccatcaaataacaatattaaagatgatagtgtttatattaatggtaacacttctggcctaagtttacaacatttacctaagatgtctcccagtataagacattcaatggacgactctatgaaagaaatgctagttgcgcctactccattaaatcatcttcaacaacagcaacaacagcaatcagacaatgatcatgtgctaaaaagatcttcaagtttcaaaaaattattctcaaattatacgtctcctaatccgaagaattcaaactcaaacttatattctatatcttcgttgtccatatctagttcaccatcgcctttacctctacattcgcctgacccagttaagggcaattcattgccaatcaattatccggaaacgccacatctttggaaaaacagtgagacagattttatgacaaatcaaagagaacagttgaatcacaattcttttgctcacatagctcctatcaacacgaaggccatcacttctccatcaagaactgccacaccgaagttacaacgcttcccgcaaacaattagtatgaaccttaatatgaactccaatggacacagttctgccacctctaccattcaaccttcgtgtctatccttgtctaataatgactctttagatcatacagatgttacaccaacttcttctcataattatgaccttgatttcgcggttggtttggaaaatctaggaaattcgtgttacatgaactgtatcattcagtgtatcttaggtacacacgaattaacccaaatctttttggacgattcatatgctaaacacatcaatattaatagtaagttgggatcgaaaggtattctggcaaaatattttgcaaggttggttcatatgatgtataaggaacaggttgatggttcaaagaaaatttccatatcaccgataaaatttaaattggcatgtggatctgttaactcattatttaagactgcatcccaacaggactgccaagagttttgccaattccttctagatggtcttcatgaagacttgaaccaatgcggttcaaacccacctttgaaggagctttctcaagaagctgaggcgagaagagaaaaactgtctttgcgaattgcctcgtcaattgagtgggaacgattcttgactactgatttcagtgttattgtcgacttattccagggacaatacgcctcactactaaaatgtaaagtctgtagtcatacctcgacaatataccaaccttttacggtgctgtcaatccctattcctaaaaaaaatcccgaaataatattaccattgaagattgtttcagagagttcaccaaatgtgagaacttggaggtggatgagcaatggttgtgcccacattgtgaaaaaaggcagccctccacgaaacaattga

SEQ ID NO: 81874 - DNA, 1014 bp, Saccharomyces pastorianus
atgaatgtcatattttctttggcgagtttcgtcaaaaacatgtataatgcaagtttgaaccaacgtaatctaataagcctgccgttcaacttcatgcttaattttgcgccagtgtttatttggctgtctatattcaagcacgctggtctgatacccacaaggctcagacctgacattcatagcaagtttgctttttttgctgatcaattcctcttcggggactattggcatgaacttactgtacaattgcccgataatacttcgaagctatttttctggtcattcatatcatcttctgcatttctcttagtatttctgatatgcattccctttgccatttggtactacatctattacattaagcacgttaactataatctgttagagtggttcgcaaatatttttcattacccctgcaagcgcaagcagcggccgatccaaaagaggttccggacaattttcataccgtttgccttgcccctgtttacatttgttatactcaacattgatcatttctttgcttaccagtcggatgcaaactttactaagaccaaggatttactggcttggttctcctatgtcatcctgcacttgacagctccaattttaacagctgtatacttatacgtcttccaaccaccggggactttaaaatgctttagttttgccctaggattacaaaatatagcgggggtccttacccatctgcttgttccaatggcctccccatggtttactcatctgtacggtattgatgacaccgaacatgttaattacacccaggaagggtttgctgccggtttgataagagtagatagccatttgggtactcatttgaacactaaaggatttcacatgtctcctattgtgtttggtgctgttccttcactacactccgccattgcatttcaatgtttcttgtttttggtttcaaggtccaccagcttaaaacacagattttccaatgctggaggtttcacaatgcacaataatgatccttccactttcaagtga

SEQ ID NO: 81875 - DNA, 1236 bp, Saccharomyces pastorianus
atgcgtatattgtatatatattatatcaaacaaataaggacgttaacgaaattttatatggctttatttaacgtagaaggttggtctattaagaccaaaaccgtcgcttttgataacaagactaataagtcttcaaaagataaaaaaaaaaataagagaaaaaatggcaaacttacaagagaacagaagttgaaagaagagacagaggctgagttgaaggaacaagtggaagacattgcttccgaaggatcagtagccaaagacatcccaaaaaaaaatcaagagaaaagtgatcaaaatgaaacgaacaagaaacgcaagcacgatgaagaagcccctctgatgcaagtaaaagaaaatattgaaaaacctacaaagaagcaactaacccctttacaacaaaagatgatggctaaactgactggttctagatttagatggatcaatgaacaactgtatacaattagctctgatgaagctttgaaattaataaaagaacaaccacaattatttgacgaatatcatgatggttttagatcacaagtgcaagcatggccagaaaatccagttgatgtttttgttgaccaaattcgttatagatgcatgaaacctgtgaatgctccaggtgggttaccaggtcttaaggatagtaaagaaatagttattgctgatatggggtgtggtgaagctcaattagcattagaaatcaacaattttttcaaaaattacaataagaaagcgaagaaatatttgaaaagacgccataaagtccacagttttgatttgaagaaagctaacgaaagaataactgttgcagatattagaaatgtgccgctaccagatgagtcctgtactatagtggtcttctgcctggctctaatgggtacaaatttcctcgatttcataaaagaagcttataggattttagcgccaaggggtgaattatggatcgcagaaattaaatcaaggtttagtgacggcaaaggtaatgaatttgtagacgctttgaagctgatgggattttttcacaaaaagaccttcgacgagaataagatgtttacaagattcgaatttttcaagccacctgcggagattattgaagagagaaggcagaaattggaaagaagacaaaagtttattgaagttgaaactgagaaggaagaattagaaaagaaaagacggaaaattgccgaaggaaaatggctcttgaagccctgtatttataaaagaagataa

SEQ ID NO: 81876 - DNA, 384 bp, Saccharomyces pastorianus
atgcattctctattacgggctttgaaaagcgatctcgctcgttataacgaactgaacttggataatgaattccatgaagattctggctggaaattgggccatggtgacgtatttagaaccccatctaagtcgatgctgctatccattcttgtgggatccggtatgcagttatttttgatggtcatgtgtagcattttttttgccgcagtaggtcttgtgtcacctgtttccagaggatccctgccaactgtaatgtttgttctttatgcattatttggatttgtaggatcctacgcctcaatgggtgtctacaaattttttcgtggaccctattggaaggcgaatatggacctgcagcagcaagcttgcactgccgtcgtttac

SEQ ID NO: 81877 - DNA, 879 bp, Saccharomyces pastorianus
atgaaacgaagtgtttggttgctgatttattgctatgcaactttaactaaaggattttccttgccaggcctatctcccacaacatatcactcaggcgatgaaatcccgctattggtgaaccgcttgactccatcaatttactttcagcatcaagatgaggaaggtaacgatgtttcaggcgataaagaacattttctttactcctatgattactataataagaggtttcatttttgtagaccagagcacgttgagaaacagccggagtcgttaggttcagtcatatttggtgacagaatttacaattccccattccaattgaacatgttagaggagaaagagtgtgttgcactttgtaaaagcacgattccgggaaaagatgccaaatttatcaacacgcttattaaaagtggatttttccaaaactggctcgtggatggattgccagcagcaagaaaggcttatgatagcagaacaaaaacaaactattacggcacaggatttgagttaggttttacagatgttaagcaaaccgttgacggtaaagcagttcccagtacgatggaagagcttacttcagaggcctcaaatgaggatgttatattggatgctcgacagcccaagaatgttaagcctaatttagttaaaacggtagaattaccttactttgtaaatcattttgacattgaagtggaatttcacgatcgtggtaacgataattaccgagttgttggtgtcattgtaaaccctgtatctatcgaaagatcgtcacctggcgcatgttctacaacgggaaaacctctgatactagacgaggataaggataacgaggtttacttcacttattctgttaaatttgttgcctctgatacagtgtag

SEQ ID NO: 81878 - DNA, 330 bp, Saccharomyces pastorianus
atgaaaacattcttcttgattgaggctggcagagccttgcaaatagtgacattccgtcctgtgattactactgttctattccaacgtttctcagtgagtttctccggtagttatttcacttgttgtacctcacggcttctatgggaaaattggcttttcaaattccttacagctttcgatcacgtgatccgagcttcaaatgacctttcgacgatgcgtttcatgattatgtatatatatgtatatatatatatatatctatacagtcttctggaagcgcttaagttgttaaatgctaatactttagggttgaatttattttacggataa

SEQ ID NO: 81879 - DNA, 213 bp, Saccharomyces pastorianus
atgtcactatttgcaaggctctgccagcctcaatcaagaagaatgttttcatctatatcttctttctctgctctatctgtgttacgcccacaaaccggtatgctcttaaacagttcaccattgaagaccccgtccttcacaccgttgggatttggcttaataggtcaaagaagatggaaatcaaggggtacacctatcaacctagtacattga

SEQ ID NO: 81880 - DNA, 105 bp, Saccharomyces pastorianus
atgcaccgcgaaggtatcggtggatggaagaagcgcatccctagtgtttccaaaagaaaaacgaaatgtttgacacatagacagatgacgagtagctttttttag

SEQ ID NO: 81881 - DNA, 2277 bp, Saccharomyces pastorianus
  modified_base (41)..(41): a, c, g, t, unknown, or other
atggggaagaaggatagacagcgcaagaaactgcgtgagtntgctaaattgaaaaacaggcagcgaaacttgagaaagagcgtgcaaacattgaagaatgaggttcaacgagaggctaaagtcccaggaacttcgaatcaaattgctttaggaaacgacaaaatcgaagagattaacgaaaatagtccgttattatcagctcctaataaaaaagaggaggtatcaattccgaaagcggttgatattggtaccattgatgcacagcctcttcacgaaggcccaaaaattgataactcgccccaaaatgaggtcaatagcattaaaggaaaacctgcggacaaggctaatgaagacgatcttaagccgccttcacaaaatgaaacatgtggaaattcagctttgcaaagctctattactgattttagtgatagatcagtatcaccattgcaaagtattaccagcggcaatactccgatgagtgagcacgagctaccagtatcttcctcaaattcgtttgaaagagctgatgatatgcctgtagtgcaggcagataaccagacgtcaagtagtaaatctttgcacattgttgcaccacctcctgaagtaccagtcagtggagatgaaatcacttcatatggatatggctctataccccagagcatcggggatgtagagaacggattgaatcctccttatgtcgaaaatacatcatctgatgaacttgtacatgatctgacgagaagacggatattttcatcctgtatgtgtacttatttattctttattgcaatggacagttctataatcctagtaattgcgtccaaaattgcttcggagtttcatgagttatggagattatccttagtcatctcagcatacctattgagtaatgctattgggcaactggtatttttgaagctatctttaatatccagtgtaaaattgttgttgtgtattgctcaattcagttttatccttggtggctatctatcttggagttctgcccatttttggacgtttatctttgcccgttgtgtcacaggatttgggggcggttccttaatagcgctcaaaagtactattatgaaccggttttctcaaaagaacgacagtcggtactcattgagtgcctctatgataacatttgctatgggtgtggtaattgggccctttatggtgaacttgtttgattcttctcatggtagcgggtggagaaatgccttcttaataccagttcctttttgccttgtgaatgcctcgattatgctggcagatatgtattctgttaagagcactttacatggaggcccaacgcctacattatggaaaagattcaagaatactctattaagtcctgatttatacgaaatattgacacttacgctattcctactttgtttcgttcaagtgacctcattggatttaacagggttaaagaataatacgatgattcaagcgctactattttctgtaattatcgtttgtggcattttatttttcttgatagagacaagcgatacttacatgaactctgtaatttcaatgtccttacaaggtgacaagcgtttaatatggacaatgatcggaatttcattttgctttgcagcattaatgtgcatcatcccattcggtacaacgtacttcatcattgttttaaatttaagcactttacaacttgcagagagattgtccccattctttttctccattgtactgggttactttagtgtttcttatttttggaagtcgaaaggacagaattttttgctaaaatttgttttaagcggagccaccctgttactatatgtggcacttatgggggtaagtttgaatttaccagtatggaagcaatatatatgtttgtctctgccatttttgggctcctctatgatattgaccttactgtcaaatctttatcatgagtatcatgaacaaagaaagtcacctatcagtggttctatcgtatattgtttcggtgccgtgggagggacggttggtatttccttgggtggttatgtcttccacaaaacattaataaaaattatgcatgagaaggtgatgccatttagcaagcaaggttatcttaaaaaggaccttttgaaaattatcaagcacgctacggaatcttcagattgggtacacgaatcagccccaaagtttgtttttcaaactttgattgagtgttatttacaagcatgtcgaaacgtattcaaactctctacccttttttttacgattactgtcgtagcaatattcattttcaacagaatccattga

SEQ ID NO: 81882 - DNA, 1182 bp, Saccharomyces pastorianus
atgtcaaattctccaacagtagcaactttgtcacaagaatatttcgatccgaatattcctcaaatactcccacacgagaaaatgtataagattcaggtggggaaatcattattcaaaatcagcggtgcttctttaagctcggatggtcctagtttcttcaccgaatatttttctaagaagcgctctccttccaataacgatgacagtaataacgatagcatggaatctaataaaaatgaggtcctattcatagacagatcagccgaagtttttgaatggatctatcaacatttgcaaggatatataattgagattaaggatgaagtacaatataccatgcttttcgcagatgcgatgtactacaatttaccgcgattgcgatctttactgaaagaaacggactattattttaccaacattggtggacaatcattcaagatagccaaaaatttatttagaagagaaggagattccccaaattatttcgaaatatatgcggctacagtttatatcgatgtggaagagctgataatatctaaaaaactattaaggcctccacctcattctgctccttacattccaagatcttctgagtacttcaaagatttgctgacgttactgggaggagcatccatcgatctagatgataataaaagaaatgccttgataaaagagtgccgttattacaggcttttaaatctcgaacagcggctaatcaaatctcatattagctataacccaataacaaggaaagaagagatttgcctcctattgaaggatttgtcaaaaaaaggcatcacttttccagcttcttctgcattttcaacctcgccctactttgaagacgatttctgtagcataaatgaatgcgactcgctatcaaaaacccgtgaacagccagcaaataaaaaggttaaacttgacatgactgaaaaatataacgattcctggaatatgctttgttataagagaccttttttagataagcatccgagagagttgatatttcaaataaattcgactgattgtacgataatcctcaataaggaaagccaaagtatccatgtagacataactggagaatccgcctataagtttgaggccttatttggaagtcatttgccaaatacaccctctggtgcgcctaagttgaaaaataccaggggatcctctagagtcgac

SEQ ID NO: 81883 - DNA, 3243 bp, Saccharomyces pastorianus
atggctggtaatcttgtttcatgggcctgcaagctctgtagatctcctgaagggtttggacctatatccttttacggtgactttactcaatgcttcatcgacggtgtgatcctaaatctatcagcaattttcatgataaccttcggtatcagagatttagttaacctttgcaagaaaaaacactctggcatcaaatataggcggaattggattattgtctctaggatggcactagttctgttggagatagcgtttgtttcacttgcgtctttaaatatttctaaagaagaagcggaaaactttaccattgtaagtcaatatgcttctacaatgttatctttatttgttgctttagccttacactggatagaatacgatagatcagttgtagccaatacggtacttttattctattggctttttgaaacattcggtaattttgctaaactaataaatattctaattagacacacctacgaaggcatttggtattccggacaaacgggtttcatactaacgttattccaagtaataacatgtgccagtatcctgttacttgaagctcttccaaagaagccgctaatgccacatcaacacatacatcaaactttaacaagaagaaaaccaaatccatacgatagcgcaaacatattttccaggattaccttctcttggatgtcaggtttgatgaaaactggctatgaaaaatacttagtggaagcagatttatataaattaccgaggaactttagtagtgaagaactctctcaaaaattggagaaaaactgggaaaatgagttgaagcaaaaatcaaatccttcattatcatgggctatatgcagaacttttggatctaaaatgcttttagccgcattctttaaagcaattcatgatgttctagcatttactcaaccacaactactaaggattttaatcaagttcgtcacagactataacagtgagagacaggatgaccattcttctcttcaagggtttgaaaataaccacccacaaaaattacccattgtaagagggtttttgattgcgtttgctatgtttctggtgggctttactcagacatctgtcctgcatcaatatttcctgaatgtcttcaacacaggcatgtatattaagagcgccctaacggctttgatatatcaaaaatccttagtgctatctaatgaggcttctggactttcctctaccggtgacattgtcaatctcatgagtgtggatgttcaaaaattacaagatttaacacaatggctaaatttaatatggtcagggccttttcaaatcattatttgcttatattctctgtataagttgttgggaaattccatgtgggttggcgtgattatactagttattatgatgccattgaactcatttttgatgaggatacaaaagaagttgcaaaaatcccagatgaagtacaaagatgaaaggacccgtgttataagtgaaatactaaacaatattaaatctttgaagttatatgcatgggagaagccttatagggaaaagctagaagaagtaagaaataacaaagagttaaaaaatcttacaaaactaggatgttatatggctgtgacaagttttcagttcaatatagtaccattccttgtttcatgttgtacctttgctgtatttgtttatactgaggatagagcattgactactgacttagttttccctgctttgactctgttcaacctgctctcattcccactaatgattattcctatggttttaaattcttttatcgaagcttctgtttctattggtagattatttacattctttaccaatgaagagctacaaccagattcggttcagcgtttaccaaaagtaaaaaatattggcgatgtagccattaacattggagatgatgctacctttttatggcaacggaaaccggaatacaaagtagccttaaagaatattaatttccaagctaaaaaaggaaatttgacctgtattgttggtaaagttggcagtggtaaaacagctctattgtcatgcatgttaggtgatctattcagggttaaaggtttcgccaccgttcatggttctgttgcttatgtttcgcaagttccatggataatgaatggtactgtaaaggaaaacattttatttgggcatagatacgacgcggaattttacgaaaaaacgatcaaggcctgtgcgttaactattgatcttgcaattttgatggatggagataagacattagttggcgagaaagggatctccttatctggaggacaaaaagctcgtttgtctttagcaagagcagtttatgcaagagctgacacttatttacttgatgatcctttggcagctgttgatgagcacgttgccaggcacttgatcgaacatgtgttgggtccaaatggtttattacatacaaaaacgaaggtattagccactaataaggtgagcgcgttatccatcgcagattctattgcattattagataatggagaaatcacacagcagggtacatatgatgagattacgaaggacgctgattcgccattatggaaattgctcaacaactatggtaaaaaaaataacggtaagtcgaatgaattcggtgactcctctgaaagctcagttcgagaaagtagtatacctgtagaaggagagctggaacaactgcagaaattaaatgatttggattttggcaactctgacgccataagtttaaggagggccagtgatgcaactttgggaagcatcgattttggtgacgatgaaaatattgctaaaagagagcatcgtgaacagggaaaagtaaagtggaacatttacctagagtacgctaaagcttgcaacccgaaaagcgtttgtgtattcatattgtttattgttatatcgatgttcctctctgttatgggtaacgtttggttgaaacattggtctgaagttaatagccgctatggatctaatccaaatgccgcgcgttacttggccatttatttcgcacttggtattggttcagcactggcaacattaatccagacaatcgttctctgggttttttgtaccattcatgcctccaaatatttacacaacttgatgacaaactctgtgttgagagccccaatgacgttttttgaaacaacaccaatcggtagaattctaaacagattctcaaatgacatatacaaagtggatgctttattaggaagaacatttctcagttttcgtcatgcagtgaagtcacattcactatac

SEQ ID NO: 81884 - DNA, 1107 bp, Saccharomyces pastorianus
atgagtgcgttctatccctctatcaatgctaaccgttggctagcatataggttggaacttattggttcaattatcattctaggtgctgcaactttatccgtttttagactaaaacaaggcacattaacggcaggtatggtgggtttatcattaagctatgctttacaaatcactcaaacgttaaattggattgttagaatgactgtggaagttgaaacgaatattgtttcagtggaaagaataaaggaatatgctgatttgaagagtgaggcacctttaatagttgaaggccacagaccacccaaagaatggccgagccagggtgatataaagtttaataattattccactcgttataggccggagcttgatcttgttctgaagcacattaatatacacattaaaccaaatgaaaaagttggtatcgtgggtagaacgggtgcgggaaaatcctcattaacgctagcattattcaggatgattgaggctagcgagggaaacatcgtaatcgacaacattgccatcaacgagattgggttatatgatttgagacataaattgtcaatcatacctcaggattctcaagtttttgagggcactgttcgtgagaacattgatcccattaaccaatacactgatgaagctatttggagggcattggaactttctcatttgaaagaacacgtgctatcaatgagcaatgacggattagatgcccaactaaccgaaggtggtggcaacttaagtgttggacaaagacaattattatgtcttgcaagagcaatgttggttccatcaaagattttggtgcttgatgaagccacggccgcagtcgacgtggagacagataaagtcgtccaagagacgattcgtactgctttcaaggacagaactatcttgaccatcgcgcatagactgaacacgataatggacagtgatagaatcatagtgttggacaatggtaaagtagccgagtttgactctccgggccagttattaagtgataacaaatcattgttctattcactgtgcatggaggctggtttggtcaatgaaaattacactgtgaaactaataaaaacctgtcccgcacaatctggtacgtag

SEQ ID NO: 81885 - DNA, 636 bp, Saccharomyces pastorianus
atgtatcgattctgtgcgcacgcatatcttcttttaaagtatgaaaaatatcacaatcaaaatcaacaactcaagaaattatgggctagctttcgctgtttgtttcgactggcagcctttgcattgccccgtaggtatcaaagcttctttgaagctgaattgatcttgaaaaatagcactttggagacgcgccttacgctttataggagacttcggagtagacttcgattaaaaaataaaaattacacaagaagttcaagtattatgtttaatattcaaacaacgtttccacctcacggagaaatgaagacttttatcgttctccgtgaggtggatttactgttattgtcgttagagttcatgaatgtttctcttgcgcgagcagatctactggtcaggaatctacattactttgcaatccatagtacgcttgttatgctgcatcaatacgaatatatatatctaatgctaacatctggtttctgtagatatcttggcgtgtgtttcttttatgataatacaaaaatatgtaactcctggtgtgatgcttgggcggtggaaggttacggcttagtaattacgaaattgatgaaaaaagttagcagctgctataaaaggtgcgataacctcttgtga

SEQ ID NO: 81886 - DNA, 231 bp, Saccharomyces pastorianus
atgtctcttttctcagaaagcggttctaggggaagaacaaggtatcttataatcgaacggacgcttaatgatatcaacacgatacctagtataaaaaccttacctcttcttttaataccacagacgcttgtattttctgaaatttctttagaaccaggtgaagtaagaacattctattttaaatccacaagctgccaaagatatatgcccagtatcatcgtcaaagtggca

SEQ ID NO: 81887 - DNA, 375 bp, Saccharomyces pastorianus
atggaaaatcaaacctggtccctaaaatcattactaggtgccttcaaaagaacaggcgaacctgaagagagtgtggatgtggataacatgaaaatgctaaatgagagtaagatgttaagagaaaaaatacagaagcaaatgtattttcatcaacctgtaacgttaatatccggttatgttcaaatatcgggggtctttcaatacgattcagaggtaatttcagagtcaaaatttaaacaagatgaagtaaaaatggtaggactagatattgtacctggacatacgacaaattctgttcttgcattggaagatggagaacatttcaaaggtaaaagaaatttaaccaactacctcaactcagattatacaatgtga

SEQ ID NO: 81888 - DNA, 210 bp, Saccharomyces pastorianus
atgattgttaaagtgaagacactgactgggaaggagatctctgttgagctgaaggaatcagatctcgtatatcacatcaaggaacttttggaggaaaaagaagggattccaccatctcaacaaagacttatattccagggaaaacaaatgtatgttcattcagtggttaattatcttttaagtttatttacgtttttgagaccttactaa

SEQ ID NO: 81889 - DNA, 603 bp, Saccharomyces pastorianus
atgaacacatcatttggctcagtagtgccttccactaatttcaattttttcaaagggcatggaaataatgataacactagtgccaatagtactgttaacaacagcaatttctttttaaatagcaatgaaacgaaaccttcgaaaaatgtcttcatggtgcactctacctctcaaaagaagtcgcaacaaccgttacaaaatctctcacactcaccttcctacacggaaaataaaccagataaaaagaaaaaatatatgataaacgatgccaagaccattcaacttgtaggtccactgatttcctctcctgataatttgggatttcagaagagatcgcacaaagcaagagaattaccaaggtttttgattaatcaagaacctcaattggagaaaagagcttttgtacaagatccctgggacaaggctaatcaagaaaaaatgatctcattggaagaatccatagatgatctcaatgaattgtatgaaacactaaaaaaaatgagaaatactgagcgatcgataatggaagaaaaagggctagtggataaagctgactcagcaaaggatctttacgatgctatagtatttcaaggacctgtttag

SEQ ID NO: 81890 - DNA, 834 bp, Saccharomyces pastorianus
atggccattgattactctaagtgggataaaattgaactatcagatgattctgatgtcgaggtgcatcctaatgtggacaagaaatcgttcattaaatggaaacaacagagtatccatgaacagcgattcaaaaggaaccaagatatcaaaaatttggagacacaagtggatatgtattctcatttgaacaaacgagtggacagaattttgagtaatttacctgaaagttctcttactgatttgccagccgttaccaaattcttgaatgcaaattttgataagatggagaaaagtaaaggggaaaatgttgatcctgagattgcaacatacaatgaaatggttgaagatctttttgaacaattagcaaaagatttagacaaagagggcaaagactcgaagagcccatctctcataagggatgctattttgaaacatagggctaagatcgattcagtaactgtagaggctaagaagaaattagatgaattatacaaggagaaaaatgcacacatttcatctgaagacattcatacaggctttgatagtagctttatgaacaagcaaaaggggggggctaaaccactggaagcaactccttcagaagctctttcgagcgctgcagagtctaatattcttaataaactagcaaaatcatcagttccgcaaactttcatcgattttaaagatgatcctatgaaactggccaaggaaactgaagaattcggtaaaatatccattaatgagtactcaaaatctcagaaattcttactggagcacttacctattatttcagacagacctgcaggcatgcaagcttggcactgccgtcgttta

SEQ ID NO: 81891 - DNA, 279 bp, Saccharomyces pastorianus
atgatgagaatgtctctaaaacaaatgcagtcacagagattttctgcgacttctcgagtgagaatgttgcttattggtgctagtggcttgagatcttcgtcaagcaaattggaatgcccccagattctcaaacaagcacggcagaaactgaaatacggccaaaattatgaacccttttgtgggatctttgtagaaataggacctcaggatagtatgatgaagaatgttggcatgctatacaatactacagtcatttgcatgaattggctgcttgtatag

SEQ ID NO: 81892 - DNA, 714 bp, Saccharomyces pastorianus
atgtcggattcaaaccaaggcaacaatcagcaaaactaccagcaatacagccagaacggtaaccaacaacaaggtaacaacagataccaaggttatcaagcttacaatgctcaagcccaacctgcaggtgggtactaccaaaattaccaaggttattctgggtaccaacaaggtggctatcaacagtacaatcccgatgccggttaccagcaacagtataatcctcaaggaggctatcaacagtacaatcctcaaggcggttatcagcagcaattcaatccacaaggtggccgtggaaattacaaaaacttcaactacaataacaatttgcaaggatatcaagctggtttccaaccacagtctcaaggtatgtctttgaacgactttcaaaagcaacaaaagcaggccgctcccaaaccaaagaagactttgaagcttgtctccagttccggtatcaagttggccaatgctaccaagaaggttgacacaaaacctgccgaatctgaaaagaaagaggaagagaagtctgctgaaaccaaagaaccaactaaagaggcaacaaaggtcgaagaaccagttaaaaaggaggagaaaccagtccagactgaagaaaagaaggaggaaaaatcggaacttccaaaggtagaagacctcaaaatctctgaatcacacataataccaacaatgccaatgttaccagtgctgatgccttga

SEQ ID NO: 81893 - DNA, 780 bp, Saccharomyces pastorianus
  modified_base (767)..(767): a, c, g, t, unknown, or other
atgtttggtggtaaagatcacgtttctttaattttcatgggtcatgttgatgccggtaaatctactatgggtggtaatctactatacttgactggctctgtggataagagaactattgagaaatatgaaagagaagccaaggatgcaggcagacaaggttggtacttgtcatgggtcatggataccaacaaagaagaaagaaatgatggtaagactatcgaagttggtaaggcctactttgaaactgaaaaaaggcgttataccatattggatgctcctggtcataaaatgtacgtttccgagatgatcggtggtgcttctcaagctgatgttggtgttttggtcatttccgccagaaagggtgagtacgaaaccggttttgagagaggtggtcaaactcgtgaacacgccctattggccaagacccaaggtgttaataagatggttgtcgtcgtaaataagatggatgacccaaccgttaactggtctaaggaacgttacgaccaatgtgtgagtaatgtcagcaatttcttgagagcaattggttacaacattaagacagacgttgtatttatgccagtatccggctacagtggtgcaaatttgaaagatcacgtagatccaaaagaatgcccatggtacaccggcccaactctgttagaatatctggataccatgaaccacgtcgaccgtcacatccatgctccattcatgttgcctattgccgctaagatgaaggatctagggtacatcgttgaaggtaaatngaatccggtccta

SEQ ID NO: 81894 - DNA, 1020 bp, Saccharomyces pastorianus
  modified_base (1005)..(1005): a, c, g, t, unknown, or other
atggatacggtaaacaattatagggttttagagcataaagctgctggccacgacggtactctaacagacggtgatggattgctcatctttaaaccggcctttccgcaggaactggaattctacaaagccatacaagtgagagatgtgagtcgaagaaagtcttcggctgatggagatgctcccttgtgctcttggatgcccacgtatcttggagtcttgaatgaaggggcaaaaatcgagcaaagtggcgatgctgcgcttctgaagatagatgagcggttaagtgattccactgataatcttgattcaatacctgtaaagtctgagaagtccaagcaatacctcgttttagaaaatctactatatggatttagtaaacctaatatacttgatataaaattaggcaaaactttgtatgattcgaaggcatcattggaaaaaagagagagaatgaaaagagtcagtgagacgacgacttcaggatctttgggtttcaggatatgtggcatgaaaatacagaaaaatccctctgtgctgaatcagctttcgctcgaatattacgaagaagaagcagacagtgattatatctttataaacaaactgtatggtcgttcaagaaccgatcaaaatgtttcagatgcaattgaactttattttaacaatcctcatctgtcggatgcgagaaagcatcaactgaagaaaacatttttgaaaagattgcagttgttttataatactatgctagaagaagaagttagaatgatatcaagtagtcttttgtttatttacgaaggagacccggagcgatgggaattactaaacgatgttgacaaacttatgcgagatgattttatagacgatgatgacgacgatgatgataatgatgataatgatgatgatgatgatgatgccgagggaagcagcgaaggaccaaagaacaaaaaaacaactggttctttgagttccatgtcactaatagattttgcacattctgaaataacgccnggggaagggttatga

SEQ ID NO: 81895 - DNA, 513 bp, Saccharomyces pastorianus
atgatgttgccaagatccatgaaatttatgactggaaggagaattttccatactgccacagtaagggccttccagtctaccgctaagaagagcttaactatcccatttttgcccgtattaccccagaaaccaggtggtgttaggggcactcccaatgatgcctacgtccccccccctgagaataaattagagggctcataccactggtatatggaaaaaatctttgccttgtccgtcgttccattggctacgacggctatgctgacaaccggtccgttatccactgcagctgattctttcttttctgtcatgcttttgggatattgttacatggaatttaactcttgtatcaccgattatatttctgaaagagtttatggtgtttggcacaagtacgccatgtatatgttgggacttggttctgcggtctccctttttggaatctataaactagaaaccgagaatgatggtgttgttggtttagtaaaaagtctatgggattcttccgagtaa

SEQ ID NO: 81896 - DNA, 138 bp, Saccharomyces pastorianus
atggacactgtcggtacggacgcagcagccgcgagcattaatgagcgtcgctttgcccagtccacttcaccaaaagttagtgtgaagtcacaggactcgctgtttctgatccgtatagtgagtcgtattatgcggccg

SEQ ID NO: 81897 - DNA, 1728 bp, Saccharomyces pastorianus
  modified_base (1637)..(1672): a, c, g, t, unknown, or other
atgtcattgcaattgctgaatccgaaggctgaatcgttgagaagggatgcggctttgaaggttaacgtcacatctgctgagggcttacaatccgtcctagagaccaacttgggccctaagggcacgctaaagatgctggtggatggtgctggtaacatcaagctgaccaaggacggtaaagtgttgctgaccgagatgcagatccagtcgcctacagcggtactgattgctagggcagctgccgcgcaggatgaaatcacgggcgatgggaccacgacggttgtgtgtcttgtgggtgaattgcttagacaagcgcaccgtttcattcaagagggcgtgcatccgcggatcatcactgatgggtttgagattgcgcggaaggagtccatgaaatttttggacgaattcaagatcagtaagacgaacctttccaatgatagagagttccttctgcaagtggcccggtcgtcgctgctaaccaaggtggacgctgacttgacggaggtcttgacgcccattgtaacggatgcggtgctaagcgtgtacgacgcgcaggctgacaatttggatttacacatggttgagatcatgcagatgcagcacttgtctcctaaagataccacttttattaagggtttggtattggaccacggtggtaggcatcctgacatgcccacccgtgtgaagaacgcgtatgttttgattttgaacgtatctttggaatacgagaagactgaagttaactctgggttcttttacagttctgcggaccaaagggacaagttggccgctagtgagaggaagtttgtggatgccaagttgaagaagatcatcgacttgaaaaacgaagtttgcggcatggatccagacaagggttttgttatcattaaccaaaaaggcattgaccccatgtctttagacgtgtttgccaaacacaacatcttggctttgagaagggccaagagacgtaacatggaaagattgcaattggtcactggcggtgaagctcagaactctgtggaagacttgtcgcctcagattcttgggttttctggcttggtctaccaagaaaccataggcgaggaaaaattcacatacgttacagaaaacactgaccccaagtcttgcaccatcttaatcaagggctccacacattatgccctcgctcaaacaaaggatgcggtgagagatggtctcagagctgtggcaaacgttctcaaggacaaaaacatcattccaggcgctggtgcgttctacatcgccctttcgagatacctaagatctgccaacatgaacaagttgggtgccaagggtaaaacaaagacaggtattgaggcgttcgcagaagcattgctggtaattccaaagactttggtgaagaactcaggattcgacccattggacgtgctcgcaatggtggaggacgagttggatgacgctcaggattctgacgaaacgagatatgttggtgtggacttgaacataggtgattcttgcgaccctaccatcgagggtatttgggattcctaccgtgtactaagaaatgctattaccggtgctacaggtattgccagcaacttgttattatgcgatgaattgttaagggcaggtagatccactttgaaagaaacaccacnnnnnnnnnnnnnnnnnnnnnnnnnnnnnnnnnnnngaacaagaacacgaatactagtagtaacagtaatcagatacaaaaattctatgtaa

SEQ ID NO: 81898 - DNA, 1965 bp, Saccharomyces pastorianus
atggctgtggaggaaattgcgtcccgcaaggacattagtttaagagatatgcaaatctctgccatattaaaaatgctgtttttaaataaggatttgaacaacaacgacaacatcaccaccatcacagacgatatttttaaccagcaggagatcatctggaaggtgttgatactggacatcaagagcactgctaccatatcttctgttctcagagtcaatgacctgctgaaagctggtatcaccgttcattccctgattaaacaagacagatctcccttgccagatgtccctgccatatatttcgtctcccccacaaaggaaaacattgacattatagtcaatgacttgaaaagcgacaagtattctgaattttacatcaactttacctcatctctgcccagaaacctcctggaagatttggctcaacaagtctccatcacgggtaaatctgataaaatcaaacaagtttacgaccaatacctggacttcattgtaactgaaccggaactgttctcactagaaatttcaaacgcatacttgacattaaatgacccgaaaaccacagaagaggaaatcacgggcttatgcgccaacatcgcggacggtttattcaacactgtcttaacgaccaattctatccccattataagagctgctaagggtgggcctgctgagatcatcgctgagaaactgggcacaaaattacgtgatttcgtcatcaataccaattcctcctccacttccactttgcagggaaatgattctctggaaagaggagtgttgattattttggatagaaacatagattttgcctccatgttttcacattcgtggatttatcagtgcatggtctttgatattttcaaattatcaagaaacaccgttactattccacttgaaagtaaggaaaacggaactgacaataccaccgcaaaaccattagccacgaagaaatatgatatagagccaaacgattttttttggatggaaaactctcatttgccattcccagaagctgcagagaacgttgaagcggcattgaatacgtacaaggaggaagccgcagaaattactaggaaaactggtgttaccaacatatcagatttggacccaaactcgaataatgatacggttcaaattcaggaagtcgtaaagaaactgccagagttaacagctaagaaaaatactattgatacacatatgaatatttttgctgcattgttgtcacaattggaaagtaaaagtcttgatactttctttgaagttgaacaagaccctggaagcaccaaaacaagatctaggtttttggatatactaaaagatggtaagacaaacaatcttgaggacaaactgagatcgtttattgttctttacttgacatcaacgacaggcttaccaaaggattttgtccaaaatgtggaaaactatttcaaggaaaacgattacgatatcaatgctttaaaatatgtttataagctaagagagttcatgcaattatcaaatatgtcgttacaaaataaatctttggaagatggatccgattccgctttcaaaccaagcaacttaacattatccggtatctatggcttaactgaaggcaaattacaaggaggtgtaggaagtttaatatcaggtattaagaagttactgcctgaaaagaaaaccatcccgataacaaatgttgttgatgcgataatggaccctttaaacagctctcaaaaaaatttggagactactgacagttacctatacatcgacccaaaaattacaaggggttcccataccagaaagccaaaaagacaatcttataataagtcactagtgtttgtagttggtggcggtaactacctagaatatcaaaacctccaagaatgggcacattcccagttgcataatcccaaaaaagtcatgtatggtagcacagccattagacctgcaggcatgcaagcttgcactgccgtcttt

SEQ ID NO: 81899 - DNA, 669 bp, Saccharomyces pastorianus
atggtcgctatcagtgaagtcaaagaaaatcctggcgtaaacagcagtaattctggtgcagttacgagaactgcggcacatacacatattaaaggtttaggtctggatgaaagtggtgtggccaagagggttgaaggagggtttgttggacaaatagaagctcgtgaagcgtgcggtgtaattgtagatttaatcaaggctaaaaaaatgtcaggtagagctatcctattagctggtggcccttctacaggtaagacggcattggctctcgccatttcacaagagttaggcccaaaagttccattctgtcctcttgttggtaccgaattatattccgtggaggtcaaaaaaacagaaaccctaatggaaaattttagaagagcaattgggttaagaatcaaagaaactaaggaagtttatgagggtgaagtgacagaactaacccctgaagacgcagagaatccgttgggcggatatggtaaaactatctcacatgtaattgtcgggctcaagtctgccaagggtaccaagacactaagattagacccaacgatatatgaaagtattcaaagagaaaaggttagtattggtgatgtcatttatatagaggccaacaccggtgcagttaagcgagttggcagttcctttagtgaggttaatgcggccgcg

SEQ ID NO: 81900 - DNA, 1008 bp, Saccharomyces pastorianus
atgtcaagctcaatacctagagtttactctctagggaactcagccatgacgtacttactagcattgagaattgcacaactcccgagtcaaccaaaggttccatcagttgttcttcttttaaacgaccagaagaaactgaatagattcctcaataatgactctaaaattattgttaaatcgagtaataacaataaagaaatttatcatagacagtttatggcatcttgtgtcccgcccattctaagcaatggtgaaattgcaccaattgaaaatttaattgtctcagatccctcttcgaaatttatcactgcccaactttctaaatacaataaatctttgagacccgaaaccaacattctgtttttgaatccaagcttaaatctattggaacatttgcatagatatcgatggcgctttgatgaggcaagaccaaacttgttcatgggctttacaacaccagttgacgttgggaccatacatcaagaatttcaactgtctctcaaagtgaaaggaaggatacaatttcatattgcaaagattgatggttttcctcgaatgagtagtgctggtaaaagtgcgagtctttctttaagaggtgacaggcagaaaaatgaaaaagaaaataatacgttttataagttgtttagggaaatttccaggctacgatctggaataggttccgatctagttagttttgatttgcatgttcatggtttccaggatttgttcttcactgaactggagaaattgatattggagagttgtaccgagccattattggcagtatatgattgcgtatataaaaaggaacttttgaaaatccccggagcacaagatataataaaaaagttgattagtgagcagctgtcaattatcgatcgatcctacccctcactaaacaccaacccaaactattctgtaatctttgacaaggagagaatatttagcttggtgatgagagatctagaagtaatgggcacaagcgcgctaagttggcccaatctttaa

SEQ ID NO: 81901 - DNA, 1416 bp, Saccharomyces pastorianus
atggaaggaaaggtcgatgtcttgctaacatggctgaaaaaatcagataagttttatatagcaccaaacatcagcatctgtgaatcgccagaaactggcagagggatcgtcctcagtcacggttcgataagaaaaaacgatatcattgtatcagtaccgagctccaagcaactaaattttcacactatcctctatcatatttcaaagtttaataaagagctgaatattcctggtatcacaatcgatagaaagccaatcaattatgaggacaatattattgaagcggaaaataaagcctgggccgatcctagatatggattatattccgaattatcgaaagagtttttgttaagtttatcatcatttcaattggtatcattttatatattggttgaaaattttctattgccaaaatggactcacaatgaaatctactcagattggaaaccattctttgatgtatggccctcaatggaggagctgcgatcaatcccagccatttggaactgtgatcccaattcacggtaccattcactgattgaatatctccctgctgcctcacgaaagcatatggcaagaattagtggccttgtcagagaagattgggaaaccatttcagaggtggttttgaaatggaatgaaatttacggctccttaagctgtacgaaaaattctgataaatttactaatgatgagttattctccctttttgtacatgtttattttattataaactcaagatgtctttatgcgaagattccgttgaaaatagaggactcctcaagcaatttcactttagtgccgtatgtcgatttcatgaaccacatttgtgagtcggatttgcactgctatcctcagttaagtcctcagttgaggtcagaaggagaaaacatcattggaattggacaatttaccattagatgcggcgatcacctctatgacaacattaacgaggagctctttttgaattatggtgcacactcaaatgattttttactgaacgagtatggatttgtggtagacggaaacaaatggaactacttagacatatctgacgaaattattgaattaatagacgacgacaaaaaggaggtaaaaacgtttctattggaacatgattattggggagattacactatcaatgagactgatatcagttataggatattcgtagcattaaactattatgtgacgagggatgaaaggagggttcgaaaattcattgaaggttacatatcagaagattacttcaagccaaaaatctcttcagttttaaaagaattattggtctccttaactgcaaaatatacaaagacgcttagcgagttgacagaaaaagtatctaatattgaggataacctctgcttacaacttaattaccagggatcctctagagtctacctgcagcatgcaagc

SEQ ID NO: 81902 - DNA, 678 bp, Saccharomyces pastorianus
atgagtgttgatttgtttccaaatgatagatttggtgcagaagataaatacgacaactttaaggatgccgtaaaagaatgctcctggctcatcgaagaaatcgtcaaaccgcaattacccaacattattgacaacttttctaaatgcctagagatgctagagagtgaccaaatattcaaaatgcctgtatctaatggtattcccaacgaaagtaacaaacaaaacgactctccgacggtaaagggtgttatcacaagacaaggccaatacattgttgactttcacattgttgtcagattcccacaatttcaaaggggtaaacaagtgatgttccgaatgaatacgggactgaatttcttacttattcaattcagtaagataatgacgcacttgaaaaatattttggaaatactgaatcaacttcaagtagctacagatgtcagcgaattcgtatccaaatttggcgtggccatggaacttttgaaccattctctaatacttttacaaaatcctcctagagacctggtattcccagaagataacaactttgctatgaaggaaatgttccaggattgttactcagtctgcgaatccacagctcacatcctaggactggaacttacgctttgtaggaatgagctttgcctagaactacgaaatctaattacaggtgactaa

SEQ ID NO: 81903 - DNA, 546 bp, Saccharomyces pastorianus
atgttaaggttatctttactgagatcaacagctactttgccagtgaaatgccaacgtcgtgggctaatattacctgcggcggcaatgtacaccttaggctcattaatatttggtaaggaagcaaggttggcggatgccatggaacgtggtgagttacataacaagaacgttgattatgcgaaagaagctgaagagcgtaccgagttacgtattagggccctggctaatactcggccaatggaacctcggtacaacggccatgttccccttcatcggtacgagaaattgctgctgtttgcaatttccggttggaattcatttttccatcctgaagatggttataatattgtacaattgggtgaggcaactgcattgccggtcttcttggagaatttgaagcaaacaatgttaagtgattcctctgggaggcgcattttgaaggaacaacccaatatcacaacagagatcttgcatatggaccaactagctaaattgccacataacacgtttgggtatgatatgaccatggtggaaagagaaacgttc

SEQ ID NO: 81904 - DNA, 1905 bp, Saccharomyces pastorianus
atggctggaaaaaagggacaaaagaaaagtggacaaggcaaccatggaaagaactctgatatggatgttgaagatcgtctccaggccgttgtcttgacagactcttatgaaactaggtttatgccactgacagctgtcaagccaaggtgtttgctgccactggctaacgtacctctcattgaatacaccttagaatttttggctaaggctggcgtacatgaagttttcttaatttgctcttctcatgccaaccaaattaatgactatattgagaattctaagtggaacttgccttggtctccatttaaaattaccaccattatgtctccagaagctagatgtacgggtgatgttatgagagatctagataatagaggtatcattactggagattttattttagtcagtggtgatgtattgactaacatcgatttcagcaaaatgctagaatttcacaaaaaaatgcatttgcaagataaagatcacatctcgacaatgtgtttgagcaaagcgagtacctatccaaaaacaagaactattgagcctgccgcatttgtcttagacaaatccaccagtaggtgtatttattaccaagatttaccattaccaagctctagagagaagacttccattcagattgacccagaattgttggataatgtcgatgaatttgtcataagaaatgacctcatcgattgtagaattgacatttgtacatctcatgtacctttgatatttcaagaaaattttgactaccaatcattaaggacagactttgttaaaggtgtcatttcaagcgatatattgggaaagcatatatatgcctatttgacggacgaatatgctgtaagagttgaaagttggcaaacttacgacaccatttctcaagactttttaggtagatggtgttatcccttggtcttagactctaacatacaggacgatcaaacgtattcttatgaatcaagacatatatacaaggaaaaagacgttgttttggcccaatcctgtaaaattggtaagtgcactgcaattggatcaggaacaaaaatcggagagggtacgaaaattgagaattccgtgattggaaggaactgccaaatcggtgaaaatattagaatcaagaacagtttcatttgggatgactgtatcatcggaaataacagtataattgaccattcgttaattgcctctaatgccacgttagggagtaatgtacgcctaaatgatggctgtataattggtttcaacgttaaaattgatgataatatggatttagatagaaacacaaaaatatctgccagtccattaaaaaatgccggctcaagaatgtatgataatgaaagcaatgagcagtttgaccaagaccttgatgatcagacactagccgtttctattgttggagataagggtgttggttatatttacgaaagcgaggtgtctgacgatgaagatagttctacagaagcctgcaaagaaataaacactttgagtaaccaattagatgagttatacttaagtgacgattcaatttcttccgccactaaaaagacaaagaaaagaagaacgatgtctgtcaatagtatatacacggatagagaagaaattgattctgaatttgaggacgaagattttgagaaagaaggtattgccaccgtggagcgtgctatggaaaacaatcatgatcttgacacagcattattagaattgaacaccttgagaatgagtatgaacgtgacatatcatgaggtgagaatagcaacaataactgcattattgagaagagtttaccactttattgcaactcaaacattaggtcccaaggacgctgtggtgaaggttttaatcagtggggactgttgttcaagagacaagcctttgatgaagaagagtatattgatttga

SEQ ID NO: 81905 - DNA, 1122 bp, Saccharomyces pastorianus
atgtcccaattattcaataactcgcgctcagatacccttttcctaggaggtgaaaaaataagtggtgatgatattcgtaatcagaatgttttggctactatggctgtggctaacgtcgtcaagtcatctttaggccccgttggactggacaaaatgcttgttgatgacattggtgattttaccgtcaccaacgatggtgccactattttgtctttgttagatgttcaacatccagctggaaaaattttagtagaattggctcaacaacaggacagagaaattggtgacggtactactagtgttgttattattgcttctgagttgttgaaaagagctaatgagttagtcaaaaataagattcatccaactaccatcataactggtttcagggttgcattaagagaggctattcgttttataaatgaagttctttccacaagtgttgacactttagggaaagagacgttaattaatatagccaagactagtatgtcctctaagatcattggtgctgactctgattttttcagcaatatggttgtagatgctcttttggctgttaagacgcaaaattccaaaggagaaatcaagtatcccgtaaaggctgtcaatgtgttgaaagctcatggtaaatctgccactgaatcactgttggtgccaggttatgctttgaattgtacagttgcttctcaagcaatgcctaaacgtatcgccggtggcaatgtgaaaatcgcatgtttggatttgaacttgcagaaagctcgtatggcaatgggtgttcaaatcaacattgatgatccggaacaattggagcaaatccgtaaacgtgaagctggtattgttttggaaagagtgaagaagatcattgatgctggtgctcaagttgtgttaaccaccaaaggtattgatgatttatgcttaaaggagttcgttgaagctaagataatgggtgtaagacgctgtaagaaggaagatttgagaagaattgcacgcgctacaggcgccactttggttagttctatgtctaacttagaaggtgaggaaactttcgaaagcagttatttaggtctttgtgatgaagtagttcaagccaaattttctgatgatgagtgtatctattaa

SEQ ID NO: 81906 - DNA, 933 bp, Saccharomyces pastorianus
atgttcccaatgaaagatcactcagctcttgaacaacatactctcagcagagatgagttaagacgtcgcaagggttacaagaaagggctgcagttgtcaattttgttacttggagaaaaaggcagcggcaaatcaacgtttttaaacaatctgtgcggtcaggatatatcgctttctgatggggattatgatgatgatgatgataaagtgacaaataatgtaacaccagaaaatggaaacgccatcgaagatatagatcctggatataaaacagcccatttgagtcctgggctgaagcttgtcaccagaagagtgtatttgaacgatgaactaggcgtacccataacattagatatcatattgtttccaggctgcggtgacaatgtcgacaattcacaaagctctgttgttataaaaaactacttagaccaacagtttgcaaatgttttaaaagaagaggtcagaataaagagaaacacaaaagaaactgatgggaggcctcatgtttgtttatactttctgaagattactccaagaggagtcaaaaaatttgatattgagttaatgaaaacgatttgtgataaagttaatttaattcccattattccaaaagccgatggtctcacagaaactgaattaaatttacacaaagacattgtgcgccaagaaatctctcagaacaatatacgtgtttttgattttaaaagtgacaccctaggcgaaacattagctctgtacgatatggacatcgattccagttcagcaaaatccaaatacgataatgacacgaagatcaaggaaatatcgccatttgccattgtttgcagcaaaactttaataaaaattcggaaaatagggttgagcatatcagaacgtacgaatggggtagctaggtggtcgaagaccaaagcacctccgattttatatacttaa

SEQ ID NO: 81907 - DNA, 333 bp, Saccharomyces pastorianus
atgacattattttcttgtagtgtacagatgccgctggaggaaaggtccctgacaaacttaccattaaacctattgttccgaatattgtctcacctggatatgaatgatttacaaaacatagggaaaacttgcaccttgctgaggatgctggcgaatgagaacattgtttacagaaatgctgttatcggctcaaacgggaatatgtggtggacaaaaaatgttcttgttgatgtctttgatgttttgaattttaatagaaaggcaatgaaaaccttaaatagtcacaacatatccctggtcgcatcattaagaaatgttcagcggaaagtataa

SEQ ID NO: 81908 - DNA, 933 bp, Saccharomyces pastorianus
atgttcagcggaaagtataaactaggcgttattgatccggctagaaagacaataagttatagaacaaatgaagttgagagcaaagaaaagggctctgtgaaagatttaaatatggatttgaacgaacctacagaaataacaagggagcaaatcgctcatactgcaatactacaaggaatgaatcaattcatcgaactcaatgataaagcatttaggacccattcagcggattctgatgatacatacatagaggagaataatggagaaatacattctctccacggattggaaaaaaatacaacatttgaagaagacttagtcaaaaagccaccttttatcccttctccgacattttctaattattctagaagttcaacaaattctgtattttcaagttcatcgcccaaactactggacgatgattggaataatattacaatggatttcactaagtcacgagatcctgattataaagagatgacgcctacatctactgaatcgtctgactcaatcacaagattgagaaaatctaataaagtcaaggataaagccgaactttttgagaagttaatttttagagatagcagaccattaaaaacaaagaaaaaggacaatccaagattgaaattatccagttcgttaagtgctaatgacgaagattttaggaaaatcataagtcccccttctgacatactaccgaaagtaggcagaaggagcgtctcaagaggttatttcgaggagattgaaaggcattatcccgattttaacggtgaaacaactaatcctctagcaattaaaagagatcacagtaccaagatagcaaattatgaacaattaattataaaagaacatagctcgaactgtaaaggaataacagagacaaatgatgaaaagaaatttcaaagaagtcacacttcccccgtaatcgaatta

SEQ ID NO: 81909 - DNA, 1977 bp, Saccharomyces pastorianus
atggtgagcatgttctcattatttctgctattaattgagcaatcgccgcttgtagcgtcattgcaacaaagtcaacggcatatagtgggtgttccctgggaaaagcagcacttgtatgactcgaatgaaccagatttgactaaatggcactgtttgaaccacgaagatatcgtattggatataagccagataaatgatggggtttgtgattgtcctgatggttcagatgagcccggcagcgccgcctgcgtggaagatatattcaaaagcgttgcagagggaggtggtaaagtgaataagtatttttattgtgataacaaggggtttattccaagatatatacgaaaatcggaagtcgcagatggtatttgtgactgttgtgactgttctgacgagctactttctggatatgagctctttgatgctggatctaattgttctcagtttaagaatgaatttgacattatggcctctaaagagttatcaagttaccgggaagggaaagaggccctagatgaactggaaagaaaatacggtacaaaggaagaggctatcacccgtggtaattgcttagaagaagataaggaaaaggcttctgccgagataaaagtactctccaacaggctctcagaaaatcgagccaaattagagcagttgagaggcgagtactttaaccaattaagccatgatcccattttgtatcaatttgaacaattaaacagtactcgtttgggatcggacatccttacatcgttcactatggtttcaagagtaagtaaaggttaccaggacatattcaagattttaagtgatttatcagaggcctatactccctcgctaaatgataaagttgtcaatgataatattaaaaaattcagaaaagttagaagacgggctgaaaaggctaaaattaatgcagatagcaaaattgatgatgagcaggcagataatctttacttgtactttacagaagaagtacctcaaatttttttgaaaagagaatctgagaacacgttgaggtacgtcataggaaaatccaattttgttcaagcgctagtggagggtaaaattaactataccaacgatatcttggagtatatcagagaattccgtttgattatggatgatatttctcagaattacaatgtcaactttcaagatgcaggggtcaaaagtactgtcgattcgtataaaaactacctaggtgaatacggcgaactggctgaattagaaccagttcacccgtcagagagccttttgagatcgttgagcgaagtaacatcatttgtgaacgagaatgcaccaaaggtattgccaccggacgctgttgagtcagaacaagatacgaacagcgatcatatcggtacttctggagatttgcgcaataaactcaaagagattctatctaagctgaatattttttcatctagaaaagatttggtctcattagagaagagattccgctcttgtgaaagtcaagtcagtctcctggagaatgaattaaagcaaaaaatggactataagaaattattagatgaaactgaagatgaaggaactaattctactgcaggaaatctgactgagcttttagaactaatgggatcacaatcctattgtcttgacgacatactggacaactatgtgtacactatatgctttcaacgtccaatgaccgaaggtgtcatatatcaagctgaggataaggttgacggtaaaaaagttttgatcggtcgttttaagacatcaggttttaatgttgacttaaacatggaaaaatacgcagaacatttaaaggccacatatgatgagaagagtgatttgatttcaaacttagcagctatacaggacgatgacggtaacatgcaacattacgtattcgggaacttaaacgaactgaataatggtctggtactagaatacgaaatggagaccagtgctggaatggtccgcgcagatcggcttgtatttgttcggtga

SEQ ID NO: 81910 - DNA, 1656 bp, Saccharomyces pastorianus
atgacaataagacacccaataggtccagcactcccaaatttactaaaaaaccagttaaccccgaatgataaaattcctgaaagagaagaaaaatccaatgaagtgaagacacctaaaattccattattcacgtttgccaaaagcaaaaactattcaaggccgtcaaccgcaattcatacctcacctcatcaaccaagtgatgtaaaaccgacttcccataaacagttgcaacagccaaaatcctcaccactgaaaagaaataactataattcttttcctcactcaaatctggaaaaaataagcaacagcaaactactctcccttcttcggtccaaaacgtcagcaggaagaattgaatcaaacaatccttcacatgatgctagcaggtctctagcaagttttgaacaaacagcattttcccggcatgcgcagcaacaaacttctaccttcaattcaaagcctgtacgtaccatagtaccgatatcaacatcacaaaccaataactcatttttatcaggagtaaaaagcttactaagtgaagagaaaataagggattactctaaagagattctaggcataaacttggcaaacgaacagcctgttttagagaagccacttaaaaaaggatcagcagacatcggcgcctctgtgatttctttgaccaaggacaaatctatcaggaaagataccgtagaagaaaaaaaagaagaaaagttgaatataggtaaaaactttgcccattctgattcactatcagttccgaaggttagtgccggtgacagtggtatatcaccggaggagagcaaggcaagaagtcctggaattgcaaaaccgaatgccatacaaacagaagtgtatggaataaatgaggaatctactaacgagcgtttagaaataaatcaagaaaaaccagtaaaattagatgagaatagtgcaaatagtacggtcgcatcggccttagataccaatgggacgtcagccacgacagaaactctaacatcaaagaagatcgttccatctccaaaaaaattcgccattgatcaagataaaataacactgcacgatgagaaaacacttgcaccttcgaagcatcagcctataacatctgaacaaaaaatgaaggaagacgccgacctcaagaggatggaaatcttaaagtcacctcatttgtcgaaaagtccagctgacagacctcaagggcgtagaaacagccgaaatttttccactagagatgaagaaactacaaaacttgcttttcttgttgaatatgaaggccaagaaaacaactataactctacttctcgaagcacagaaaagaaaaatgatatgaacacttctgcaaagaataaaaatggtgaaaacaagaaaattggtaagaggccgcctgaaatcatgagcactgaagctcacgtaaacaaagtaaccgaagaaaccacaaagcagatacagagtgtacgaatagatggtcgaaaagtgcttcaaaaagtacaaggagaatcccacattgattcgagaaacaataccctgaatgttacaccatcaaagaggccccagctaggagaaataccgaatcctatgaaaaaacataagcctaatgaagggcgaactccaaatatctcaatacggtacaataacatccaaaatattagagcctaa

SEQ ID NO: 81911 - DNA, 75 bp, Saccharomyces pastorianus
atgccaaatgacaataagacacccaataggtccagcactcccaaatttactaaaaaaccagttaaccccgaatga

SEQ ID NO: 81912 - DNA, 897 bp, Saccharomyces pastorianus
atgctacgatcaaccacacttactcgttcgttccacagttctagggcctggttgaaaggtcagaacctaactgaaaaaattgttcagtcgtatgcggtcaaccttcccgagggtaaagttgtgcattctggtgactatgtatcgatcaagccggcacactgtatgtcccacgataattcgtggcctatagctttgaaattcatggggcttggcgctaccaagatcaagaatccttcacagattgtgaacactctggaccacgatattcagaacaaatcagagaaaaatttgaccaagtacaagaacatcgaaaattttgctaagaaacaccatatagaccactaccctgccggtagaggtattggtcatcaaattatgattgaggagggctatgctttccccttgaacatgactgtcgcatctgactcgcattcaaacacctacggtggtctggggtcgctgggcactccaatagtgagaacagacgctgcagccatatgggccacgggacagacgtggtggcagatcccaccagtggctcaggttgagttgaaaggtcaattgcctcagggtgtttccggaaaagatatcattgtcgcattatgtgggcttttcaacaatgatcaagttctaaatcacgccattgaattcacgggtgactctttgaatgcattgcctatcgatcacagactcactattgctaacatgaccaccgagtggggggctctttctggtttgttccccgtggacaaaactttgatcgactggtataaaaaccgtttgcaaaagctgggcaccaataatcatccaaggattaatccaaagactatccgcgcactagaagaaaaggcgaagattctgaaagcagacaggatgcacattatgccaagaaactga

SEQ ID NO: 81913 - DNA, 417 bp, Saccharomyces pastorianus
  modified_base (371)..(371): a, c, g, t, unknown, or other
atgggttccaaggatgcattggcttacttagcttcccctgctgtagtcgccgcttctgccgtgctgggtaagattagttctcctgctgaggtattgtccacaagcgaaattccattcagcggcgttaagactgagataattgagaatcccgtggttgaagaggaagttaacgctcaaacagaggctccaaaacaatccgttgagatattagaaggtttcccaagagagttttctggtgaattagttttatgtgatgccgataacatcaataccgatggtatatatcctggtaagtacacttatcaggatgatgtgcctaaagaaaagatggggcgcagttgtatggaaaattatgatgccgagttcagaancaagggtcatccaggtgatatagtggtcagtgggttcatttcggta

SEQ ID NO: 81914 - DNA, 183 bp, Saccharomyces pastorianus
atgacttcactttcttcacagccagcgtacacgttggttttcgatccttctccgagtatggagacttactcgagtaccgattttcagaaagctcttgaaaagggatctgatgaacaaaaaattgacacgatgaaatcacttttagttacaatgctggaaggaaatccatgcctgaattgctga

SEQ ID NO: 81915 - DNA, 663 bp, Saccharomyces pastorianus
atggccatcgaaacaatacttgtaataaacaaatcaggcggactaatctatcagcggaattttaccaacgacgaacagaaattgaacagcaatgaatacttaattcttgctagtacactgcacggtgtattcgccatcgcgagccagctgactccgaaggcattacagctaactcaacaaacgaacaccgaaaataccatcccatatataccttacgtgggcatgtccagcaataggagcgacacaagaaatggaggtggcaataacaacaaacacactaataatgaaaaactgggcagttttaaaggagatgattttttcaaagaaccatttacgaactggaacaagagcggattgagacaactatgcacggatcagttcacgatgttcatatatcagaccctaaccggcctgaagtttgtcgctatcagctccagcgtcatgccccagagacagccaactatagccaccaccgacaagcctgaccgacccaagagtacatccaatttggccatccaaatagccgacaacttcctaaggaaggtttactgtttgtatagtgactacgtcatgaaagacccatcttactcaatggaaatgcctataagatctaacctgttcgacgaaagacctgcaggcagcaagctggcactgccgtcttta

SEQ ID NO: 81916 - DNA, 252 bp, Saccharomyces pastorianus
atgatgatgttccataattgcagaattaataactacttaataacttctcaaattggcgaaggcgcgtacggaatagtataccgtgccttagatattcgtaccgatagacaatacgctatcaaagcggttgttcaaagttacggtgttagcaaggaggctgatatgggcaatgataaaatacacaaaaatagcgtgaaattgcaaaagaagctcgctaaactgttcaaagtaatcgaaaaacgtgtcagggtg

SEQ ID NO: 81917 - DNA, 93 bp, Saccharomyces pastorianus
atgacagagaaacacaaaacgatggggaaatttaaggttattgtattggcaggtactgcaggtacaggaaaatcaaccattgcaggtgactaa

SEQ ID NO: 81918 - DNA, 849 bp, Saccharomyces pastorianus
atgggttatattttgacaggatattctagccgtcatgataagagaaagaaacatgcacttcctttgcatcggtatgcatcgtcttcgataaacttgcagcaccatgtgcatctcttagagacccgggtttcatccaagaggccaatatcggaagatcaaaggactatcaggcttcctgcgaagaaacttaggcatcatcaaaagctaactttgcaagatttacctgtagagattattcaacatattttcgttttcacaaagggtgaaccgtcgatggtcaccttgaacaggttcttctatagttgcttgaagccatctttttcattattatcgaagatcatgtgggaaaaatatcttttcgatcccctggagtttggcgtaagtaatataaaagcttattcaagaaatattgtgatccctacattatttgagcatgaaactttttttagactactactagatcatcatcctatcctgtttaaaaatatttctcattttcttcccagaaagcactatcaagatatgcagaatggcgattttgatacatctaaagagctagacttgtgttcaatgaacactgaagatacatcgaaagaagacttccctaaaaacttttacaacaatatgcatatttttttaacacgtagggaatgtgtgaagtctctaggtaatcattttactttgaagaatccatatgatgtgatatccccttttatagaatggttttttcaaggtattgatatgcaaggaactgacctaagccctaagtttacctttgtttctctatttgaatcaatagactttaatcctatacgtctctggatctacagtgcaaaaactagcgtctag

SEQ ID NO: 81919 - DNA, 213 bp, Saccharomyces pastorianus
atgatattcaatctacctgttagtgtgctgctttatttttctttgatatgggcaatggagcctagtttcgtaagaggtaagaacgtcgtcaacttaattactttcacagattcaaatggcaagctgcacaagaggttagcaccagaggaaataccgccccggctacataattctcaagtaaattcttatccatcaggatatcagggaatgcgt

SEQ ID NO: 81920 - DNA, 204 bp, Saccharomyces pastorianus
  modified_base (183)..(184): a, c, g, t, unknown, or other
atgggaatacctggcttactgcctcaattaaagagaattcaaaaacaggtgtccctgaaaaaatacatgtatcaaacattagccattgatggttatgcgtggctacacagggcttcttgtgcgtgtgcttttgaacttgtgatgaataagccaacgaacaaatacttgcaatttttcatttannaaacgggctgcagctcctaa

SEQ ID NO: 81921 - DNA, 396 bp, Saccharomyces pastorianus
atgattgcaaagaaattgtggtcagccggcaacagatataatgcaatggaatattttcaaaaaagtgttgacatcacaccagaaatggcgaaatgtattattgattattgcaagctacattcaattccctacattgttgcaccatttgaagcagatccgcaaatggtttacttggaaaaaatgggccttatacagggtatcatatcagaagattctgatttgttggtctttggttgtaaaacactcataacaaagttaaatgatcagggaaaagctttagaaatctcaaaagacgatttttcagctttacctgaaaatttccctctaggagaattaagtggcggaacgcatcgccagtggcgatctgcgacaggcacagaccagcacccgtcgtga

SEQ ID NO: 81922 - DNA, 774 bp, Saccharomyces pastorianus
atggcgtctatcaatctgattaagtctttgaaactttacaaggaaaagatatggtcttttgacttttctcaaggtatattagcaacaggttcaactgatcgaaaaattaagctagttagcgtgaaatatgacgattttacgttaattgatgtgctagatgagactgctcataaaaaggcgattcgatctgtggcgtggagacctcacacttcgctgttagcggctggctcttttgattccactgtatctatctgggctaaggaagaatctgctgacagaactttcgagatggacctgctagctattatcgaaggtcacgaaaatgaagtaaaaggtgtagcgtggtcgaatgatggatattacctagcaacctgttccagagataaaagcgtgtggatatgggaaacagatgaaagtggcgaggaatatgagtgtattagtgttttgcaagaacattcacaagacgttaaacatgttatatggcatccatctgaagcattactggcttcaagttcttatgatgacaccgtcaggatatggaaagactatgacgatgactgggaatgtgttgctgtcttaaatggccatgaaggaactgtttggtcttctgattttgacaagactgagggcgtgtttagactgtgcagtggaagcgacgattccactgtacgggtatggaaatacatgggtgacgacgaggatgatcaacaagaatgggtttgtgaagctatctcccgggactgtacacaaaagacagtatacgggatcctctag

SEQ ID NO: 81923 - DNA, 525 bp, Saccharomyces pastorianus
atgttttttttcccgaagcttagaaaacttataggttcaactgtgatcgatcacgataccaagaactcatcaggaaaggaagagatcatgtcaaatagccgattagcacttgttattatcaaccacgcctttgataaggtactatctttgacgtggcactgcgggatattatccgaaataagatcaggactgatgttaatgtttggcattttccagttgatgtgctctttgggtgtcatcgtattgctgttgcctattatcatactggacgcgatcgatctattcctctacatgggcaggttgcttgattacggttgcaagttattccactacaatagatcatcattaccggtggcagatggaaaagaaaagaccagtggtcccataagcggaaaggaggaaatagttattgatgaggagataattaatatgctaaatgaatcctcagaatcattgatcaatcatactacagctggtctggaatatgatattagttcaggtagtgttaaaaaagtaggcgtttga

SEQ ID NO: 81924 - DNA, 315 bp, Saccharomyces pastorianus
atgtttgtttcaccaccaccagcaacttcgaaaaaccaagttttacaacgacgtccattagaatcgactaacagtaatcatgggtttgcaagctccctacaggccattccggaaaacacgatgagtggcagtgataatgcttcttttcaaagtttgccactatcaatgagtagctctcaatccacgacttcttcgagaagagagaactttgtgaatgctcctccggagtacactgatagagctagagatgagattaaaaaaagattattggcctcctcacctagcagaaggtcacatcatttgaagagtgggtga

SEQ ID NO: 81925 - DNA, 1125 bp, Saccharomyces pastorianus
atgcctttctcttctgagcaattcacaaccaaattaaatacgttggaagattcccaagaatctatttccagtgcctcaaagtggttgcttctacagtatagagatgctcccaaagtggcagaaacgtggaaagaatacatgttaaggcctagtgtaaacacaagaaggaagttattgggtctttacttaatgaatcatgttgttcaacaggctaaaggtcaaaaaattattcaatttcaagattcctttggaaaggtggcagcagaagtattgggaagaattaatcaagagtttccgagggacctaaaaaagaagttgtcaagagttgtgaatatactaaaagaaagaaatatattttccaagcaggtagtcaatgacatagaaagaaggcttaaaaccgagagctcaccagtggaagcgttggtgttaccccagaaattgaaagattttgctaaggactatgaaaaattagtgaaaatgcaccataatgtttgcgcgatgaaaatgagatttgacaaatcatcagatgaattggatccatccagctcagtttacgaggaaaattttaaaacaataagtaagattgggaacatggctaaagatataataaatgaatcaattctaaaaagagaaagcggtatccataaactgcaaagcacactggacgatgaaaaaaggcatctagatgaggaacagaatatgttaagtgaaatagaattcgttttatctgctaaagacccatccagattaaataaaaacgttgatgaagacaatattattcctacgtatgaagtgggggatggagatgacgatgacgatgatggtgataatgatgatgatgatgatgatgatgatgacaaaaattacgatgatagatccaatgacagcaattatggcgttactaatattagcaccacagataagaagaatgaagttgtagaaaagacagatagcgaacataaaaactctactcataatcctagtgacaatcaatttggtatgaaacgaacacatgatatgataggtcatgatgacgctatgacataccggaaaaaaaggttcatcttgattcgaagacgagtgaagatggtactttcaacagtgaggatggacattatgagttag

SEQ ID NO: 81926 - DNA, 1947 bp, Saccharomyces pastorianus
atgcaacgctcatggtctgcaagtgatagattttctcaaataaagataccaacatatactacggaggaaatgaaaaagatgatttctaaaagggaagctctctttaaatccagactacgggaatttatcctggaaaaggaaaaggctaaccttgacccattttctgagttaacaaatctagcgcagaaatatattccaagggagagagattatgaggatcctattgaggcaatgatgaaggcgaagcaagaaagtaatgagatgagcattcccaattatgccaataattcagtaataacaacaattcctcaaatgattgagaaattgaaaagtactgaattctacgcttctcagataaagcattgttttacaataccgtcaagaacagcgaagtataaaggtctctgttttgagcttgcaccggaagtatatcagggtatggaacacgaaaatttctacagccatcaagcagatgcgataaacagtcttcatcaaggcgaaaacgtcattattacaacatcgacctcttcaggtaaatcccttatttaccaactagcagctatcgatcttcttttaaaggatcctgaatcaacgtttatgtatatatttccaacaaaggccctggcacaagatcaaaaaagagcattcaaggtaatactttcaaagatccccgagctaaagaatgccgtggttgatacgtatgacggcgatacggagccagaggaaagagcttatattcgtaaaaatgctagagttatttttaccaatcctgacatgatacataccagcattttgcctaatcatgcaaattggagacattttttgtaccatctaaagttagtggtggtcgatgaattgcatatatataagggtttatttggatcgcacgtggcattagtgatgagacgtttactaagactgtgccactgtttttacgaaaacagtggtttacaatttatttcatgttctgcaactttaaagtctccagtacaacatatgaaggacatgtttggaattaatgaggttacgctaatacacgaggatggctcacctacaggtgctaagcatctagtggtgtggaatcctccaattttacctcaacacgaacgtaaacgagaaaatttcattagagagagtgcaaagatattggtacaattgatattgaacaacgtaagaaccatagcattttgctacgttcgtcgtgtttgtgaattgttgatgaaagaagttcgcaatatttttattgaaactgggcgtgaggatctggttacagaagtcatgtcttacaggggtggttattctgcttccgacagacgtaaaatagaacgtgagatgtttcacggaaatttaaaggctgtcatatctaccaatgctctagaacttggtattgatatcggtggactagacgcagtcttgatgtgcggtttcccactatcaatggcgaattttcatcaacaaagtggtagagctggaagaagaaataatgattctttaaccctcgtggttgcaagtgactcgcctgttgatcaacattatgttgctcatccagaatccttgctggaggttaataatttcgaatcttatcaagatttggttcttgatttcaataacattttgatactggaaggacacatacaatgcgctgctttcgaactgccaataaattttgaacgtgacaagcaatactttactgaatctcatcttcgcaaaatctgtgttgaacgcttacatcacaatcaagatgggtaccacgccagtaatagatttttaccatggccgtccaagtgtgtatctttgagaggcggagaagaagatcaatttgccgtagtggatataacaaatggaagaaatataataattgaggaaatagaagcatccaggactagttttactttatatgatggcggtatttcattcaccaaggctatcctacttgtgaggagttaa

SEQ ID NO: 81927 - DNA, 375 bp, Saccharomyces pastorianus
  modified_base (331)..(331): a, c, g, t, unknown, or other
atggaggaaggacctataaaaaagaaactgaagtcagcaggtcaagggagtggaaagaccgatgcctttagaaattttgaacaattttttttccgccttaatactctttacacctttttgatttgcagaaagcatgttgtgcctacatttaaaacactttgtggacctatagaaactgctttgaaaagaactgtgacgaaagaagacctagccatggttatggcgctaatgccaagagaatgtgttttcaagtatattgatgagaaccaaatttatactgaaactaagattttgacttcaataatggcggctttcagcagaaggaaatgcntattgaatgaaggacgtgatgaccaattcgacccaaatcactcg

SEQ ID NO: 81928 - DNA, 1455 bp, Saccharomyces pastorianus
atgagtggagtatcaaataaaacagtatcaattaatggttggtatggcatgccaattcatttactaagggaagaaggcgactttgcccagtttatgattctaaccatcaacgaattaaaaatagccatacatggttacctcagaaataccccatggtacaacatgttgaaggattatttgtttgtgatcttttgttacaagctaataagtaattttttttatctgttgaaagtttatgggccggtgaggttagcagtgagaacatacgagcatagttccagaagattgtttcgttggttattggactcaccatttttgaggggtaccgtagaaaaggaagtcacaaaggtcaaacaatcgatcgaagacgaactaattagatcggactctcagttaatgaatttcccacagttgccatccaatgggataccccaggatgatgttattgaagagttaaataaattgaacgacttgataccacatacccaatggaaggaaggaaaggtctctggtgccgtttaccacggtggtgatgatttgatccacttacaaacaatcgcatacgaaaaatattgcgttgccaatcaattacatcccgatgtctttcctgccgtacgtaaaatggaatccgaagtggtttctatggttttaagaatgtttaatgccccttctgatacaggttgtggtaccacaacttcaggtggtacagaatccttgcttttagcatgtctgagcgctaaaatgtatgcccttcatcatcgtggaatcaccgaaccagaaataattgctcccgtaactgcacatgctgggtttgacaaagctgcttattactttggcatgaagctacgccacgtggagctagatccaacgacatatcaagtggacctgggaaaagtgaaaaaattcatcaataagaacacagttttactggtcggttccgctccaaactttcctcatggtattgccgatgatattgaaggattgggtaaaatagcacaaaaatataaacttcctttacacgtcgacagttgtctaggttcctttattgtttcatttatggaaaaggctggttacaaacatctgccattacttgactttagagtcccgggagtcacctcaatatcatgtgacactcataaatatggatttgcaccaaaaggctcgtcagttataatgtatagaaacagcgacttacgaatgcatcagtattacgtaaatcctgcttggactggcgggttatatggctctcctacattagcagggtccaggcctggtgctattgtcgtaggttgttgggccactatggtcaacatgggtgaaaatgggtacattgagtcgtgccaagaaatagtcggtgcagcaatgaagtttaaaaaatacatccaggaaaacattccagacctgaatataatgggcaaccctagatattcagtcatttcattttcttcaaagacc

SEQ ID NO: 81929 - DNA, 1032 bp, Saccharomyces pastorianus
atgaacgtaacatcgaatgcaactgcagccggttcctttccactagcatttggtctcaagacctcatttgggtttatgcactatgccaaggcccctgccattaatttacgccccaaggaatccttgctgccggaaatgagtgatggtgtgctggccttggttgcgccggttgttgcctactgggcgttgtctggtatattccatgtaatagacactttccatctggctgagaagtacagaattcatccgagcgaagaggttgccaagaggaacaaggcgtcgagaatgcatgttttccttgaagtgattctacaacatatcatacagaccattgttggccttatctttatgcacttcgagccgatctacatgactgggtttgaagaaaatgccatgtggaagcttcgtgcagaccttcctcggattattccagatgccactatttattacggctatatgtacggaatgtccgctttgaagatctttgcaggctttttattcgttgatacatggcaatactttttgcatagattgatgcatatgaataagaccttatacaaatggttccactctgttcatcatgaactatacgtgccatatgcttacggtgctcttttcaacaatcctgttgagggcttcttgttagatactttgggaaccggtattgccatgacgttaactcatttgactcacagagagcaaatcattctttttacctttgccaccatgaagactgtcgatgaccactgtgggtatgctttgccacttgacccattccaatggcttttccctaataacgctgtctatcacgatatccaccaccagcaatttggtatcaagacgaactttgctcaaccatttttcactttctgggacaatttgttccaaactaactttaaagggtttgaagaatatcaaaagaagcaaagacgtgtcaccatcgacaagtacaaagagtttttgcaaaagagagaattggaaaagaaggagaaactcacaaacttcaaagctatgaatgctgctgacacatga

SEQ ID NO: 81930 - DNA, 183 bp, Saccharomyces pastorianus
atgatcctctacgacctctgcgacaatgtgaccactcaatggagagagtggatgtttccccataacgtaacactgccggcattgggtcaggacggcattaacgaagacaatctgaatgaaaccatcgacaacatgttaatttttgacttccttgatgacggttcagaaaacaaccaggtctaa

SEQ ID NO: 81931 - DNA, 1164 bp, Saccharomyces pastorianus
atgagttatagtgtcaacacgtttacagattacgttttattgtttggatcatctagtttagtaggaaaaggtactttagagaacctgttggacataaatttatatattaaaaatgtttcggacctacaaggcaagctggatagcttaagtgaaataaagggaaatgtcgttctcaataaacatgtcttttgtgttaatagaaggtgcatcaatgaggagaaatcatttatgaagaccattgattatataaatatgagatcagttacttggcaaggtggcagatattacttgagaagcaggaaagaaaaagacactgaaaaagtaccgtctagtcctaatactttttgttatgataattttgaagaaggatttattaaaaatacgcctgaagagaggggaaaagatggttattcttttgtttataatcagaaacagttcagttacacactacattatgcatgcggaaaggaaaaaggtattgagatcatttataattttactgtaacgcaattgatcatccccagatctgaaacttggccaaaattgcttccacggatattctcaggaacacaaaagctggaaaagtttgacattgacaacaaaaattacgtgcccggtagaagtttgcctagtctgtgtgatattagcactatggtgtgctctttgggctccacctcagctagagtgcggagaactcaggtaccaagttcctttgctgactattacttaccttttaatttagcacaagaattcacgaatacaattaacaaaaagttggtggttacaactgcctttaataatgattttcttagtaaaactttcgagtattttagaataaaagctaaattagaaaatgacttggatgaagctttgccaaataagctaaaggagctagttatcttgaggccaggtccgatgtgtggacagcacggaaatcctataaacgttgaattgggtaaagaaaactctactttcttggaaaaaattttttattatcctcactatcttttagtttataaaaagaaatatatcagtgaggccagaaggattggcttaagaacaaagttaagcgaaataattgcttccagtatatataggatgccaggatctgcattattaggatacgctgtcccagtttcaaaggtttcttatgttgcctcttga

SEQ ID NO: 81932 - DNA, 156 bp, Saccharomyces pastorianus
atgttatgctttcttctcctaaactcacttcttttcctccctatctgcttttgtttattacagttgaaggctacttgtgccgttcgtgtgaaaaaatactcgatgaaaaaaaaaaaaaagatgatgacgatgactttgttgaagaaatgtgtttga

SEQ ID NO: 81933 - DNA, 1014 bp, Saccharomyces pastorianus
atgaccagtcaggaaaggatgatagtgcatagatgcagatttgtggatttcactcctgccacaatcacatctctagcattttcacataaatcaaatataaataagctaactccgtccgatttgagattagctattggtagatctaatggtaacatagaaatctggaatcctagaaacaattggtttcaggaaatggttatcgaaggtggcaaagacagatcaattgaaggcctttgctggagcaacgttaacggcgagtctctaaggctattttctattggcggctcgactgtggtaacagaatgggatttagcaacaggtttaccattaagaaactatgattgcaattcaggtgtgatatggtctatttccatcaacgattcacaagacaagctgtctgtgggttgcgataatgggacggtggtcctcatagatatctctggcgggcctggtgtcttggaacacgatactattttgatgagacaagaagccagagtattgactttggcttggaaaaaggatgacttcgtgattggtggttgttctgatggtagaataaggatttggtctgcacaaaaaaatgacgaaaacatgggtcgtctattacacactatgaaggtcgacaaggccaaaaaagaatcaactctagtttggtcagttatatatttaccaagaactgatcagattgcctctggtgattctacaggctccattaaattctgggatttccagtttgccacgctaaaccagtcatttaaggcgcacgatgcagacgtactgtgtctaactaccgatactgataataattatgtttttagtgctggtgtggacagaaaaatctttcaattttctcaaaacactaacaaatctcaaaagaacaacagatgggtaaattcttctaataggttgcttcatggaaacgacattagagcaatatgtgcataccaatctaaaggtgcagattttctagtttcaggaggtgttgaaaaaacactagtcatcaactcacttaca

SEQ ID NO: 81934 - DNA, 195 bp, Saccharomyces pastorianus
atgagggatgaagctactcgcaaaaaaaggtcatttagtgatggtcattttttcaagaaactgaaattgatgtcaaggaaaaagcaacctgttatggaaagaagtaagaccactcgtacaaggaaagaatctaccaataccgcagcaaaatcatccctatcattccgaagggccaacaagggcagaaagaccatc

SEQ ID NO: 81935 - DNA, 423 bp, Saccharomyces pastorianus
caggtgactctagaggatcccgacgtagaaataggggttgctgttattgatagattcacctattactgtttggatttcctagaacaaatcgataaaaattccacgttaactttgcaggacctcttcgattcattcaccttcgaaaagattcactctcatgtgggtgtcaggactgatctgtttgataggaatccgtcagaagtattgattactgatttttttgcgaatgtgcaaaacgtaattcctgatgattcaaaacctctttccgtaagtcattatcatcattacaaagatcatatcgatactgctcagtatgagcttaacaataatgtgctggatttggccttggagacttaccgcaaaaacaatcaatcctccaagattgaaaaaaaaatcaaagacatcaagtctactagtgtatag

SEQ ID NO: 81936 - DNA, 531 bp, Saccharomyces pastorianus
atgcgtatagcgatgcatctgccgctgttgcttttatacatattcttactacccctttcaggtgcaaataacacagatgctgcacacgaagttatagcaacgaacacaaataattgggccgtattagtatccacgtcgcggttctggttcaattacaggcacatggctaatgtccttagtatgtataggactgtaaagaggttaggtataccggattcacaaataatattgatgctgagtgatgatgtggcctgcaattcaaggaatctatttcctggaagtgtttttaacaataaggatcacgctattgacctttacggagactctgtagaggttgactacagaggttacgaagttaccgtggaaaactttataaggctgttaacggatagatggacagaagaccatcctaaatctaaacggttgttgacggatgaaaattcaaatatattcatctatatgacaggacatggtggcgatgattttttaaagttgacctgcaggcatgcaagcttgcactgccgtcgttta

SEQ ID NO: 81937 - DNA, 1749 bp, Saccharomyces pastorianus
atggattccacaggcgcttctcagattgttagcgcactagatgttatttactcccccaagtctaacaattctcaacgacaagaagctcagaaatttttagatgaagtgaaattatgttcagaatcgcccttttggggctacgaaattgcattgcaaaaccccactaattctatattgaaatactttggactaggattactagaccatgcagtgaagaaaaactggaatgattatgacgaggggaaaagagtggccctgagaaaatgggtcatggaacttaattttggggtgcaagattatgataccagatatattaaggaaaaattagccactttatgggtagaggtggcaaaaagaacatggggtgaggctcttaagcagacaaaccctacggaagaacagttactcacatcttgggtggacatggacaataaccttttcgaactttggaacataaatcaatcgtcaagagaactagcattaataattttcagaatcctttttgaagatgttttcttgttggacgacctaattgttttgaagaggatgacggttatccaacccttatgtgtaatgattgtttgccctattgaagttttcgcaataaaatacaaattcagtgataaatggaccaaatttaaagctaatgaagagggctggttttctgtttggattccagagttgaataatgcattactacagaataattctgaatacatcataaggcttttagaaactctgaagacgtgtttaaactggccattaacagaggtcattgtaagaaatgacgtgttatcctccttattgacttgtttatccagcaatatcccaagggcgcagtcaatggcattagactcgatacatatcctgttgacccgtccctatagtaatgaaagccattaccaaatgaccatagatcgagtttttgataatatggacttattagatagcgtttatgaaagcttgttgtttgatcctacagatgatatagatgaaacgaaatatcctataattaaaaagttcgtggatatgatcagttgtctctatgtttgtgtcccaaagattaaggagacaaatggccagattcaaaaatattttaagcttgtattaaagacaacttataacccaagcttaatcgttagcggattaacattagacctatggtgtacctgtcttcgaaacgatgaatacttacccaagctggagaaatatgtcattcctgatctactacagtttgccgcggatgctttagtctattatgaacagattgatggtcatatttccaaaaaatttgcggagattgattttcaatccaagtccgaatttcaaacattttgttccacttataggaaaagaataagagacatcattaggttgatttcttgcgtcgaattagaccttacttatgattggttgaacaacagattaaacaattatttcagctctccatttggtcagcaggtcttaagttccacatttttggaccataaattagagccttatttaggtgccctctcccaatacatgattgttgaatgtttcatcaatggttgtataagatggaagatctggtatccaacaggagatgattatgacgaaaaactagattccatattacaaaaactggaaattttgtcaaaccagttaattgcattaaatttaagagaaccattgttattgaagaaacaaatccaaaatttcgcactttttttgacaatgttaaaagataatgtgcttcacatcttttag

SEQ ID NO: 81938 - DNA, 798 bp, Saccharomyces pastorianus
atgaattcaactccagatttaatatctccacaaaagtcaagtgagaattcgaatgctgacctgccttcgaatagctctcaggtaatgaacatgcctgaagaaaaaggtgttcaagatgatttccaagctgaggccgaccaagtacttaccaacccaaatacaggtaaaggtgcatatgtcactgtgtctatctgttgtgttatggttgctttcggtggttttgttttcggttgggatactggtaccatttctggttttgttgctcaaactgattttatcagaagatttggtatgaagcaccacgatggtacttattatttgtctaaggttagaactggtttgattgtctccattttcaacattggttgtgccattggtggtattattctttccaaattgggtgatatgtacggtcgtaagatgggtttgattgtcgttgttgtcatctacatcatcggtattattattcaaattgcatccatcaacaaatggtaccaatacttcatcggtagaattatttccggtttgggtgttggtggtattgccgttttatctcctatgttgatttctgaagtcgctcctaaggaaatgagaggtactttagtctcctgttaccaactgatgattaccttgggtattttcttgggttactgtaccaacttcggtactaagaactactccaactctgcaatggagagttccattaggtttgtgttttgcctgggctttgtttatgatcggtggtatgactttcgttccagaatccccacgttatttggtagaagctggtcaaattga

SEQ ID NO: 81939 - DNA, 603 bp, Saccharomyces pastorianus
  modified_base (514)..(514): a, c, g, t, unknown, or other
atgatcggtggtatgactttcgttccagaatccccacgttatttggtagaagctggtcaaattgacgaagcaagagcatctctttccaaagttaacaaggttgccccagaccatccattcattcaacaagagttggaagttattgaagctagtgttgaagaagctagagctgctggttcagcatcatggggtgaattgttcactggtaagccggccatgtttaagcgtactatgatgggtatcatgatccaatctctacaacaattgtctggtgataactatttcttctactatggtactaccgtttttaaggctgttggtatgagtgattctttcgaaacttctattgttttcggtgtcgtcaactttttctctacttgttgttctttgtacactgtcgatcgttttggacgtcgtaactgtttgttatatggtgccattggtatggtctgctgttatgtagtttacgcttctgttggtgtcaccagactatggccaaatggtcaagaccaancatcttccaagggtgctggtaactgtatgattgtctttgcctgtttctatattttctgtttggctaccacttgggctccaattgcttat

SEQ ID NO: 81940 - DNA, 594 bp, Saccharomyces pastorianus
  modified_base (535)..(535): a, c, g, t, unknown, or other
atggttcacaacaaagttactatcattggttcaggtccagctgcacacaccgccgccatctatttggccagggcagaaatcaagccaatcctatatgaaggtatgatggcgaacggtattgctgccggtggccagctaaccaccactacagaaattgaaaacttcccaggtttcccagatggtctaacaggtagcgaactgatggacagaatgagagaacaatccacgaagtttggcactgaaattatcacggaaacagtttccaaagttgatctgtcttccaaaccattcaagctatggaccgaatttaacgaagacgcagaacctgtgacgactgacgctataatcttggccacaggcgcttctgctaagagaatgcatttgccgggcgaggaaacctactggcaaaaaggtatttctgcctgtgccgtgtgtgatggtgccgtccccattttcagaaacaagccattggccgtcattggtggtggtgactctgcatgtgaagaagctcagttcttgaccaagtacggctcanaagtgtttatgcttgtcagaaaagaccatttgcgtgcttctaccattatgcaaaagcgt

SEQ ID NO: 81941 - DNA, 435 bp, Saccharomyces pastorianus
atgggagtcgcagctgtatgtaggagcttcggcagtgacgcctcgtcaaaccttataccccttcgtatatcgtttttctttaaaaatgcatctatttccttccgaagtttgttttcatctgttaactctagcagctggttcaagcgggatacgcagtatagttcggtcagttttctatctctttcatcaattaagtcatctgccttaggaaatttacttctatcactgctctggtcctcactgagtgatgccgaattaggcactgctgaacttggacgtgaggacatctttgaggcggaaattgtacttttgattatgatgtctctaaataatctttatattctatctgttcggcggctaacgcctacgggtaatagctggcctttgaaaatttcgcggctgcagcaagtacgcaaaaatccttatcccttctaa

SEQ ID NO: 81942 - DNA, 105 bp, Saccharomyces pastorianus
atggcagtaataccggcaaagaaaagaggaagacctagaaaatctgtggtagcagaagttccctatgatagcttggcagcccagtatctgaaactcaggcagtaa

SEQ ID NO: 81943 - DNA, 741 bp, Saccharomyces pastorianus
atggctggagagaacccaaagaaggaaggtgtagatgctaggtttgccgggatctacagcgatcctaaatttaagaacacgaaaaccaaagatcataagatcaagttagattctaggttcagtaagaaggatctggaggtccagcataaatctaaggttgacaagtatggtagaaagatcaaaaatgcgcagaataacagggaattggaagatttcgacaaatatttcgagaaggaagcagaaaatgatgaagattcagaagttaatgcgaaaacagtagtggaccgtgcccgtggtgaagttcctgatgattatgttagctcttctgatgaattcacttcttctgattctgaatcgtccggagaaagtgaagttgaaagcgaagaagaaaatgaagtagaaattgaaaatgccaaaccagaatctggtgacatctctaagaatttggccgtcgtaaatttagattgggaccatgttaaatctgaggatttgatgattaccttttccagtttcgttcctaaaggtggtaaaattgaaagagttgctatttatccaagtgaatttggtaaagaaagaatgcaacgcgaggaagttgaaggacctccaaaggaacttttccaaaagaaaaataagaacaaaacctccaaaaagaagaaaactgatgactctgattctgatatggacatcggtataaggatctttatgaagagggagatgctgacaaggacgtggattccagag

SEQ ID NO: 81944 - DNA, 288 bp, Saccharomyces pastorianus
atgccaaataagcaacgtcgcagcaacccattcaataatgcacaagacgccatattaacgagaaaatatggcattgcacagtataagcaaaacaagcagagattattagtgatgtccggaaaagcttctacagagggtagcgttactacggagtttctctctgatatcattggtaagacagtgaacgtcaaacttgcctcgggtttactctacagcggaagattggaatccattgatggttttatgatatgttgcactatcgagtgccactgtacactacgagagtaa

SEQ ID NO: 81945 - DNA, 351 bp, Saccharomyces pastorianus
atggaactctcatcaaacttaaaagacctatatattgaatggttacaagaattagttgacggattaacccctaaacaagaacaactcaaaatagcctatgaaaaagcaaaaaggaatttacaaaatgctgaaggttcattttattatcctacagatctaaagaaagttaagggaattggcaatacaataataaagagattagatacgaaattacggaactattgcaaaattcaccacatatctcccgttgaggctccttccttaactcagacaagtagcaccagaccaccaaagaggactactacagctttgcgtagcatagtaaactcatgcgaaaatgataagatgaag

SEQ ID NO: 81946 - DNA, 900 bp, Saccharomyces pastorianus
atgactactatggtcatgtcaatgaataaagttccattaatcgagtccttagctcccgtggtcaagtttgttgtacttcatgcacaaatttcttttattacggaagctgtcgacttactggatgctttaactatttcttcgcatctgctttataaccaaattgcaccaccaatatgggagttgttacatgatatattggattctttccaaacttatgccatggactattttgaggcctacagtattttttttgaaaccatcgtgatgaccggcttcccacaagatcaaacttatgttcaacctctgctagaaattctctctgctaaactggaaagtgaagttgactacgacatcgagcatgttatgcaaattctaatgtacttcgcactgtccatgagagacattccattattcagcaaagccatcaaagtatccactaatgatgagctaggattggactctaaatgcatcgttaaactgggactggccaatttgtttgctaaaccaatcgaaactttacaaataatggaaaatgaaggttttactataaatttctttaccaattggtttaatgaaaagttctacagtgtcttcgccatcaaattacaagtcctggtcattttaacccttttgaagatgcctgaagttcctaatagtgtcagcccactactaaataacctgaccaataaactggtggaattgacattatcattgccaaaggcaattagaaaccgtgatgctgttaccgagggcaaatccttagaaggagacctgaccccagaagaagaagaagaatactttatcgaatgtgatgatgatctgaaggagacagtgttagaccaaattaatgtttccaggcagtacataccttttcaagatttgcaaacgaagatccggtaa

SEQ ID NO: 81947 - DNA, 1851 bp, Saccharomyces pastorianus
atggtacaagaacaggcaattttgagctgcattgagcagactatggttgctgatgcaaaaattatcaaagaggcagaacagcagttatttgagttccagaagcaacctgggtttacttcttttctgcttaatatagtgtctgatgataattttgcgctaaatgttcgtctttcttctgctatttatttgaagaataagattcacagatcatgggatactaagagagaagatggtataaaagctgacgaaaagctttcgatcaaggaaaggttaatcgagactttagttaaaaactgtgaaaataaccacattaggcctatcctgactgaaaccataaatgggatacttgttggtcaggaagattgggatttagcacctgttatcaagaatttattatcgagcggtgacgcatcgtacatttatcccgggttactactactgttccaactttgtaaagctcataggtgggacatggttgggtcgagagattatattgattctgttatcgaagaacttttccctattgtggaagggatagcttctaatatcggtagtcaaacggattacagatctaatgaaatattgtacctcattttgaagtcattcaagtatgcatgtttgaacaacttgcctcaatacttcagccaacctgaaagaattatgtcatgggtgcaactacatttgtatttatgttccaaaccattaccagtcgaagtaatggaactggatcccgcagataggtccctagacaaaagggttaaagtgaacaaatgggggttcggtaacttaaacagattcctgcaaagatacaacaaaattacaaaggccatcaccaaggaatttatcgactatatcttcaatactattgttcctataattcttcgagaattttttaaggatattgaagcttggggtaataattcactatggttatccgattcctctttgtatttcttaatttcattcctagagaaatgtgttacaatagatcaactttatcctttaattgagccacatttacaaattatttttgagaacgtcatcttcccatgtttgtgtgctaatgaacaatccatcgaattattagaagatgaccaagaggaatataccaggcgttattttgacattaacagagaaggctctacgccagatgctgcttcagcagatttcatattcttgattgggtccaaacgtcctgagaaactgaacaatattttaccgttcattaatgatatttttactagattcgatgccaattccagtgatattaacatggcatttaaagaagagggtgctttgagaacattgtctaacttgttttcgtttatagatgagccatccgttctggagaatatttttggacacttcatcgtgccattgttatcgcaggataagtacatgtttttggttgcaagaagtttggaaacgatagcgctgtattcggaagaatttaaagatatgaacatattgtcacaattatttgagttaacatataccaacttcttaaacagtaacgttttaccagtccaaattgaggccgcagatgccattaaatgtttaattgtatccaatcctcaaatccacccagcggtctctgctcatgttccaggtatgatggaaaagctattgaaattgtctaaaatctttgaaatcgatatcttatctgaagtcatggaagcattggtggagagattttcagatgaactatccccatttgctaaagatttagcttcaaacctagtcgaacaatttttacgtattgctcaagcattggtagaaaatccatcggaaacctacagcgcaagtgaccaagagcaggaaatccaggccagtggattgttacaaacatga

SEQ ID NO: 81948 - DNA, 402 bp, Saccharomyces pastorianus
atgatcttagcgaccgtacaaaagatgatatctgaaatactggaccaggatttgatgtttaccaaggatgcaagagaaatcatcatcaactccggcatagaattcataatgatcctgtcctcgatggcttccgaaatggcggacaacgaggctaagaaaaccatagcgcccgagcacgtgatcaaagcgctagaagagttggagtataatgagtttataccattcttagaggaaatattattgaattttaagggttcccagaaggtgaaagaaactagggattccaagttcaagaagtcaggtctctcggaagaagagctgctacgacaacaagaggagttgtctagccgtcaagtcccgattccccacatatgtatcgatccggtaatccgagatcttctg

SEQ ID NO: 81949 - DNA, 591 bp, Saccharomyces pastorianus
atgtcatcagatatcagagacgtagaggaacgaaattcgcggagctcgagctcaagctcgagctcgaactctgccgcccaatccattggacagcatccatactgcggtttcgacagcgaagccgcggaaagggtgcatgagttggctagaacactcacatcgcagagtttactatacactactaactcaaacaatagctcttccagcaaccataatgcgcacaatgcggactcgagatccgtattttctacggacatggaaggtgtgaacccggtgttcactaacccggacaccccgggatacaatcccaaattggaccctaacagtgatcaattctccagtacggcgtgggtacagaacatggcaaatatttgtacttcggacccggatttctataaaccatactcactcggttgtgtatggaagaatctaagcgcctccggagactccgccgatgtgtcataccagtcaactttcgctaacatcgtaccaaagctgcttacgaaagggctcagattactgaagcccagtaaagaagaggacacttttcagatcctgaaacccatggatggttgtcttaatccccggtga

SEQ ID NO: 81950 - DNA, 384 bp, Saccharomyces pastorianus
atgaaaacgccgcaaaatcgtatcaagggtgttgatagagaagcgtacgccaatcacgtgacagaagttgtaatggccacatatggtctttcgcatacaagggacaccaaggtcggaaacgatctagtcagaggtgtttctggtggtgaaagaaagcgtgtatccattgcggaagtcgcaatctgcggcgccagatttcaatgttgggataatgccaccagaggtttggactctgctactgctttagaattcatccgtgctttaaaaacccaggctgacattggaaagaccgcggctactgtggccatctatcaatgttctcaggatgcttatgatctttttgataaggtctgtgtcctggatgatggttccagctttatttgg

SEQ ID NO: 81951 - DNA, 252 bp, Saccharomyces pastorianus
actctagaggatccccatatttccaatacattgggctacgtattgtctcccagacagaccactgcagattttgtaagcttcaagttacaagtcctagctgacatagaagttattagcaaagaatttatcgataaaggtactagcagtgcctcagagcgccaaaggatatggccagaatatcggctacaatcagaaaactacaaaaatttaattaaggatatagactctacattagagaaaaacacagattaa

SEQ ID NO: 81952 - DNA, 759 bp, Saccharomyces pastorianus
atgcaagtcaaatacttgttgattagaaatttctggagaatgaagcaaagtgctagtgttactttgtggcaagtcatcggtaactctgtcatggctttcatcttgggttctatgttttataaagtgatgaagaaaaacgatacttccactttctatttccgtggtgctgcaatgttttttgctattttatttaatgcattttcgtgtcttttggaaatctttagtttgtatgaaacaagacctataactgaaaaacacagaacttattccttgtatcatccaagcgctgacgcatttgcgtctgttttgtcagaaatgccgccaaaattgatcactgctgtctgcttcaacatcatcttttatttcctagttgatttcaggagaaacggtggcgtctttttcttttattttttaattaatgtcattgccacattcactttatcccatttatttagatgcgtgggctccttgaccaaaacattacaggaggccatggtccccgcttcaatgttattattggcaatttctatgtatacagggtttgccatccctaaaacgaagattttaggttggtccatttggatttggtatatcaacccgctagcctacctgtttgaatctttaatgatcaatgaattccatgaccgtagattcccttgtgcccaatacatccctgctggccctgcttatcagaacatcacaggtactcaacgcgtctgttccgcagttaggtgctatgcaggtaacggggatcctcta

SEQ ID NO: 81953 - DNA, 720 bp, Saccharomyces pastorianus
atgataaatttagaggattactgggaagatgaaacgcctgggcctgatagggaaccgactaatgaactaagaaacgaggtggaggaaaccatcactctgatggaactgctgaaagtgtccgaattgaaggatatttgcaggtctgtatctttcccggtttccggtcgcaaggccgttctacaggaccttatcaggaatttcttgcagaacgctttagtagtaggcaagtctgatccttatagagttcaagccgttaaatttctgatagaacggatcagaaagaatgaacctttgcctgtttataaagatctttggaacgctttaagaaagggtaccccattgagtgctatcacagtacgttctatggaggggcctcccacggtgcagcagcaatcaccttccgttattaggcagtctcccactcaacggcggaaaacgtctaccacatcttccacatctcgtgcaccaccacctacaaatccagatgcctcttcttcttcatcatcttttgctgtaccgacaattcattttaaagagtctccattttacaaaatacaaaggctaatccctgaattagtgatgaacgtggaagtcacaggcggaagaggtatgtgctctgcgaaatttaaattgtccaaagcagactacaatctattaagtaacccgaatagcaaacacaggctatacttattttctgggatgattaatccattaggatga

SEQ ID NO: 81954 - DNA, 1455 bp, Saccharomyces pastorianus
  modified_base (490)..(626): a, c, g, t, unknown, or other
atgggcttgactaccacatctactatcatgagtctgcaatgtccaatttcgtacacaagaatgaaatacccttcaaaatcaataaattgtaagcatctgcaatgttttgatgcattatggttcctacactcccaactacaaattcctacgtggcaatgcccagtatgtcaaattgatatagctttggaaaatttagcaatttccgaatttgttgatgacattttacagaactgtcaaaaaaacgttgaacaggtagaacttacttctgatggtaagtggacagccatattggaagacgatgatgacagcgacagtgacagcaatgatggtagtagaagcccagaaaaaggtacttcagtatcggatcatcattgttcttcttcacatccaagtgaaccgattatcataaatctcgatagtgatgatgacgaaccaaatggaaataatcctcatgttactaataatcatgatgatagcaacaggcatagtnnnnnnnnnnnnnnnnnnnnnnnnnnnnnnnnnnnnnnnnnnnnnnnnnnnnnnnnnnnnnnnnnnnnnnnnnnnnnnnnnnnnnnnnnnnnnnnnnnnnnnnnnnnnnnnnnnnnnnnnnnnnnnnnnnnnnnnnnacatgatcatggtagtcgcagtaatactcccagtcataatcatactaaaaatttaatgaacgataatgatgacgatgatgatgatcgacttatggcggaaataactagcaatcaccttaaaagtactaatacagatattctaactgaaaaaggttcaagtgcaccctcgagaaccctggatccaaaaagttataacatagttgcttcagaaactactactccggtgacaaacagggttattcctgagtacctcggaaacagttccagttatattggtaaacaattgccgaacattctgggaaaaacgcctttaaatgtgactgctgttgataattcatcccacttaatctctccagatgttagcgtatcatccccaacgccaagaaacaccgcttcaaatgcaagttcgagcgctctcagtacccctcccttaataagaatgagttcattagatcccaggggatccactgttcccgataaaacaataaggcctcccataaattccaacagttatactgcatcgatatcagattcatttgtccagcctcaagaatcttcagtttttccaccacgtgaacagaatatggatatgtcctttccttccactgtgaactcaagatttaatgatccacgtttgaataccacaagattccctgattcaacattgcgtggggcaactattttgtcgaataatgggcttgatcaaaggaataactctctaacaacaacagaagcaatcacgaggaatgacgtcgggcgacaaaattctacgcctgtacttcccacgttgtcccagaaagttcccattcgtacaaactctaacaagttt

SEQ ID NO: 81955 - DNA, 2142 bp, Saccharomyces pastorianus
atggcaatccaaagtatagtctctcagcaaatttctacaagctcaactttaaatgacgaaatacattcaagcgcgctttccgttttcaacccttcagcttcgaatttggttgaaacttctctgataatttcatcgacccaagcaagcataacaagccccaaaaactcagctaaaattagttcactacagagccagctgtctagcagtacaaaaaatccatacgatacggcgaacaagaatactgagaccagtggcagatccacaattgtttcgaatttcctatacacatcttccgcggcgaaaccagacaatgaaaagttttccgctactcctacagagataactacaatttcaagtagctcgcacgcatattctttatctattccaagttctcataattctgtgactggactatcacataactttgtcgattcgtcaaaaagtgcaacctcatttggctactcatcctcatcaatatcttcaataaaactttcaaaagaaacaatacctgcaagtaaatctgtttcaaacacacaagaaagaatcacaagctttacatcaacattacgagcaaatagtcagtctgaaaaatccgaagggaggaattctgtaggttctttacaaagttcacatatttcatctaacccatcgctttccacaaatacaaaggttgattcgaaaagtttatccaggaaagtatcgaaaaccatgggcgaaaatggcgaggaaaccggcttaaccacaacaaagacgcaatacaaaagttcttctgaaaccagtgggtcatattctcggtcttttacaaaaatctcaattggacctgctacgactgcagttcaaactcaggcaagcactaattcagtattcacagcacctgccttgtctacctatcctactactccgtacccctctccaaatagttacgcatggttacctaccgctattatagtggaatcatccgaaacgggccccactaccgcatcattcaatccgtcaatcactggttcacttcccaatgcaattgaaccggccgtcgctgtatcggaacccattaaccacactttaattaccatcggattcacggccgctttgaattatgtatttttggttcaaaatccattatcttcggctcaaatcttcaactttttacctctcgttttgaagtatcccttttcaaacacctcatcagaactggacaatagtattggggaattatccacttttattctttcataccggtctgggagcagcacaactaccctttccccaaaatccatatcatcattatcagttgtcaagaaaaaaaaaaaccagcagaaaaaaaatgccacgaagtcaaccgaggacttacatcctccacaagtcgacacatcctcaatagcggtgaaaaagattgttcccatggtagactcttctaaggcatacattatatcagttgcagaggtatattttccaacagaagccgtaacatatcttcagcaattaatccttgatgaaaattcgactctttatagcaatcctcaaaccccactgcgaagtttagctggtctaatagatagtgggatcccattagggggattgacgttatatggctctggagatggtggttatgtccctagtttaacctcatcaagcgtcttggattcttcaaaaggaaattcccaaaacatagatggaacttacaagtatggagctttggatgactttatcaattcattcacagattctgcatctgcaggaaagtatgctgtaaaaataatcatctttttgattgttttaactattggcgtactcttgtggttattcgttgcattttttgctttccgtcatagaaatatattattgaaaagacacccaaggaactgcatagagaaaagcctcaataatgagagggaacttgaaagtaccgagctttcccgctcttcttctagaaaccaagtttataatgaaaagccgccagaatctgaaaatgaaagtgtttactctgcggtagatgatcattatattgtgactggcgaaaacacagtctataatactattcacagattacattataccattaatgatgacggtgatctattgtacagggacgcaatccccctcgattttgatcaaccaatggggatgatggttcgggaatag

SEQ ID NO: 81956 - DNA, 1650 bp, Saccharomyces pastorianus
atggtctcattgaaaataaaaaaaattttactcctggtgtcattgttaaatgcaatcgaggcctatagtaacgatacaatatattcaacttcatacaataatggaatagaaagcacaccctcatattcaacatccgcgatatccagtaccggatctagcaacaaagagaatgcaataacatcaagctctgaaaccaccacaatggctggccaatatggtgaaagtggaagcacaacaataattgatgaacaagaaactggtacgtccagccagtatattagtgtgacgacgacaacgcaaacttctgacacgatgtcatcagtaaaaaagtctacggaaatagcgacaccaagtagtagcattgtacccaccactttgcagtcctatagcgatgaatcacaaatatcacaaacgcttagtcacaatccgaagtccgtggcggagtcagatagcgatacaacctcctcggaatcctcaagtagcgtaataatatccacatccgatagttcagcggtaccgagggaaataagtccaataataaccacagattctcaaatttccaaagaagaaggcacattggctcaaacttccagtatcagtgaaacaacgagaattgcacaaatggtaaccagagtttcacaaatctccagcataacggcagcttcaacaatagatggctttagtagtgaatcaacacaaacagatttttccaacactgtatcgtttgaaaattcagtcgaagaagaatatgccatgagcaaatcccagctctctgaaagttacagttcaagttcaaccgtctattctggaggggagtcgactgcagacaagacatctagctcccccattaccagcttttcatcttcttatagccaaacaacgtcaactgaaacctctgagagcagccgagtggctgttggagtatcccggccctctagcataacgcaaactacatcaattgatagttttagtatgagtgaagtagagctttccacatattatgacttaagtgctggcaactatcctgaccaagaactgattgtcgatcgcccggccacttcttccactgccgaaacatcttcagaggcaagtcaaggtgtaagccgtgaatctaacactttcgcagtatcttcgatttccacgacaaactttatagttagcagtgcttcggatactgttgtttcaacttcaagcaccaatacagtgccatacagctctgtccattcaacctttgttcatgcgacttcctcgtcgacttatatttcttcttccctttattcttccccatccttatctgcatccgtttcctctcactttggcgttgctccttttccatctgcttacatatctttctcatcagtacccgttgcagtatcctcgacgtacacgtcttcaccatcggcttctgttgtagtaccttctgcctatgcgtcttcaccatcagtacctgttgcagtatcctcgacgtacacgtcttcaccatcagcacctgctgtaatatcctcaacgcacacgtcttcaccatcggcacctgttgcagtatcctcgacgtacacgtcttcaccttcagcacctgttgcagtatcctcgacgtacacgtcttcaccttcagcacctgttgcagtatcctcgacaacactctccaccacc

SEQ ID NO: 81957 - DNA, 423 bp, Saccharomyces pastorianus
  modified_base (343)..(343): a, c, g, t, unknown, or other
atggactacaacatatttgaggcggtacatgaacaacaaagcagcacatctgacatggatctctcagaagaagataataatccattcgtcggcactcatcacctatatgcttctggaattgggactactatcggcgaagctcgcccagagaacgaaaattcgcccccttcttcatcgtctttgccatctagcccggcacattcctcttctgctggctcttccagagcatctacgtcatcttcaacctcttctcatgccgtagtggaagcagatgcggaaactgaaccttttgtttccttgtcgatgtctactactgctactattagcaaaatttactccccangatatgaatgggacacagcagatccaatcattgatgccggcgattccaagatccatggggaacacgctatcggtacgtga

SEQ ID NO: 81958 - DNA, 2418 bp, Saccharomyces pastorianus
atgttgcggtttcagcgatttgcgtcctcgtatgcccaagcacaggccgttagaaaatatccagttggaggtatattccatggttatgaagtgagaagaattctaccggttccggagctgagactcactgcggtagatttggtgcactcccagacaggagccgagcatttgcatattgatagagacgacaagaataatgtgttcagcattgcttttaaaaccaaccctccagattccactggggtccctcatattctagagcatacaacgttgtgtgggtctgttaaatatccagttagggacccttttttcaaaatgctaaataaatctctagctaatttcatgaacgctatgacaggtccagattatacattttttcccttttccactacgaaccctcaagatttcgctaatttaagaggtgtttatttagactccaccttgaatccgctacttaaacaagaagattttgatcaggagggttggaggttggagcagaaaaacatcacagacccggagagtaacattgttttcaaaggtgttgtctataacgaaatgaaaggtcaaatatcaaatgccaattactatttctggagtaaatttcaacagtctatttatccttccctgaataactccggcggagatcctatgaaaattacagacttgagatacggcgatctcttggatttccatcacaaaaattaccatccctccaatgcaaaaactttcacgtacggtaacttgccattggtggatacgttaaagcaattaaatgagcagttcagtggttacgggaagagagctcgaaaggataagttgttaatgcctattgatttaaaaaaagacatagatgtcaagttactgggtcaaatagatactatgcttccaccggagaagcagacaaaagcctcaatgacgtggatttgtggagcgccacaggacacatatgatacctttttgttaaaagtactggggaatttattaatggatggccattcttctgtaatgtatcaaaaattaatagaatcaggaattggtttggagttctccgtaaattcaggtgttgaaccaactacagcagtaaatttgctaactgttggtatacagggcgtgagtgatattgaaatatttaaagacactgtaaataatatttttcaaaacctgttggaaacagaacatccttttgaccgcaagcgtatcgatgccataattgaacaattggaattatctaagaaggatcaaaaggctgactttggacttcaattactctattctatactacctggttggacaaacaaaatcgatccttttgagagcttgttgtttgaggacgttttgcaaagatttagaggtgacttagaaacgaaaggtgatactttattccaagatttaatccgtaaatatatcgttcataaaccttgtttcacgttttccattcagggatctgaagagttctctaaatctttggatgatgaagaacaaacaagactgagagaaaaaattactgccttggatgaacaagacaagaaaaacatctttaaacgtggtatactgttacaggagaaacaaaatgaaaaagaagatttatcctgtttacctaccttacaaataaaagacatcccaagagctggtgataaatattcaatcgaacagaagaataatacaatgtctaggattactgataccaatggtatcacatatgtcagaggtaaacgtttactaaatgacataataccctttgaactcttcccatacttacctttatttgctgaatcgttaactaacctagggacaacaacagaatccttcagtgaaatagaagatcagataaaattacatacgggtggtatatcaacacatgtagaggttacatctgaccctaacaccacagagcctcgcctgattttcgggtttgacggatggtctttaaattcgaagaccgaccacatttttgaattctggtctaagatcttactagaaactgatttccataaaaacagcgataaattgaaagttcttatccgcttattagcatcttcaaacacatcttctgtagcagatgccggtcatgcatttgcaaggggctattctgccgcacattatagatcaagtggagctataaatgagaccctcaatggtattgagcaactacaatttataaatagattgcacagcttgttagacaatgaagaaactttccaaagagaagttgtcgacaagctaactgaattgcaaaagtacattgttgataccaataacatgaattttcttatcacctcagactctgatgttcaagcgaaaacagtagaaagccaaatttcaaaattcatggagagattacctcatggcagctgcttgcccaatggaccaaagacttcagattatcctcgtattggatccagatgtaacttactttga

SEQ ID NO: 81959 - DNA, 309 bp, Saccharomyces pastorianus
atggaatatacctccaactggatattttctaacggcctgtgcttgggcatacgaggacgcaaatcgctgaaaccgcaacatatataccgcagtatattttatagtaactttattcttttgagtagccttctaattggtggcttattgattacaattgcttgttatcatatctgtcaatgcttgttcaacaattcaatgatttactactacctttatcatagagcccctccgtatatttatcactgtaaacgaagggccaaatttttacatgcttttttttcgccacccaaagggatctacgacgcctga

SEQ ID NO: 81960 - DNA, 1734 bp, Saccharomyces pastorianus
atgggcggtcaagaaagtatatcaaataataactcagactcattcattatgtcgtcccccaacttagactctcaggaatcttcaatatcacctattgatgagaagaaaggcaccgatatgcaaaccaagtcgctttcaagctattctaaaggtacgcttctctctaagcaagtacaaaatttattagaagaagctaataaatacgatccaatatatgggtcatctttacctcgaggatttttaagagatagaaacaccaagggtaaggataatgggttggttccgctggtggagaaggttatacctcccattcacaagaaaaccaataatagaaacacaaggaagaagtcatctaccaccacgaagaaggatgtaaagaagccaaaagctgcaaaagtaaaaggaaaaaatggcaggactaaccataaacataccccaatttcaaagcaagaaatagatactgcacgagaaaaaaagccattgaaaaaaggtcgggcaaacaagaagaatgatcgcgatagtccttcatcaacatttgttgattggaatggcccgtgtctacggttacaatatccattatttgacatagagtacttaagatcacatgaaatatattctggaactcctatacaatccattagtttaagaacaaattctccacagccaacgagcttgacatcagataacgacacttcctcagtaacgacagcaaagttgcagagtattttattttcaaattatatggaagagtacaaagtcgacttcaaaaggtcaacagccatttataatccaatgagtgaaattggtaaattaattgaatacagctgcctggtctttttaccttcaccttatgctgaacaattgaaggaaactatactaccggacctaaatgcatcatttgataactctgacacgaaaggtttcgtgaatgctataaatttatacaacaaaatgattcgtgaaattcctaggcaaagaataattgaccatttagaaacaattgataaaattcctcgttcattcattcatgacttcttgcatatcgtctataccaggagtatccatccgcaggcgaataaattgaaacattacaaagcattcagcaattatgtttatggagaacttttgcccaatttcctatctgatgtatatcaacaatgccagttgaagaagggtgacactttcatggatctcggttcgggagtaggtaattgcgtagtacaagctgcgttggaatgtggatgtgcattaagcttcggatgtgaaatcatggatgatgctagcgatttaactatactgcagtacgaggaactaaagaagaggtgtaagttatatgggatgcgtttgaacaacgtggagttttcattgaagaaaagctttgtggacaataacagggtcgctgaactaattcctcagtgcgatgttatcctcgtaaataattttttatttgatgaagatttgaataaaaaagtcgaaaagatactacaaacggcaaaagttggatgtaagatcataagtttgaaaagtttaagaagcctcacttatcagatcaacttctacaatgttgagaacatcttcaatagattaaaggtgcaaaggtatgatcttaaggaggatagtgtttcatggacgcatagtggcggagagtattatatatcaacagtgatggaggatgtggacgacagtttattcagcctgctgcaagaggtaggaggaacagaggtacgccggtga

SEQ ID NO: 81961 - DNA, 618 bp, Saccharomyces pastorianus
atgtctatttctgaatcttacgcaaaggaaataaaaactgcatttaggcagttcactgactttcccatagagggtgagcaatttgaggattttttacctattattggcaaccccacactattccaaaagttggtacacacgttcaagacgcatttagaagaaaagttcggcaaagaaaagatcgactttattgcaggtatagaagctagaggccttctatttgggccatccctagcactggcattgggagttggatttgttccaataaggagagttggaaaattgccgggtgagtgtgcttctataacattcacaaaattagaccatgaagaaatttttgaaatgcaggttgaagccattccctttgattccaacgtggttgtcgtggatgatgttctcgccaccggtggaacggcatatgctgcgggcgaccttatcagacaagtgggtgctcatattctggaatatgactttgtgctagtgttagatagtctacatggtgaggaaaattatctgtctatttttcatatgcctctgattaattgtcttgctctcttcatatttccttctcgctttgtatttagtgacttttgtatttacggtttatttaggacggcc

SEQ ID NO: 81962 - DNA, 135 bp, Saccharomyces pastorianus
atgtttaatgtcctattacttccaaaaataagtagtttttccaacgaaatagccttgttggcgcaatcggtagcgcgtatgactcttaatcataaggttaggggttcgagccccctacagggctatcttttttaa

SEQ ID NO: 81963 - DNA, 540 bp, Saccharomyces pastorianus
atgtcgaagacaagatactatttggaacaatgtattcctgaaatggatgacttggtggagaaaggactattcactaaaaatgaagtttcattaattatgaagaaaagaactgattttgagcatagattaaattccagagggtctagcataaatgactatataaaatacattaactatgaaagtaacgtcaataaattacgtgccaagcggtgtaagagaatcttacaggttaaaaagacgaacagtctatctgattggtctattcaacaaagaataggttttatttatcaaagaggaacgaacaaatttccacaagatttaaagttttgggcaatgtatttgaactacatgaaagcgagaggtaaccaaacatcatacaaaaaaattcacaacatttataatcagcttctaaagttgcacccaacgaatgtggacatttggattagttgtgcgaaatacgaatatgaagttcatgctaacttcaagagttgtagaaatatttttcagaatgggttgaggtttaagcctgatgtgcctaag

SEQ ID NO: 81964 - DNA, 426 bp, Saccharomyces pastorianus
atggttgtagtgggtaagagtgaagtgcgcaatgtaagcatgagtaggccgaagaagaaatcattgattgccatcctgtcgacctgtgttttgtttttcctcgtgtttataattggtgctaaatttcaatatgtttccgttttctccaaattcttagatgacaggggggacaacgagtcacttcaattgctcaatgacatagaatttacaaagctaggactgacacctagggagccagtaattatcaaagacgtaaagacagggaaggagagaaaattacatggacggttccttcatattaccgatattcatcctgacccttattatgtggaaggaagctctattgatgcagtttgtcacacaggaaaaccaagcaaaaaaaaaggatgtggcacccaagtttgggaaggcaatgtctggatgtga

SEQ ID NO: 81965 - DNA, 189 bp, Saccharomyces pastorianus
atggacggttccttcatattaccgatattcatcctgacccttattatgtggaaggaagctctattgatgcagtttgtcacacaggaaaaccaagcaaaaaaaaaggatgtggcacccaagtttgggaaggcaatgtctggatgtgattctcccgttattgtaatggaagaaactctgagatggattaaa

SEQ ID NO: 81966 - DNA, 1461 bp, Saccharomyces pastorianus
atgttatctatcttaattttcgccataccgggcaccttcatatctgctgtggttattggaatcatattgtatatctggacctttttaggactagagagtattgacatttcattcgcagatgcaatgtctgttggtgctacattatctgctaccgaccctgttacaattctttcaattttcaatgcgtataaagtggatcctaagctatataccatcatttttggagaatcactgttaaatgatgccatctctattgttatgtttgaaacctgtcaaaaatttcatggtcaacctgcaacattttcgtcggtttttgaaggggcaggcctctttttgatgactttctccgtttcgttgttgataggcgttcttataggaattcttgttgctcttctgttgaaacacactcacataaggcgctatcctcaaattgagagttgtttgatcttgttgattgcttatgaatcctattttttctccaacggttgccatatgtccggtatcgtctccttgttattttgcggaattactttaaaacattacgcctattataacatgtcaagaagatcacagatcaccattaagtatattttccaactattggcaagattatcagagaatttcatctttatctatctaggtttagaactttttactgaagtagaactagtctataagccactgctaattattgtggcagctatttctatatgtgttgctcgttggtgtgctgtgttcccattgtcgcaatttgttaactggatatatagagtaaagacaatcagatctatgagcggcataaccggagaaaatatttctgttcccgatgaaataccctacaattaccaaatgatgacattttgggcaggtttacgtggtgctgttggtgtcgccttggcgttgggaattcaaggtgagtataagttcactttattggcaacggtccttgttgttgttgttttaacagttatcatttttgggggcactactgcaggaatgttagaagttttaaatattaagactggttgcataagtgaagaagatacatctgatgacgagtttgatatagaggctccaagggcgataaatttattgaacggtagttctattcagacagatttgggcccatattctgacaacaattctccagatatttcaattgaccaattcgcggtcagcagtaacaagaatctccccaataacatatccacaactggtggtaatacttttggaggccttaatgaaactgagaatactagccctaacccggcaaggtcttctatggataagcgtaatttgagagataaactgggaacaatctttaattccgactcacaatggtttcaaaattttgatgaacaggtattgaagccagtattcttggacaacgtttctccatccttacaagattcggctacgcaatcacctgcagattctcttcccaaaaccactagactttaa

SEQ ID NO: 81967 - DNA, 363 bp, Saccharomyces pastorianus
atgctatccaaggtattgctgaatatagctttcaaggtgctgttaaccaccgccaagagagcagttgatcctgacgatgatgatgaacttctaccttccccagatctcccgggtagcgatgaccctattgcaggtgatcctgatgtagacttaaaccctgttacagaagaaatgttctcttcatgggcattgttcattatgttgctcctattgatctctgcattgtggtctagttactatttaactcagaaacgaattagggcagtgcatgaaactgtgctttctattttttatggtatggttattggcttgataataaggatgtccccccgggcattatattcaagatacggttacttttaa

SEQ ID NO: 81968 - DNA, 1167 bp, Saccharomyces pastorianus
atggtgctttttactcggtgtgaaaaggcaagaaaggagaaactcgccgctggttataagcccttagttgattatttgattgattgtgatactcccacatttttagaaagaattgaggcaatccaagagtgggaccgatccagagatgatctttatgtttggattcccattctagacagaatggacgggctgttgttaaaagtggcagagaaatataaatacaagcaagaccccaagaaggagtgtgaagtcaaattggtggaaatggaagcgcatgatgttgattattgtttgaaaatgctaaagtttactcgtcgactacttctaaatacagaaaacaggtttgtttattcatctggagatgttttaatgtatctactgaattgtccgaattttacaataaaactagcggtcatgcgaattttagccattttaggggaaaggtttgtgattgcgagagaaaaaatagttgcacataacatatttggagatcacaacctcaggaaaaaaactctcaaactagctttatctctgtcatcttccgtcatggatgaagacggagagcacttttctcttgtcgatctatattttgataagaaaaaagtgcctcaaaaatggagaaagttgagatttacacattatacttcaaacgactttaaaaagtcaagccagcaaaaaaataacattaatgaaacccaaacttccattaagaaggtaactatgacgacccaagaactgtgtgaacactcactacagcaaatatttgataagggtatggcccttttacccgcagaaagttggtttgatttctcaataaaagcttcggtggcgaaggccttcagtgatgattcaggtgaaaatatagatttcagaaatataattattgaaacaaaactgaatgctattgcatttgttaacaccattttctcggctcctcaagtaagctcgaagttatttgaattagatccgtatgcttttaatagtctaactgatttgatatcgttgtctgaaaccaaaataccaagagagctaagaacggatgctttattcacattggaatgtatatccttgaagcatgtctggtgctcagacattatcagaaatctcggtggtaacatatcgcatggtctgttgggatcctctagagtcgacctgcagcatgcaagc

SEQ ID NO: 81969 - DNA, 507 bp, Saccharomyces pastorianus
atggtggtacgtgatcaagatgaggcgttgagaaattcttataaatatgttaagctgtatgtcaggcaggaccagctggaggatacggtggacatactcgctaagcaggacgaggacaagtccaacaatgatgacaggcgcagtctagcctcgatattggactcgagcagttccgtcgaaaagaaggggaaaggcagcaacgaaaagtacctaccatgcgtatctttcaacacagttcccagatcaaaggtatcttcgcccttagatgaagagaaaagagaatttcctggcatgcagatccctgcagattatacaatggaggaatattatgacgacgaaagtggctttacctcggacaacaatgccgactacttctccgggaatagctattcgagtaggcgagagggcagtgctagtcccggcaggtattcttctccacctcctgcctctaaaagaaacatcaaaataggtaagatgtttaagatttctgaagatgtaaaattgtaa

SEQ ID NO: 81970 - DNA, 852 bp, Saccharomyces pastorianus
atggagcgattgaagcaactggaggaaaaaaggagacaattgaaagagctgcgtgagaggcgaaaacaagccagcttgttccctgggagcgagacgatgggccaccatcccacagaggtgcacgctaaggcaaccatggtcagcgtttcagtgcagaccgacatggaggaaggctcaaagattcaagagccccaatctgcatatcttcgacgtaaggaggttataacatacgacaaaggcattcaaacagatcaaattgaggaagaacaactgcaagaaaatgaaaatcacaccactactgatgctgtcgccattgaaaccactgctgccgacgaaaataataaagacaaagctgaaaacgaccagccaaggttagaactagccaaaccttttcttgttgaagaggcggcggcaacgctgagcaacgctagttttgcgcggctggagacagaggtttctgcgtcaggccagcaggcgccatcgaacatgcaacaggataaagacaacctcatgcaatggaacatggtcagtgagaatttacaatcagagacagactgcgattgtatcgctcaggagtatgacccaggaaaaggcgtcttggttgtggtttatctacgattgccgccggcagacctacagtatgctagcagcgaagcggcgtggtctgtggtgaatgtagtcaagtgcgataatgccagcggacgcaacggcctcttgatagatatggtagagttccgtggtacgcggatcatgacagccacgatcctccgtcggtatcatccggaaagcaatgtaatatcaatcttgttggcgaccttcacgggcaagatcatatgtacgagcttagattga

SEQ ID NO: 81971 - DNA, 312 bp, Saccharomyces pastorianus
atgatgttcaccttcatattccatattttcaatggttttttccactgttttttcaaaatattctacttcattttccggttctatagagccaatttctttttcctttggttgtatttccttcatctcgtaatgggaaacatcgtcaaggtcgttaccattcatattcatattagagcttccttcattattccgcccatggcgtctattaccaagcgtcataatgtgcaatatttgatattatataagctacttgagaaagcgatagttttttttttcttacacaaaaaaaaaaaaaacataaagcacctataa

SEQ ID NO: 81972 - DNA, 1512 bp, Saccharomyces pastorianus
  modified_base (1453)..(1506): a, c, g, t, unknown, or other
atggaaagcaaagaaatatcaattaggtcaagaacccctccatcgaagctatattccatccaatcatgtattggcagaggtaactttggtgatgtgtataaagcagtggatagagttacgcaagaaattgtggcaattaaggtggtcaacctggagcattccgacgaagacattgaactgttagcacaggaaattttttttctggcggaattgaaatctcctcttattacgaactatattgcaacaatgttagaagatgtctctatgtggattgtcatggaatattgcggcggtggatcatgttcagatttactgaagcgaagttacgtcaacggtttgcctgaagaaaaagtttccttcattattcatgaagtcaccttgggtttgaaatacctgcatgagcaaaggaaaattcatcgtgatatcaaagcagctaatattttactaaatgaagaaggtatggttaagttgggtgatttcggagtaagtggccacattcgttccactttgataagggacacttttgtaggaacgccgtattggatggctccggaagttgtttgctgcgaagttgatgggtataatgagaaagcagatatatggtccttgggtatcaccacctatgagttactcaagggcttacccccattatctaaatatgatcctatgaaagttatgactaacttaccaaaaaggaagcctccaaaattacaaggtcccttttcggatgcagcaaaggatttcgtagctggttgtcttgttaaaacacctgctgatcggccatcggcatataacttgttatcatttgaatttgttaagaatatcaccataacgaacttgaaaagtgatgttgatctaatcaaacagaaaaaagttcaggagagatatacaaaagttcccaaataccctcttcaaaatcgcttgtatagaaacagcaacacagtgaggggaaaggaattttggaattttgaatcgacaagactaagcacaacacaaatttccaaagaggaattatctcccattacacaagactctccaacatcatctttaaatatggaaagtccttatttacttcatgggcaaactgtaacgccgataaccaacccaagttcttcatcatttagaaaatgtacgcaaccagttttcgagcttgattcaggaatggatatagattcaggctgcccaaatgctcaagcagagaccgaaatagttcctctctctaatcacaataagaagcataaaaagaacgatattcaggcgttgaagatagaaaagtttgactacttgaaaaacattgtatctcatattctcaaccgaatgtatgatcgtgcgcgcgacgatgaaacaagaaaatacgtaaatgaaatgttaaagcaattcattaaaactgaggcaaacgttcctggatttaatgaggtttttatagaagagatctcactaagaattgaagcannnnnnnnnnnnnnnnnnnnnnnnnnnnnnnnnnnnnnnnnnnnnnnnnnnnnngcttga

SEQ ID NO: 81973 - DNA, 207 bp, Saccharomyces pastorianus
atgacaaaatcagacgaaacaacagctaccagcttgaatgccaaaactctaaagagttttgaatccactcttccaataccaacttacccaagagaaggtgttaaacaaggtattgttcatctgggagtaggtgcattccaccgttcccatttagctgttttcatgcaccgtctgatgcaggagcaccatttacaggattggtccata

SEQ ID NO: 81974 - DNA, 1167 bp, Saccharomyces pastorianus
atgttcaaagttcttgaagaacaaaatcaattgctatccaaatcggaaagagatccagttttcttcgatttgaaggtgttggaaaactccacaacaacaccctccattgcaggtccttcatccacgccaaatcctagtagtaacaccacaccaactcatcctacatccgaaaaggatacaaaggatatgagaagcagcagatacagtgaccttatcaaggatttgggccttccgcaatccgcattttccatacaagatttattgatgagaattttccaagacctgaataactattccgaatgcctcataccaattgatgagggaaatgcagtagacataaagatttttccgctgttgagaccaccgacaacttgtgtctcattagaagatgtgcccctgtcgtctgtaaatttgaagaagattattgatgtcaactgggatccaaccatgatgagtatagtcccttacattgatggcttaaacagcattgccaaaatttctaaactaagcaacagtgatcctggcctagtgatagagtgcatacgtcacttaatatactataagtgtgttacattatcagatattttccaattttctaacatatacgctccttcttcattaattaggaattttttgactgatccactaatggctagtgactgtcaatcttatgttacgttcccagaagtgtctaaaatatcgaacttgcccttaaacaaaagtctgggttcaggtgaccaagactcaccatcattttctgtacgaagaaaatccaaatcatctagcataccgtcaaacccggattctagaactacatcttttagttctaccagtagagtttctcaaaactcctccttaaattcctctttttcatcaatttataaagactggaggcaatcacaaacctcctgctcgagttcaaatattcatgtcatcaacaatcataaccgattcctaccaacaagatcatgcctatttgacctttataggtcactttcacaaggtcaaacgctgaaaacatggtatgagtcgaaatatatgattttaaaagaaaataacattgatataagaaggttcataacgtttggcctggaaaaacgtatcatttacaggtgctactcttttcctgtaatgataaatgcaggttcacgtgaaccaaagaaatga

SEQ ID NO: 81975 - DNA, 117 bp, Saccharomyces pastorianus
  modified_base (97)..(97): a, c, g, t, unknown, or other
atggtcagatcatcaggccaacggcaaatgctaagctatttccaagggtttgtgcccatacacacaatattttattccgtgttccatcctacagaangttctcagattaatatgagt

SEQ ID NO: 81976 - DNA, 132 bp, Saccharomyces pastorianus
atgttaccactgtgcttgacgtttttgtccttctttctgtctcttggtggttccttcaaagcagtaatgaccaaagaggaagcagatgggacaacagaggcagcagcttgtctgttttggatctttaattga

SEQ ID NO: 81977 - DNA, 1776 bp, Saccharomyces pastorianus
atggataaattaacacccttggagcttttgaactttgatagagcaatttttaaacaagttggcccaagtattgtcagtactttattcaacatttacgtagttgcatctgatgaccatatctctaccagaatgataacaagtttggacaaatgttcctatatttctgcattttttgacttcaaagatctctttaatgatatactaaactccattgctaagggcactactttgattaattcaagccatgacgatgaactttcaactttagcttttgaatatggcccaatgccactggtacaaattaaattcgaagacactaacactgagatcccggttagtacagatgctgttagatttggtagatcatttaagggtcaactaaatacagttgtttttttccggattattcgcaggaacaaagatcctaaaattttctccaaggaattatggttaaacattgttaatattatactaacattgtacgaagacttgattttgtctcctgatattttccctgatttacaaaaaagactgaaattaagcaacttgcctaagccatctcctgaaatttctattaacaagagcaaagaaagcaaaggtctcttatcaacatttgcttcttatttaaaaggtgatgaagaacccacagaagaggaaatcaaatcctcaaaaaaagcgatggagtgcataaagtcgagtaatattgccgcctctgtctttggaaatgaatcaaatataacagcggatttaataaaaactttactagactccgccaaaactgagaaaaacgcagataattccaggtattttgaagcagaacttttatttatcatcgaattgactattgcattatttctattttgcaaagaggagaaagaattaggaaagttcatacttcaaaaagttttccaactttctcacacgaagggcctcacgaaaaggactgttcgtagaatgctaacatacaaaattttgttaatttcgttatgtgcggatcagacggagtacttgtccaaattaataaacgatgagctgttaaaaaagggggatatttttacccaaaaattctttgcaactaatcaaggtaaggaatttttgaagagactattttcattgaccgaatcagagttttatagaggatttttactaggaaatgagaatttttggaaatttttaagaaaagttacagcaatgaaagagcagagcgagagcatttttgaatatctaaatgaatcaatcaagacagacagcaatattttgacaaatgagaacttcatgtgggtcctaggattattagatgaaatttcatcaatgggtgccgttggaaatcactgggaaatagaatacaagaaattgacagaaagtggtcataaaattgataaggagaatccatacaagaaatcgatcgaattatcattgaaatccattcaactaacatcacacttgctggaagataataacgatctgcgtaaaaacgagatattcgctattattcaagctttggcacatcaatgcatcaatccgtgtaagcagataagtgaatttgcagtggtaacgctagagcagacgctcatcaataaaatcgaaattccaactaatgagatggaatcggtagaagaattaattgagggcggattactaccgttgctaaattcgagtgaaacacaggaagaccagaaaatcctcatttcatccatattaacaataatttcaaatgtttatttgcattatttgaaactaggcaagacaagcaacgaaacgttttggaaaatttag

SEQ ID NO: 81978 - DNA, 2223 bp, Saccharomyces pastorianus
atgtactctatatttacctctcaatctggagtggccgctttgctggggggaggaagtgtgatatttagcaatcaagatgactacttggctcacacattcaacgatttgaatactaacaagcacgatgatccatttttatctggattcattcagttaagacttatgttgaataaactgaaaaatctagataatatagattcactaaccatattgcagccatttttattaattgtgagtacaagttccatttctggttacatcacttccctggccctggattctttgcagaaattctttaccttgaatatcatcaatgaatcatcgcaaaactatattggtgcacacagggcgacggtaaatgctctaacacattgtaggtttgaaggatctcaacaactttctgatgattcagttcttttgaaagtcgtgtttttactgcgttcaatcgtcgactcaccttacggagatttattatcaaactctatcatatatgacgtattgcaaacgattctttcattggcttgtaataacagaaggagcgaagtccttaggaatgctgcacaatcaacaatgatagccgttactgtaaagattttctcaaaactaaagactattgagcctgttaatgtgaatcaaatatacatcaatgatgaaagttacacaaatgatgtattgaaggccgatacaattggcacaaatgtagaatccaaagaggaaggaagtcaagaagatcccatcggcatgaaagtgaataatgaggaagctattagcgaggacgatggcattgaagaagagcatattcattcagagaagagcacaaatggcgccgaacaactagatattgtgcaaaaaacaacaagatcaaattccaggatccaagcgtatgctgatgataactatggattgcccgtggttaggcaatatttaaacttcttactatcattgattgcgccagaaaatgagttaaaacattcatactccactagaatatttggcctagagttaattcaaacggcattagaaatttcaggtgatcgattgcagctatacccacggctttttacactgatatcagatcctattttcaaaagcattttgtttatcatacagaacactacaaaattatcactacttcaagctacattgcagctatttactactctagttgttatattgggcaacaacttacaattacagatcgagctcactctaacaagaatattttctattcttttagatgatggtaccgcaaataactcgagttctgaaaataagaacaagccatcaataataaaggaacttctaattgagcaaatatccatcttatggactaggtcgccatctttttttacttctacttttatcaatttcgattgtaatctcgatagggcagacgtttccataaactttttgaaggctttgactaaattggccttaccagaatccgccttaactaccacagaaagtgtaccacccatttgccttgagggattggtctccctagtcgatgatatgttcgatcacatgaaggacattgacagagaagaatttggcaggcaaaagaatgaaatggaaattttaaaaaagagggaccgtaaaacagagtttattgaatgtaccaatgcattcaatgaaaagcccaaaaaaggtattccgatgttaatagaaaaaggttttattgcttccgactccgataaagatattgcggagtttcttttcaataataacaaccgtatgaataaaaaaacaatcggtttgctactttgccatccggacaaagtaagcttgttgaatgaatatattcgtttgtttgatttttcagggttaagggtcgatgaagctattagaattttgttgacgaaatttaggttgcctggtgaatcgcaacaaattgaaagaatcatcgaagccttctcgtctgcgtattgtgaaaatcaagattacgatccatccaagatcagtgacaacgcggaggatgacatttctactgttcaaccagacgctgattctgttttcattttaagttattcaattattatgttgaacactgacctacataaccctcaagtgaaggaacacatgtcatttgaagattactctggtaacttaaagggatgctgtaatcacaaagacttcccattctggtatttggatagaatttactgttcaatcagagataaagaaattgttatgcctgaagagcaccacggcaacgaaaagtga

SEQ ID NO: 81979 - DNA, 96 bp, Saccharomyces pastorianus
atgagtgataaggaattcgtcacggtagatcccgtcactatcataatcaaagaatgcattaatttatcgacagcgatgcggaatactctaattacc

SEQ ID NO: 81980 - DNA, 1737 bp, Saccharomyces pastorianus
  modified_base (1678)..(1715): a, c, g, t, unknown, or other
atgaccacgaccgctacccaacacttcgctcaacttttacaaaaatatggcatcgacacagtctttggaattgtgggcatccctattgttcaactagcggatacgatggttgccaacggtatcaaattcattccatgcaggaacgaacaggctgcctcatatgcagcctctgcttatggttatattagtgataagcccggcgtgttacttattgtcggcgggcccggtttaatccacgcactggctggtatatacaactcaatgagtaataggtggcctcttctagtaattgcagggagttcttctcaaagtgatatacataaaggcgggtttcaagagttggatcaagttagtcttttgtccccatttttgaagtttaccggaaagttaacccctgacaatattgacatgattactcagaaggctttgaattactgtatacaaggcactgcaggggtttcttacatagacgtccctgcagattttattgagtatgaaaaacccttagaaggaaacgaccgtacaggaaatgaattaccgatgatattaactccaaacttatgtggccctgatccgtcgaagatcaaaaaagttgtacagcttattttgcaacataaaaataaaaacattctgattgttattggaaagggtgcggtaaaaaactcacacgaaatccgcagactagtaaatacgttcaatctaccatttttacccaccccaatggctaagggaattgtcccagactcttctccactgaacgtttcatctgcaagatctcaagcgttgaaaatagcggatattgttcttgttctcggggcaagattaaactggatattgcattttggtgcttcacccaaatggaactcagaatccatattcctccagttcgacttcaatcccgaaactttgggggataacaacgtctcacctggtgctgacctttccatatggggagatataggcttaagcgtaaccgctttagttgaggaattgactcgccaagattcctgctggaagtatagtggtgttaagcaagaaatacgagagaaaattcaactgaatcaaactcgtctattgaggaaagagaagactagagggacacaattgaattacaaccaggtttatggaactttgaggcctcttatcgatgattacaggacaatacttgtgacggagggagcaaatactatggatattgcgcgtatttcattccctacagacgctccaaggcgccgtttagacgcagggaccaacgcgactatggggattgggctcggatatgctcttgcatgcaaggcatctcatccggaactcgatgtggtgctgattcagggtgattccgcatttggattctctgccatggaaattgaaacggcagtaaggtgtcagctggcattggtcatcgttgtgatgaacaatagcggtatttaccatggagaaaaggatatagagggtgatttacctccaacggcactaagcaagaactgccgttacgatctcgtaggcaaaggactgggtgccaatgatttttttgtcaacacaataagcgaactgagtagatgcttccaacaagccgtgcagctttctcggactaaaagagaaacaagtgtcatcaacgttatcattgagcctggcgaacaaaagcaaattgcctttgcctggcagaataaaccgcgtnnnnnnnnnnnnnnnnnnnnnnnnnnnnnnnnnnnnnntatatgttcatctctcttatag

SEQ ID NO: 81981 - DNA, 240 bp, Saccharomyces pastorianus
atgaacaccttacttaaaaaatatagaaaacaacgttatgcctggctttggttccttctgttttccaaaattgaaggttctctgccaattgccctcagaattttattgagtttgcaaccattctgctgtaacatttacaggaaatattatcaagaaaataagaaagtgaagagcacgtccggaaacacagcacttaaaataatagaaaagctcgaagcctcgtctctaacctccgtttga

SEQ ID NO: 81982 - DNA, 1275 bp, Saccharomyces pastorianus
atgcggaccaattggaattttttcttttgtatccttctgcaggccattttcgttgtgggcacacaaacttcaagaacgcttgttctttacgaccaatctacggaacctttagaggagtactcggtctatttaaaagatctagaacaaaggaattacaaacttgaatatttagatattaacagtacttccactactgtggatttgtatgacaaagagcaaagattgtttgataacatcatcgtttttcctaccaaaggaggcaagaatttagcgagacaaatcccagttaagcagttgattaaattttttgaaaatgaaggtaacattttatgcatgagttctccaggtgctgttccgaataccattcgtttatttttgaatgaattaggtatctatccaagtccaaaaggacacgttattcgtgactatttttcgccctcctcagaagagctagtggtttcttctaaccatcttctgaacaaatatgtgtacaacgccagaaaaagcgaggattttgtttttggggaaagttcagctgctttattagaaaatcgtgaacaaatcgtcccaattttaaacgctccaagaacatcctttactgagtccaaaggcaaatgcaactcttggaccagcggatctcaaggctttcttgtagttggtttccagaacttaaacaatgctcgtttagtatggatcggcagtagtgatttcttaaagaacaaaaatcaggactctaatcaggagtttgcaaaagaattactaaaatggacatttaatgaaaaatctgtaatcaaaagtgtgcatgcggttcattcacatgcggatggtactagttatgacgaagagccctacaaaatcaaggacaaagttatttattctgtaggcttttcggaatggaatggagaagaatggctaccacatatcgctgatgatatccaatttgaactaagacaagtggatccgtactaccgtctaacattgtcgccaagcggaaacgattctgaaactcagtattacaccaccggtgaattcatccttccagaccgccatggagtgtttacattcctcactgactatcgtaagattggcctgtcgttcactactgacaaagacgttaaagctatccgtcaccttgctaatgatgaatacccaagaagttgggaaatcagcaattcttgggtttatattagcgccatttgtggcgtcattgttgcgtggatatttttgtgtttctttcgtcggggatcctctagagtcgacctgcagcatgcaagc

SEQ ID NO: 81983 - DNA, 1410 bp, Saccharomyces pastorianus
atgttggcactccggagatttatattaaaccgaaggtctttgagatcgtgtaccataccgattctagtcggagccttgatcattattctcgtgctattccaactagttacccaccgaaatgatgcgcttatacgatcaagcaatgtaaacagtacaaacaagaaaacattgaaagatgcagatcctaaggttcttattgaagccttcggctctcctgaggtcgacccagtggatacaattccagtatcgccactagaattagttccattttatgaccagtctatagatgctaaaaggagttctagttggctaatcaataaaaagagctattataagcatttcaacgaattaagcttaactgatagatgtaacttttatttccggacactgtatacgctagacgatgaatggactaatagtgtgaagaaactggagtacagcataaatgataatgaaggagttgacgaagttaaagatgcgaatggaaatccaatggatgagaaatccgagagattgtatcgccggaaatatgatatgttccaggcatttgagagaataagagcctatgatagatgttttatgcaggccaatccagttaatattcaagaaatttttccgaaaagtgataagatgtcgaaagagagggttcaatcaaaattaatcaaaaccttaaatgctactttccctaattatgatccagacaattttaagaaatacgatcaattcgaattcgagcacaaaatgtttccgtttataaataactttaccacagagacttttcatgagatggttccaaaaatcacatcaccttttggaaaagtattagagcaaggcttcttacccaagttcgatcataaaactggtaaagtggaggagtatttcaaatatgaatacgatccatcaaaaaccttctgggccaattggagggatatgagcgccaaagtagccggtcgtggtattgtattgagtttaggttccaaccaatttccattagctgtcaaatttattgctactttgagatttgaagggaatactttaccgatccaagtggtctatagaggcgatgagctgtcgcaagaactagtggacaaacttatatatgctgctagaagtcctgatttcaaaccagtagaaaataattacgataattctaccaatgttccacaagaaatttggttcctagatgtttctaataccatccaccctaagtggcgaggtgacttcggtagttataaaagtaaatggctagtggttctactcaatcttttgcaagaatttgtctttttagatattgatgctattagttatgaaaaaattgataactacttcaagaccactgaataccagaagacagactgtattttacagggaggggatcctctagagtcgacctgcagcatgcaagctgcc

SEQ ID NO: 81984 - DNA, 366 bp, Saccharomyces pastorianus
atgcttgctgctatgattcatttggccaaaaatacagcccactgcacacatggtgataaagagaatttctggttagggttcttggccgcaggtcacacttatgcactgcagggagtgtattccggagctattggtgattatgtaaagaaaaccgacttgaacggaaagaggcaagaagctgcagtcgaaatatgttccgggcaaatagcacatatgtctactgataagaaaactttactttgggttaacggtggaggtaccttttgtaaacacgataatgctgctaaagatgattggaaaaaagatggcgactttaagaaattcaaagatcaattcaagacttttgaagaaatggaaaaatattag

SEQ ID NO: 81985 - DNA, 114 bp, Saccharomyces pastorianus
atggctagcactgcagtaatgatggacgtggattcctctggggtcaatgacttgcaccattctgagaagaaatatgcggaagaagatcaggttcaggaactattgaaagtttag

SEQ ID NO: 81986 - DNA, 939 bp, Saccharomyces pastorianus
atggtaaacaaacaacaaacgagcccaaacataacaacagtagaattgacgcctaggaacaacaatacaacatacttacagcaagactactacctaattagtgcaattagattgcgctgggatagatctgaagctttttttccgattatgagcctccctgttacacctgtcaagagcaaagtgtgcagtacattatcgatacaacatgagatggaccatgatcaatgccgtgatgtgttgtgcccacgcgaaaacttactagccattaatagaactaataatatagagagtgttgctataccgcgacagagatcgagcaagaacaagaaaccccatgagcatacacaatcgcaggttcgattttccattccagatccaaatgaaatatcacaggactccccactgaaaattgtattccccaagagtggaaatgaaaccgaaagaagaatgtctacttcatcattacttatgaatagccatggtcatttagtcgacatgcactctaaaatactggtcgatgtccctaaagaagtttggaagtttcatcataacaggagaaaaaaatgtgaaagcaggcaccgtaaaactcgttctgatgttaggtccaacacaagtagtagtggaaaagaaccaaaccattctagatcaaaatcattacagtcgatcattgtggatacaatgaacacatatcgtgcaaccgaggttgagaccagtattaatgagaatactagtaatattagccaagtatctccgctgaatttatcatttgacaggcctcctcccttaactcccgaaaagaatttatatctcactcctgaatcgccattgaacagatattatttaccagttccattagaaatatctctgccgccctacttatctccgcaaaacaaggatccaaagaggagtagcttggtttaccgatggggatggctatag

SEQ ID NO: 81987 - DNA, 1653 bp, Saccharomyces pastorianus
atgcatttagaaagagtcaaaaaattggtccgagaagagcctgctcccaggaatgatatgccgtcatccaaaacatacactaatcatagctcatctttcacaaggtctactgaaccacctcctgtattccaaatggttcccggaagaatgatgaaaacattaagaaatagaaatgcatgcggctataaaaccgcatactccaacccctcactatcatcatatggtaacagcacatcgataaaacgcggagaagatgcggagaacattagagtaaattttgtaccttctaagcctttatccaacaatgcaagcagacagcacaagaaccctattgagcacaatgatcctgcacttaagaaggaaactgaactgtactcagataaatatatctcagagccaatattgatagattcgactaatgacgaggatgatcacgatgtcggcattttaaaaggacacaacgtttttgatgaagaagaaagtgatggtttcgagtttgatgtgtccgattactatgataatttctccgaagtcgacgtagaagaagaagaagaagaaatagaggaaagacgacgtataaaaacgttagaagcaattcaacagcaaatgtgtgacttgtctgttacttcttctacgtccagtaataagagtgtaagttcttcagaaaatgttcccggatcatgcatacagtccctgccgactaccgcccctgctcttccttcattacctccacctcctttattaaatgacgatagagcgtccagcactggcgctctaaagccacatagtttagaaacttctactactatggattcatcaaagattaggaatcctcaaatatcaaaattaatgaagaataatcacgtaccatacttaaagggtaccaaatcaacgcccactcttatcactaaatcaacgccaacatttattacaagatcaaaaagtaatacaaaaccaatcatcaaatccaatgcatcgtctccgacctcttctctgactgttccaaattcagtaattcaaaaacccaaaacggctgcaatggctgctaagagagttctgaacagcaaaaaggttgcgagtaaccccgcattaaacactacgaagaagagtcaccccattttgaaatccaaaacggcgaaagtcccaaattccagttcgaagaaaacgagtatccatccttccagacctgtaagtaactcaaaaccatactcgcatggtgcatcccagaataagaagccatcgaaaaatcaaaccacgtctatgagtaaaatgaatcgaaaaataccagcacaaaaaaaaatcggttctccaaaaatagaagatgttggaacagaagatgccactgaacatgccacttccctaaatgagcaaagagaagagcctgaaatagacaagaaagtcctgagggagattttagaagatgaaattattgatagtttacaaggtgtagataggcaagctgcaaagcaaatttttgccgaaatcgtagtgcacggagatgaagttcattgggatgatattgctggtttagaaagtgcaaaatattctttgaaagaagcagttgtctatccgtttttgagaccagacttattcaggcggttacgtgagccagtcagggggatgctccttatttggaccaccaggtacaggtaa

SEQ ID NO: 81988 - DNA, 207 bp, Saccharomyces pastorianus
  modified_base (194)..(194): a, c, g, t, unknown, or other
atggagtcacaaagaagccatcatattttaacgagattaaccaagatacggagaagacctcaacaaccgttaaccgactttacagaactttacagtagaattgccaatgagacaatatattacttgaacctagaagagaaaaaacgatataaagaagcttggggatcctctagagtcgacctgcagcagcagcntggcactgccgtt

SEQ ID NO: 81989 - DNA, 771 bp, Saccharomyces pastorianus
atgttggaagagggaaataatgtttacgaaatccaagacttggagaagagatctcctgtaatagggtcaagcttggaaaacgaaaagaaggtagccgcttctgaaactttcacagcaacttccgaagatgaccaacagtatatcgttgaatcatcagaggccacaaaattatcgtggttccataagttctttgccagtttgaatgcagaaacaaagggtgttgaaccagttacagaggatgaaaaaacggacgattccatactgaatgctgcgtccatgtggttttcagctaatatggtcattgcatcatatgctttgggtgccttaggacccatggtgttcggtctaaattttggtcaaagtgttttagttatcatatttttcaatataatggggttgatatttgttgcgttcttttctgtctttggtgcagaactgggtttaagacagatgattttatcaagatatctggttggtaatgtaacggcaagaattttctctcttattaacgttattgcttgtgtcggttggggtattgtgaatacctcagtatccgcacaactgctgaatatggtgaatgaaggctctgggcacaactgtcctatttgggccggttgtctgatcattattggtggtaccgtgcttgtgactttttttggttacagtgtcattcatgcatacgagaaatggtcatgggtacccaattttgccgtctttttggttattattgcccaactatcgagatcaggaaagtttaaaggtggtgaatga

SEQ ID NO: 81990 - DNA, 102 bp, Saccharomyces pastorianus
atggtactgtttggactaggtagactattttacgtcattttattattgattaatgccgttgcagtactgagcgaagaaaggttcttaagaagaagtatgtaa

SEQ ID NO: 81991 - DNA, 99 bp, Saccharomyces pastorianus
atgacctcaggatactataccgtctcatttttttatgcgatcttattgttatgcgcatgcacacgtgctgagatctacctgacgggcggtgaaagccag

SEQ ID NO: 81992 - DNA, 426 bp, Saccharomyces pastorianus
atgtatttgtatgtaagttttttaattaatagtcttcttctttcttatcagtcgtgctcttctttccaaattaataggtttgaatcttatcggaatcacctggaattcgttctcattacatggccgcccaccatgcacctttacatttcgtatttctttcctctctgcgctatatctttgggaaagatttgcaatcaaggcaaacacccgcttgtcccctttcaattcttgtgttatttcaaaaaccatcctttcataatatatttgtatttctttcgccctggactctaccagttcatatttagaaccttccacacatcgtccaattctgcagcccacatctttttccaccacgatacgggaaacagaatgagtccttggattctcgctaaacagtctctctattcccctgttcaaaacccttaa

SEQ ID NO: 81993 - DNA, 666 bp, Saccharomyces pastorianus
atgtccatttcaaccagtttgaactcagcttccattcatttgagcagcatggacacccatcctcagctacactcactcactcgtcagccacactcgtcgtcaacagctatgtccaagaacgaagcccaggaatcttcgccctctctgccagcttcctcttcatcgtcgacttcggcatcggcatctgcgtcttccaagaattcgagcaagaacccttcctcttgggaccctcaagatgatctgctgctacgtcatttaaaggaggtcaagaaaatgggctggaaggatatttcgcaatacttcccaagcaggactcctaacgcgtgtcagttcagatggagaaggttgaagtctggtaacttgaagtcgaacaagactgctttgatcgacatcaacacctatacgggcccactcaagatcacccacggcgatgaaactaccaacgttcagcaaaagcccagcaagaaggtagaagaaaacgtattaacggaagatactgctgagttcactacaacgtcatccatcccgattcctccagaaagactcgttgccttcgtttcatgcatcgatgtcttttctcatctccgccaatgtgatccactacgatgctcaacgcgttctccagccgtggtctccaggtgcgcgaatcctatatctaataactaa

SEQ ID NO: 81994 - DNA, 225 bp, Saccharomyces pastorianus
atgacccggcttcctcccatcccgagaatgacagtaacactgaccacaaggccggccgttcccacttgcaatgaaggatcttccatccttcattatatatacatacctatatacgaaccgaacgaacagaaagagaagagaagacacaagacaccaccagaaccaagagcatacaccactaccaccaccatcgctccaacagcagggtatccggatgcagtttga

SEQ ID NO: 81995 - DNA, 711 bp, Saccharomyces pastorianus
atgtcggatccaagttctattaacggtggtatcgtcgttgcgatgacaggtaaagactgtgtagccattgcctgtgatttgcgtctcggaagccagtcactaggtgtgtcgaacaagtttgaaaaaatcttccactatgggcatgtgttcttagggattaccggtctggctaccgacgtgactactctgaacgagatgttccgctacaagacgaacctatataagttgaaggaagaaagggccattgagcctgaaacgtttacccaattagtgtcaagttcactttatgaaagaagattcggtccatactttgtggggccggtggtagcaggtattaattccaagtccgggaagccctttattgcgggattcgacctaatcggctgtatcgacgaggccaaggattttatcgttagcggtactgcatccgaccaactgttcggtatgtgtgagtccctgtacgaacctaatctagagccagaagatcttttcgaaactataagtcaggccctactgaatgctgctgaccgtgacgctctatcaggctggggagctgtagtatacattatcaagaaggatgaagtggtgaagagatacttgaagatgagacaagaattgatcggttcatggcaatctcatggtcccaaaaaaaaccccaacacaaaatatcagcggaacgtcaagaattttccacatccaactcatctttaa

SEQ ID NO: 81996 - DNA, 180 bp, Saccharomyces pastorianus
atgcggtttttaccccggaaatcgcgtttattaatgtcaatgcgcgatttctattatgggttgaaaaagttgcacttctgttcctttccaaacgatatgacgccccccccacaagaaaacgtttctcttgcattcaataaggtccatcgaagctgtatttggaacttccgattttattaa

SEQ ID NO: 81997 - DNA, 369 bp, Saccharomyces pastorianus
atgggtatttctcgtgattctcgtcacaaaagatcagccactggtgctaaacgtgctcaattcagaaagaagagaaagttcgaattaggtcgtcaaccagccaacacaaaaattggtgctaagagaatccactctgtcagaactagaggtggtaacaagaaatacagagctctaagaattgaaaccggtaacttttcttgggcttctgaaggtatctccaagaagaccagaattgctggtgttgtttaccatccatccaacaatgaattggttagaactaacactttgaccaaggctgccattgtccaaattgatgctactccattcagacaatggttcgaagctcactacggtcaaaccttgggtaag

SEQ ID NO: 81998 - DNA, 1461 bp, Saccharomyces pastorianus
atgtcaaaagctgttggtattgatttaggtacaacctattcatgtgttgctcattttgcaaacgatagggttgaaattatcgctaacgatcaaggtaatagaacgacgccttcttatgtggcttttactgacacagaaaggctaattggtgacgctgcgaagaatcaagctgcgatgaacccacataatacagtattcgatgctaagcgtctgatcggacgtaaattcgatgatccagaagtgacgaacgatgctaagcattacccattcaaagtgattgacaagggaggtaaaccggtagtgcaagtggaatataaaggcgagacaaagacatttactccagaagaaatttcctcaatgatcttgacaaagatgaaggagactgctgagaactttttaggaacagaagtgaaagatgctgtagtaacggttccagcctatttcaacgattcacaaaggcaagcaacaaaagatgccggtacaatcgcgggtttgaacgttcttcgtatcattaatgaacctacagctgccgctattgcgtatgggctggacaagaaatcgcagaaggagcacaacgtcttgatctttgatttaggtggtggtacttttgatgtctctctgctatccatagatgaaggtgtctttgaggttaaggctactgctggtgacactcacttgggtggtgaagatttcgatagtaggctggttaactttctagccgaggagttcaaaagaaaaaataaaaaggatctaacaactaaccaaaggtccctaaggaggttaaggaccgccgctgaaagggccaagagaactctgtcttcgtctgctcagacatctatagaaatagattcattatttgagggtatcgatttctatacttccattacaagggcaagatttgaagaattatgtgctgatttgtttagatctacattggagccagtggaaaaagttttggctgattcaaaattagataagtcacaaattgatgaaattgtacttgttggtggttcaacaagaattccaaaagtacaaaaactggtttctgattttttcaatggtaaagaaccaaaccgttcgattaaccctgatgaggccgtcgcttatggtgctgccgtacaggctgccatcttaacgggtgaccagtcgtcgacgacccaagatttactgttgctggatgttgcaccattatctctaggtattgaaactgcaggtggtattatgacaaagttgatcccaagaaattcgactatcccaacaaaaaaatcggaagtgttttccacctacgctgacaaccaacctggtgtgttgatacaagtttttgagggtgaaaggacaaggacaaaagacaacaatctactgggtaaatttgagttgagcggtattccacccgctccaagaggcgtaccacaaattgaagttacatttgatatcgatgcaaatggtattctgaacgtatct

SEQ ID NO: 81999 - DNA, 906 bp, Saccharomyces pastorianus
atgagggaaaaaagaacaatttcaaataaagacacaaactatctcaaattcccaaataaactccaaagatattcccgattcttgagcaggaagatatccaataccagcccagaaaagcaaccgaagaagaacataaaagaacactgtttatcgagttatcacaaagaacactcggtaaaaccaaagcaaaactccggtaatgttgcagcaaaagaagacaaagatacgcagcatttacaaaataatgtcgctaataaagaagcaacggaatgtctaacaagaagtaatttgaaaaagttacaagagaaaattttcgatagagaacttaatgatattgcctgtgatcattgtctttgtagcacagaaaatagaagagatatcaagtattcacgactttggttcctttttgagttggaaatgagtgaaaactggaatgaaaatctccgccttagttgctataataaatatgtgtattccgcaattgatgagtcgtggaaaatggagaatattctacttaaagaacaagagaagcattatgaatattttccaataggacaattactgatacccaataatattgactacactaataaacagaaaaggaaggaaaacattgaagacttaacaattgaaattgatagtattatagagacaaaccatcaaaagaaaagatttttgccgcaaagtgtcctgataaaaagggaggatgaaattgcatttgacgactttcatttggatgcacgaaaggttctaaacgatttgagcgccacttctgaaaatccattcagctcttcaccaaatacaaaaaaaattaaatcaaagtggaaaaaccttggaaagtggttcccaagaaagaaaaacaaaaagatcataggtgcttttggaaagaaagctacatatagatga

SEQ ID NO: 82000 - DNA, 2235 bp, Saccharomyces pastorianus
atgccatttgatgttttgatatcaaaccaaaaagataataccaatcaccagaacatcacgccaatatcaaaatcagttcttttggcgcctcattcaaaccatccagtgattgaaatagctacgtattcagaaaccgatgtatacgaatgctatatacgtgggtttgaaactaaaatagtgatgagaagaactaaagatgattggattaatattacccaggttttcaaaatagctcaattttcgaagacgaaaagaactaaaatactggaaaaggaatcaaatgatatgcaacatgaaaaagttcaaggtgggtatggtaggtttcaaggtacttggatcccactggattcagcgaagtttttagtcaataagtacgaaataattgaccctgtggtcaactccatcttaacttttcaattcgatccaaataaccctccaccaaagagaagcaaaaatagtatattgaggaagacttcgccgggaacgaagataacttctccatcgagctacaataaaacaccaagaaaaaagaacagtagttcatcaacatcggctacaactacagctgcgaataagaaaggcaagaaaaatgcatcgatcaaccagccgaatccaagtcctttacaaaaccttgttttccaaactcctcaacagttccaagtaaattcatcaatgaatataatgaacaataatgataaccacaccacgatgaatttcaacaatgacacaagacacaatttaataaataatattagtaacaacagcaatcaatctactattattcaacaacaaaaatccattcatgaaaactctttcaataataattattcggcaactcagaaacctcttcaattttttccaattccgacaaatttacaaaacaagaacgttgctctgaataaccctaataataatgacagtaatagttacagccataacatcgacaatgtcattaacagcagtaataacaataataatggcaataataataacttgatcatagttccagacggacctatgcaaagccaacaacaacaacatcatcatcatcatgaatatttgacgaataacttcaatcattccatgatggactccattacaaatggcaatagtaaaaaaaggaggaaaaagctgaatcaatctaatgaacaacaattttacaaccagcaagaaaaaatacaaaggcatttcaaattaatgaagcaacccttattatggcaatcctttcaaaatccaaatgatcaccataatgagtactgtgacagtaacggcagcaacaataacaacaacactgtagcatccaatggctcctccattgaagtattttcatcaaatgaaaatgataacagtatgaatatgtcttcacgatctatgacaccgttcagcgcaggaaatacttcatctcaaaacaagttggaaaacaaaatgacagatcaagaatacaagcagacgatattaacaatactatcatcggaaaggtcttctgatgtagatcaagcgttgttggctactttatatccggcgcccaaaaattttaacataaattttgaaattgatgatcaaggtcacactccactccattgggctacagctatggcgaatattcctttgataaaaatgctaattaccttaaatgctaatgcattacagtgtaataagctcggttttaattgcatcacaaaatcaattttctacaacaattgctacaaggagaatgctttcgatgaaataatatccatcttaaaaatatgtcttataactcccgacgtaaatggaagattgccatttcattatttaattgaattgagcgttaataagtccaaaaatccaatgataataaaatcttatatggattcgataatattgagcttgggtcagcaggactacaatttgttgaagatatgtttgaactaccaagataatatagggaacactccactgcatttatctgctttaaacttgaacttcgaggtttacaacagactggtatatcttggtgcgtcaacagatatattgaatctagataacgaatcgcctgcgtcaataatgaataagtttaatactccggctggcgggtcaaacagcagaaacaacaacaccaaggcagatcgaaagttagctcgaaaccttcctcaaaagaattattaccaacaacagcaacagcaacagcaaccacaaaacaatgtcaaaattccaaaaattataaaaactcaacatcctgaggatcacgactaa

SEQ ID NO: 82001 - DNA, 456 bp, Saccharomyces pastorianus
atggctgtttctaatatatggcaatcgtactcttcctccaatttacattggatttatcctctgtataccaataactgttcacaaaatgtaaagtcatcatttacagcagaaatattattgaaaagaagatgtaatgatattcaagatatacttaatgacaggatgattgaattgttgctacagggcgcgtgtgacccaaataagcagcagaattaccttcaggggatgagtccaagtaggaagaagaaaacccacgttaagaaatttttgaaaaagcaaaaaaaatcaaggaaaccaatcactctggagcatggttgcttgtcaggacccgtgactctacgtttcggaaattttgcaggaatcagagatttgagaggtaccaggtgcccgctccacggcataaaacatggtgtccatcgacctgcaggcatgcaagctggcactgccgtcgtttac

SEQ ID NO: 82002 - DNA, 735 bp, Saccharomyces pastorianus
atggcaagaagacctgataaccaaaatccagataatgaaaatctacgaatcaaaagggtaagactagagtcggtcaggcagaacgatgaggaggaagaaaatgaagtatcgagaacacaaaatatcgtcacagataactgccatgacagcccagaggccgtagtcgaaatcattggagagcgaactcttgagaatacttctgaggaagatggtgatgatgatttatctctctttagagcacttgaagaagatccaggtagcgaccataacaccagtaacaacgattctgggaatcatgacagggaaacaatgcataccgaagagccagaagcaagttctggtaacaatatcacattaacaaataatgttgaagaattgcacacaatagacgttctttcacaaacagcaaacactccgagtgcttccccgatgcttgacgcagcaccgccgacaacgaaccctggaacaaatagtaaggaacaaactgttgatttaactgcagatgccatagacttagacgctgaagagcaacaagtgttgcaaatatcagatgacgactttcaggaggaaaccaaagaagcacccaaagagtatggtgcagccaaggactatcgctgcccgatttgttttgaacctccagagacagccctcatgacgttatgtgggcacgtcttttgttgtccatgcttatttcaaatggttaatagctcaagaacatgtagacaattcggccat

SEQ ID NO: 82003 - DNA, 609 bp, Saccharomyces pastorianus
atggtagctagtattagatcaggtgtgctgacacttttacacacggcgtgcggtgctggtatcctggccatgccgtacgcattcaagccgtttggattaattcctggagtgataatgatagtgctgtgtggggcgtgcgctatgcaaagcttgttcatacaagctcgtgtagctaaatacgtaccacaggggagggcctcgttcagtgctctgacgcggttgattaacccaaatctaggtattgtgtttgacctagcgatcgctatcaagtgttttggtgtgggcgtctcttatatgattgtagttggggatctgatgccccaaataatgtctgtgtggaccagaaatgcttggctgttgagcaggaacgtgcaaatttcactgatcatgctttttttcgtggccccgctgtcttttctgaagaagttgaattcgttgaggtacgcttccatggtggccatctcttctgtagcgtacttgtgtgttttggtgttgttgcactatgtagcaccatcagatgagattcttcgcttgaaaggccggatctcctacctcctgccaccacattcgcatgatttgaacgtgctaaacactcttccattttgtctt

SEQ ID NO: 82004 - DNA, 1362 bp, Saccharomyces pastorianus
atgtctttataccctttacaaagatttgaatcaaatgacacggttttcagttacactttgaattctaagactgagctgtttaacgaaagtcgcaataacgacaagcaacaatttacccttcaactcataccaaatgccaacgccaatgccaaggaaattgacaataataatgtagaaattatcaacgatctgacaggcaatactattgtcgacaattgtggaactacagctacttcatcaaatcagttggagagaaggctttcgatatccgactatcgtaccgaaaacggtaactactacgaatacgagttttttggtaggagggaacttaacgaaccattatttaataacgacatcgtagaaaatgatgatgacatcgatctaaataatgaaagtgatgtattgatggttagcgacgacgagttagaggtaaatgaaagattttcttttctcaagcaacagcctcttgacgggctgaacaggatttccagtactaataacttgaaaaatctggagatacatgaatttataatagatccaacggaaaacattgacgatgagcttgaagactcttttaccactgtgccccaatctaaaaaaaaagttagggactatttcaaattaaacatattcggcagtagtagcagtagtaataataacagtaatagccttggttgtgaacccattcagaccgaaaactcttcctcgcagaaaatgttcaaaaatagattcttcagaagtaggaaaagcactctaatcaagtctcttcctcttgagcaagaaaatgaagtgcttataaattcagggtttgacgtttcctctaatgaagaaagtgatgagagtgaccacgcgataataaatccgttaaagctggtgggaaataacaaggatatctctactcaaagcattgctaagacaacgaatccatttaagtctggcagtgattttaagatgattgagccagtttcaaaattcagcaatgattcgagaaaggacttattggctgccatatcagaaccatccacttctccttctccttctgcaccatcaccttcagtacaatcttcctcttcttctcatggcttagtggtgaggaagaagacaggaagcatgcagaagacacgcggaaggaagccctctttaattccggacgcttccaagcaatttggttgtgaattttgcgatagaagatttaaaagacaagagcatttgaagaggcatgtcagatctttacatatgtgcgaaaaaccatttacatgccatatctgtaataagaacttcagcagaagcgataatttgaatcagcacgttaaaactcacgcttccttatggaattttaaagatacggaaattgcaaattga

SEQ ID NO: 82005 - DNA, 321 bp, Saccharomyces pastorianus
atgatctctattccattccgcagtaccatgtcaagaacactagtattcattatacttcccacagtgctttcatgcaatcccagtagtaggttaatgaatttctccaattctttcaacttatgctcgtactcaacttgtaattgtgatccatctttttgctttgaaatgatcaacttagccaggacatccatagcttgtgacaatctgactatatcattttctgttggaataaaaatcaactatcatctactaactagtatttatgttactagtatattatcatatacggtgttagaagatgacgcaaatgatgagaaatag

SEQ ID NO: 82006 - DNA, 252 bp, Saccharomyces pastorianus
atgaatgaagacctgcccaaggaatattttgaactaataaggaaggctcttaacgagaaagaggcagaaaaagcgcccctgagtagaagaagaagagtcagaaggaagaaccagcccctaccagatgccaagaagaagtttaaaacagggttgaatgaattgccacgagaaagcgttgttactgtaaacttagattcttcagatgatggcgtcgttacggtaccgacggatgatagtgtagagagatccagt

SEQ ID NO: 82007 - DNA, 252 bp, Saccharomyces pastorianus
atgaaatgggttttcacctcagagagtaaatttaatttgaattcctcactgttcatcataaaggccgcaattggctgtttaccagaggtgggtgatagcatagaggacatacctaaatttgattgggactcctgccctactatcggatgtatttgcagaactaaggaggctctttttcaacttgagtctcgaaaagatatacatatatgccctcaattatttttaggggaaacccggaccgccacattatga

SEQ ID NO: 82008 - DNA, 180 bp, Saccharomyces pastorianus
atgctgtggcatcctaatggttacgagcctcgagtaaaggctacagaagaagaaacctacgctaacaaagacaggaaggatgttccggataagtttaaatttgataccgtaacgaaaactggaatggtcaagcttcgtgttttcaaagacgacctaatattcaaatcacaacgtctataa

SEQ ID NO: 82009 - DNA, 1053 bp, Saccharomyces pastorianus
atgaatagatcatacacagacgacatgaatagcagctctccaaattacctgacaacaaggacgtttagaatctttagattgtttgcaataatttttgcactgcttttgatagcgtactctttatttctgagcactctaaaaacaggctctatacctgatcgtgccaacactgttactttaatgcgccgtgccaggtggtcatttgggactggattaggactaggaggatttgtaattgctgcagccgcttatgctactccttactgggtcgcagcaatctgtctcgcaactgctagcgaggtgtgtgcacctatagctggtgctgttttggcgacagcagcggttattgtcgcagcagttttagtgggaaagagttcgggctcggcaacaaagcgagggttaactaagactattagcgtactgaatcataccataacattcaccgatcatatactcaatggtcagacgttgtctaatggtactggtagtaattttgttacaataggattcagcgggtatgcagtacatgacactatcaaacgtgacagcactactgatatcaatttcgtgggatataccacagagcatggaacccacattagcacgagtagcgtacataatgtgagcagtctcatcgataaaattgtggcagcggtaccaggggtccctgatacaggtggtaatgcttctgctctatcgtttcagaaacgcagtcaggagttcgctacctcatggatatcaatgacatatgatcagagttatggtgaccttgcgcaaacgtggcaaaatgacgaaggcggagcaggaaattttgattcttatgcggaagaggagttacagaatttcttttcaggtaatagagactggaagtactgctttgctgctgaggacacgaagagtggtgagccaattgattacgatgacatacctggtgacggtccaggcacgggttcggcattcaaatcggagatatatttcaacacttacggtggtatagataattattgtaatgacgagcatatcggtgctcagaacactggagatggtcgataa

SEQ ID NO: 82010 - DNA, 471 bp, Saccharomyces pastorianus
atgatgcctacctacctaggaaagttaacgtggatatgcttttttaccaccttaggactagcttgtgcttacaacgtaacagagcaaatggagtttgatcagttcaaatcaggttaccttgcctgtctcgcaccagaacacagaaacattgtagtcgatttggctagtaatggattcataacaatttcaccgatggcgaatgcaacaattgactttgaggatgtaactagtgattattttaactgcactgacgtcaatactaacgtacaagttacgatcgcgtcattttacaatgaatacggttttgggcctgatgataacggctattatcacgctacagaaggaccttcagaatttgaacggcatggtatggatgttaggctttacagaccatactatccaggtgagtttgtcatgggaaaacgttcaaacgcacttggagtggcttatcttagtgagatttcttattaa

SEQ ID NO: 82011 - DNA, 216 bp, Saccharomyces pastorianus
atgaaagtttccgataagcgtaaatttgaaaaagcaaactttgaggagtttgagttggctctaaataacaaaaacgacttggtacattgccactcaataactttatttgaatcgatgcgcacggaagtgcgatcattctacgaagacgaaaagtctggtctaatcaaagtggtaaaattcagaactggtgcaatcgataggaaaagatccctatag

SEQ ID NO: 82012 - DNA, 516 bp, Saccharomyces pastorianus
atgacagcaatgaaagctattgtctggagacttcccaagatgccgaaaatcaaaattacaaaaacttatgaagttacgaaaattacggcgatattgacactagtaggatttataatgggccttgaggtgccgtcattggcaacttttctcacaaacaaaacgtttaatgagtacttcaagtatccaactcctttacaacaaggtttactcatggggtccacccccctgggtggtatcatgggatgttttatttactgcataatgaatgatagattcagtagaatatatcaatttcaatcgggaataataatatggaatattgttacgttattgaacttttgtatttgggatatattaggtttactaatttgccggatgatcaagggtatgatccttgggaacttttcaattttagtagcatcctacgcaaatgaagttatcccccgcagcaagcgtggaagtacgatgagctatattcaattgtgtttaaccattgaattctgtatgcatattgtg

SEQ ID NO: 82013 - DNA, 3873 bp, Saccharomyces pastorianus
atggatgccgtgttgaggttggataacgcaatgacctattctttaaagattaaaaacgaggtcaacaactatgtggtacaactgatccgcgagcaaattgaaataaataagcatgcaatcctaactcacccgatgaatttaaggtcttcttccatatttcattccccactgccgcaaattcactctcaacaaccagaagccgagaatctcatatattcctcctctactcccctgcaagtccaacaggaccaatgtgcgtcctttgaagcaccctccaagtctcatctggagcctattcctttcccggtttcttccattgaagaaacaccaactgcaaatgatatcaggcatccttctcctttgccccgtagttgtagcaacaccgttatgaaactaccgacacctcgaaggaaacttgactcaaacggattattctctgatgcctatttaaacgctgacatcattccgaacccaagtatcgaatccacgatatctattgatagagataataacactaatagtaggggtagtagtatgaaacagtatggtattggtgacgcctccgactctcggattagtaactcggaaagaccttcttcctcttcgtcaaggctggggataagatcaagatccataacaccaagacaaaagatagaatactcacatgtagataatgatgaccgcaccaacgaaatgctgtctagagataaagattctcttcaacctcaaccttccgtagataccaccataacatcctctactcaggcgaccaccacgggtaccaagactaatagtaacaattccacaaactcagtattaccaaaactaatgacaagtatttccttgaccccaaggcgtggttcaccatcatttggtaatctcgcaagccattctatgcagcagtcaaacagttttaaactgattcatgataaatcgccgatatcttcacctttcacattctccaaggattttttaaccccagagcagcacccttccaatattgccagaacagatagtatcaataatgcaatgtttacttcaccgaatatgccattatcaccccttttattggccacaaaccaaactgttaaatctccaacgcctagcataaaagattacgatatcttgaaaccaatcagcaaaggtgcttatggtagtgtttatctagcacggaaaaaactcacaggagattattttgctataaaagttctaagaaaatcagatatgattgctaaaaatcaagtaacaaatgtcaaatccgagagagcaatcatgatggttcaaagtgataagccctatgttgcgagactatttgctagtttccaaaataaagataaccttttcttagtgatggaatatttaccaggtggagatttggccactttaatcaagatgatggggtatctgcccgatcaatgggccaagcaatacctaaccgaaatcgttgtcggtgtgaatgatatgcatcaaaatgggatcattcatcatgacttaaagcctgaaaatctactaattgataatgcaggtcatgtgaaattaacagatttcggtttatcaagagctggtctgattcgccgtcacaagtttgtcccacataagtcgtcgctaagtatcagttccactttaccaatcgataacccagcaaacaattttaccatgaacaataacaatagtaatcattctcaattatcaaccccagatagcttcacatcagatcataagcagtataatagaagcaagaagtcatcactaggtcagcaatacgaacactcagaatactcaagtacttccaattcccactcaatgacgccaacgcccagtacgaacactgttgtttatccttcatattaccgtgggaaggacagatcacacggaagttcgaacatcgatctcccagcgtcccttagaagaagtgaatctcaattatcattttccctccttgatatttctcgttctagtactcctcccttagcaaatcccacaaattcgaacgctaataatattatgagaaggaaatcactcactgagaataaatccttttctaatgacctattatcttcagatgctatcgcagctaccaacacgaatattaactcgaataataacatttccctttcgccagcaccttcggatttagctttgttttatcctgacgatagcaagcaaaataagaaattttttgggactcccgattatctcgctccagagactattgaaggaaagggtgaagataacaagcaatgcgactggtggtcagttggttgtatattttttgaattacttttagggtatcctccattccatgcagaaacaccagatgctgtttttaagaaaattttatcgggagtcattcaatggccagagtttaaaaatgaagaagaagagcgagaattcctaacaccagaggcaaaagatttgatagaaaaattgttggttgtggatcctgcgaaaagactgggtgcgaaaggaattcaagaaattaaagatcacccttatttcaagaatgtggattgggatcatgtttatgatgaggaagcttcttttgtccctacaatagacaatccagaagatactgattattttgacctaaggggtgcagagctccaagattttggagacgatatcgaaaacgataatgccaatattttgtttggtaaacatggcattaacaccgatgtttctgaattatctgcagctaatctctctccaccattgaatcataaaaatattttatcccgtaaactatcgatgagtaataccactaataggagctcaaataattccaacagtagcgtgcatgactttggtgcacatactccggttaataaattaagtattgcttctgtattagagtcggtacctcaagaaataggatatattacaccaaacgggaccggtacaactactacaagtgccaaaaactcacccaatctgaagaatttgtcactggctatacctccacatatgagggatcgcagatcaagtaaattgaatgattcacaaacggaatttggttcttttaatttcaggaatttatcggctcttgataaagctaataaagatgctataaatagactgaaaagtgaacatttttctgaacaacctggagttcacagaagaacctcttctgcgtcactaatggggtcatcctcagatggatcagtgtcaactccagggagtaacgcttcaaacactacatctggtggcaagttgaaaatacataagcctaccatatccggttctccttcaacatttggcacatttcccaaaacatttttgaggtctgattcattctccacaagatcatattctcctgaacgaagtattagtatcgactcgtcaacattgtcaaggaagggtagtataatcggggataaccaacaaacgacagcaaatagctcggattcacctacgatgactaaattcaagtcgccactatcacctgctaataccaccaccgtgagctcatatttttcaagacagagggttctatcaaagagtttttcgcaacggaccaattccagtgatctctcggcagaggaaagcgaccgactacaggctatatcaagagttaactctttaagaaacaggaggcgtagtggccgaaagagctcgagcacttctgagattggataccacatggatgttcttgtttgtgagcctataccgattcatagatatcgggttactaaagacttagaaaatttgggctgtaccgtcgtcagtgttggtgccggtgatgaactagttagtagagccactagtggtgtaagttttgacttaattatgacagccttgaagcttccaaaacttggtgctattgacattgttcaactactaaagccaacaaatggtgctaattcgacaacacca

SEQ ID NO: 82014 - DNA, 603 bp, Saccharomyces pastorianus
atgcacgttttctttcctttgcttttccgcccttcccctgttctgttcatcgcatgtgcatatatatatatagatatatatatacattgtacacggtgcacggtagtgaacataactatgagcacgaacagagtcccgaacctcgacccggacttgaatttaaacaaagaaatctgggacctgtactcgagcgcccagaaaatattgcccgattctaaccgtattttgaacctttcttggcgtttgcataaccgcacgtctttccatcgaattaaccgcataatgcaacattctaactctattatggacttctccgcctcgccctttgccagcggcgtgaacgccgctggcccaggcaacaacgacctcgatgacaccgatactgataaccagcaattcttcctttcagacatgaacctcaacggatcttctgtttttgaaaatgtgtttgacgacgatgacgatgatgatgacgtggagacgcactccattgtgcactcagacctgctcaacgacatggacagtgcttcccagcgcgcttcacataatgcttctggtttccctaattttcttggacacttcctgctcgtcctccttcgatga

SEQ ID NO: 82015 - DNA, 780 bp, Saccharomyces pastorianus
atgtgtttgacgacgatgacgatgatgatgacgtggagacgcactccattgtgcactcagacctgctcaacgacatggacagtgcttcccagcgcgcttcacataatgcttctggtttccctaattttcttggacacttcctgctcgtcctccttcgatgaccactttattttcaccaataacttaccatttttaaataataatagcattaataataatcatagtcataatagtagtcataataataacagtcccagcatcgccaataatacaaacgcaaacacaaacacaaacacaagtgcaagtgcaagtacagacaccaatagtcctttactgagaagaaacccctccccatctatagtgaagcctggctcgcgaagaaattcctccgtgaggaagaaaaaacctgctttaaagaagatcaagtcttctacttctgtgcaatcttcggctactccgccttcgaacacctcatccaatccggatataaaatgctccaactgcacaacctccaccactccgctgtggaggaaggaccccaagggtcttcccctgtgcaatgcttgcggcctcttcctcaagctccacggtgtcacaaggcctctgtcgttgaagactgacatcattaagaagagacagaggtcgtctaccaagataaacaacaatataacgcccctccatcgtcgtctctcaatccgggaccagcagggaaaaagaaaaactatacagcaagtgtgcagcgtccaagaggaagactcactgaacattgtcgcacctttg

SEQ ID NO: 82016 - DNA, 372 bp, Saccharomyces pastorianus
  modified_base (229)..(265): a, c, g, t, unknown, or other
atggtttctacccctgaactgaagaaatatatggacaagaagatattgctgaatataaatggatctaggaaagtggcaggaattttgcgaggctacgatattttcttaaacgtcgttcttgatgacgcaatggagataaatggtgaagaccctgccaataaccacccgctaggcttgcagaccgtcattaggggcaactccataatatccctagaggctctagatgccnnnnnnnnnnnnnnnnnnnnnnnnnnnnnnnnnnnnncctctatgtactatacagcaatactattttctaatttgcatttccacgcctgcgttgctaaacccacatttttcatagaatttgacatttttctcatcgcaatctaa

SEQ ID NO: 82017 - DNA, 450 bp, Saccharomyces pastorianus
atgcttgcgtatacctttccttctttcaatttctacgtcaatgggtttttttccttccttttccttttccttttcccctctttactacgtttctatgttattttgtgccgccccctgcaagttgcaacatatccccttaacagatgccagcaatattctagtcttgctatttttaccgcctctggcttttggcttctagtccttgtcccaagagccaagggcccgtcaacacgtcgtcattgctaccgccagctggcacccacacgtcaccgaccctttttttccattttcggctgggccgttagtgggatccgcccgctcccggagattttcacttggatttgcgcgtcccctttttttcttcattctctgaccccccctaccttctcccacttttctgtgtatcaagaggaaaagaaggagaaaaggagaactccgaaaaatacctaa

SEQ ID NO: 82018 - DNA, 228 bp, Saccharomyces pastorianus
atgatgggttttttatcttttaattgctttctatgtagtataatggaccgatctttgcaagtatatatctgtatgtatccatatttagatggcagcaagcaatatagatttgatgagcttatatcattttatcgtccttgcccaaaaagtcttgataacattaaaagtcaccaccgtcaaatccatcatcaaatccgccgtcgaacccaccagcatcatcacccgtaa

SEQ ID NO: 82019 - DNA, 354 bp, Saccharomyces pastorianus
atggctcaaagtaaaagtaatcctcctcaagtgccttctggctggaaggctgtttttgatgatgaataccagacttggtattatgtagatttatctacgaacagctctcagtgggaaccaccaaggggaacaacatggccaagacccaaaggtcctccaccaggtgttaacaatgagaagagttctcgtcaacaggcagaccaggctcctccaccttattcttctcaatcaacaccgcaagtgcaagcacgggcccaagcacagcaacctcgttactatcagcctcaacagcctcagtaccctcaataccctcaacagcagcgttctatccgcacaagccctatgcagcagcag

SEQ ID NO: 82020 - DNA, 2364 bp, Saccharomyces pastorianus
atggggtcgtttcccttagctgagtttccattacgtgatattcctgttccttatagctaccgtgtgtctggcggtatagcttcctcaggtagtgttactgcgcttgttactgccgctggcactcatcgaaactcgtccacggctaagacagttgagacagaagacggcgaagaagatatcgatgagtatcagaggaaaagagcagctggttctggcgaatccactcctgaacgcagtgatttcaaaagggtaaaacatgataatcacaaaaccctccatccagttaacttacagaacaccggtgcagcgtctgtggataatgacggtctgcacaatttaacagatatatccaacgatgcagaaaaacttttgatgtctgtggatgatggttctgccgcaccttctacattgagtgtaaacatgggagtggcatctcataatgttgctgctcccactaccgtcaatgcggcaacaataactggcagtgatgttagtaacaatgttaatagtgctaccattaacaatcctatggaggaaggagcgctgccgttatcacccactgcttcctctccaggtaccacaactcctttagctaaaactacgaaaactatcaacaacaataataatatcgccgatttgatagaatccaaagattctataatctcccctgaatacctttctgatgagattttcaccgcaataaacaataatctccctcacgcatacttcaaaaatttattatttagattagttgccaacatggataggagtgaactatccgacttggggactttaatcaaggataatttaaagagggacctaataacgtctttgccttttgaaataagtttgaaaattttcaattatttgcaattcgaggatattataaattcccttggggtctcccaaaattggaacaaaataattagaaaatctacatcgttgtggaaaaaacttctgatatcggaaaattttgtgagcccaaagggttttaattctctcaatctcaaactctcccaaaaatacccaaaactctcacaacaagatcgccttagattatcttttctggagaatatattcattttaaaaaattggtacaatcccaagtttgtaccacaaaggaccacgttaagaggccatatgacgagtgttattacgtgcttgcaatttgaagataattatgtcattacgggggctgatgacaaaatgatcagagtttatgattcgataaacaagaaatttcttctacaactatcaggtcatgatggtggggtttgggcattgaagtatgcccatggcggtattttagtcagcggttctacagacagaacggtgcgagtttgggatattaagaaaggttgttgtacccatgtgtttaaaggtcataactctacggtgaggtgcctagatatagtagaatataaaaatatcaagtacattgttactggttcgagagataacactttgcacgtttggaaattgcccaaggagtcctccgttcctgatcatggggaagaacatgattatccattagtctttcatacccctgaggagaacccatattttgttggtgttttaagaggacatatggcatctgtaagaactgtctcaggccacggtaatattgtcgttagtggctcctatgataatacactgattgtgtgggatgttgcgcaaatgaaatgtttgtatattttaagtggacatacggatcgtatttattcgacaatctacgatcatgaaagaaaaaggtgcatctctgccagtatggataccactattagaatttgggatttggaaaatatatggaataatggagaatgttcctacgcaacaaattcagcatcgccatgcgccaaaatacttggtgctatgtacactttgcagggtcatacagctttggtcggtttattaagattatccgacaaatttttggtcagtgccgctgcagatggttcaataaggggttgggacgcaaacgactactctagaaaattttcctaccatcataccaatttgagtgcaattaccacattttatgtatcggataatattttggtgagtggatcggaaaatcagttcaacatctataatctacggagtgggaaattggtccacgcaaatattctaaaagatgctgatcagatttggtcggttaattttaagggcaaaacacttgttgcagcagttgaaaaagatgggcagagctttttagaaattctggatttcagcaaagcttcaaaaattaactacgttagcaatcccgtaaactcctcgtccgtcgtctttggaatccatttctacttctttgggtctaacgaggacaactataataccatgaccttcccagagaacaagcattga

SEQ ID NO: 82021 - DNA, 6432 bp, Saccharomyces pastorianus
atgaccgctaacaatgacgatgatatcaaatcacccattcccattactaacaagaccttatcccaattgaagcgctttgagagaagtccaggaaggcccagttcttctcagggcgagataaaacgtaaaaagtctaggctatatgccgcagacggaagaccacattctccgctaagagcaaggtctgctaccccaacgctacaggaccaaaaactgttcaatggcatggattccacttcccttttgaatgaaaggctacagcattatacgctggattatgttagtgacagggcccggcatatgaagaatatatatgacccatcatctcgctggttcagcagatcagtgaggcctgaatttcctattgaagagttcttaccatataagactgaaagtcatgaagatcaagcgaaatacttgtgccatgtcttagttaatctttatattgcgatcagctcattagatatacaaggtttgatttctatttccagtaaagatctggctgatttaaagaaagaagtggatgatttagctcttaaaaccgatcttttcaggttatctaacaacacagcggagaatgacttacttggtaacgatattgctgattatgacgatgcggaaggcctggaggacgaattggatgaatacttcgacttagcaggccccgactttaatgctaccggaaaaatcacagctaaatcagctactattgtgaatgtaaaccattggactaatgagctcaaaaattgtctacattttgattttccagtagctctaagaaagtcgctagcgatagtttattattatttgtctcttgttcagggccaaaaggtgtatagacaaatgcatgtcgatatgttcgaaagattagtaagccttgacgatgataggacaaatttcactgaactgttgcaaaaacaaggtcttttgctagatcatcaaatcatgctcaatttcctgtgcgaatttctaccttatccagatcccgactatgctcgttatgaattatcatcaaaggaagatttacagttatttagattacttttgaagcatgcacataatgcaaaaccatttttcgataagtcaaaggaaagtttgttagttgatacgatgaattttctgttgtctagtcttgcaccatctactatgatggctgtcatgcctatcgttacatccgttgtgccctatcattatcatatccattctaagatcatcgattatttcccgttttgctatagcatctggagctcagtcagcgcaaacgtggccatcgacactcacatgtatgattttgttgggtcaatttccaaagacgttcataataagattttgagtagcgagcatgaaaaggatgtagttggagtggagtttggagaattcgggatttttactgatgatcaaatgacttttatgttcaataggttacaaggccatcttagaacagacggtcaaatacattcgtattcccgcacagtgaagccttttgtttatgctataaacggatcaaaaaaagataggttttttgaaaaacttgtaagtttagccaaagcaatcgaaacatttatccatccctctaataatgggttttggaccaagccaaatgctaaattcgttcatgcatttataaagtcttaccacggaagggtcaaatatgaagaagatatttgtgctaggggcgtcacaaatgggatatgtttaacttctttttgtcacgaagagatagttgaaatattcttaaatattatcagtctgggttcacagaataaaaatcctgatattgcgaactattacatctcttgtttcgcatatctgttagagctggatccttcaaatgcatatttaatttatgacaaaatactgatagatttgtacgatacgctggctgaccaatttatcaattcgagacacagaatcatttcctctttgaaacaatttacaagagtaattcggtttattgtgatggataagctatatcgcgtgcacataacaaacgtcctttcgatgctggtctccaaacttgatatgaacgatactaatttgacaagcaacctcatcaacggtattgtatctatagccgctttcattcctatccaagacctcactggggaggacgattatatatcgtttgaatcggatactcttcctttagttcaacaacatttttatcatattaagtgtggcgaaaattcaaagaccttccgagttgatgatgaactgttaaataacgctttcaaagcttccactacagtttttcaaagtatgctaaaagtatacgtagaaaaaattttccaattggttgatgtagacttagaggactctttggttactaaaataaaccaaacaactatgattttacaagagtctatggacgataaaatatttaattattttgcttctttattacagagaaacttctggagtaatgactccttcaaggaaaaggatccaaactatgaattagttactatcccactagcggctttagtaagaaggaataatggtttgagtaaagagttggtcagaactcttttattccatatcaaagaacaaatcaaaagaggcgccgggtctgtaagaagtacttcagagattcaacagagggatgttaagttagttttatacttaactgcactaaatgatgtcttaaggcaatgtcatgaatctctattggagtatagcgatgagttgataacattcatgaaatatttatacgacaacgtcactaacccgccattggatgttatcacatctattgttattcacagtgctttagcaactctatgtacaaccgaaataactgattgtcgtctattcccagaggactctaagattccggaaaaagacagatggggaggactacagttcgatcctcgaagatttgataaacagcatttgagttttcagtggcacgtaccttctagtgacgagataactttatccataagcattctagaaagcctttccgaatactgtattaacaacgtagaagaactgatgaaagctccaagacatgattccgaatatggcgatatgatacaaaaatatgttttagttatgacacatacgctttccgggtcaagtttactttttgatccagattttaacaaatataggacgcaatcaaacttatcatacagagagaaactgattttattaaagaatatacgcgaaaataattgtgaccctcaagaactggatattgatattgaacaaattcgttctggcaaggatgatgaagactatattgagagtaaggacattgaagcagggctgaatgcaggagtttccgatgttgtgcagttaagagatgagtttccggatgaattaattgttgatgaagaagtagtgtctgagatgccatctggtgtaaatacccctatcgcggggacgcatggcacggacaattcagctatgagttcggatctagctttcagggatttagatatttacacctgtaattattacttcggaaataccactgaggagaagttacaaaacccacaatatttacaagtccacagagttagagcgcgcattggacatttctttcacaaactctatgtttttttatctacaaacttcgaaaacaacaccaacatgttccaaattctattgcacggattaaaagtttggttcacagatctgggacaagaaacagtcttcaatgaagacccaaatgccttcattgacgttgatttcctagaaaacgttcaatctctctcacacgtaaatgagcccttcacgagaaccaattttgcaatcagagcaaacagtttgcaccagagtagagttctattacattcaacaaatagaaaagcttccaagctggaaaacctattgttagttgacatcatacagttagcgacatccctttatcctgatatttataaaccagcacagggaactttggtacactgtatgaaacaattagttgggtcatatggcgtagtcatcaataaaattattccatcattagagaaagcgattaaggatcatgattatatgaaaatccaagttattttaaatgttttgttaattaagaaaatccataggaagcttatgacggattataaagacatcggcagattgatatttctgcttattgaatgttgtcgtgtgaatgaattagagattggtatgtatgcagataaaatcttaactgacatagtgattgggatcaagattccttctagtgtatgtgtcatttccgatcaagctttcttacctttagcacctcctgatggtactattaatttgcaagttgaagcggtaaagcttgccaaaaagaaaaagcgtgagtactacctctctctgttagtggatttgcaggacaaacttttagacaaattagataatgaaaaagatatggggtggaagataagaatgttcattttacgttttgttacacaaatccaatcgaacctcgaaagcaaacccgataaaagagcagtattttcaataatctcccaaatctccacaaaacatcccgaaatcatacatttggttgtaaagtcattgttgtcgacgtgcaacaagataatatctctctctgactatgaatatgacatcaccagggcctataagaatgaattcaatccatcatttgtggaaatactggacacttcgaccacaagcttccctaaaacgtttactgaagaaatgaataactttgataaccccaagtattttatcgattcgagggcgtatgtagggtggctatgttggggaaggcttatgtacgtcatgtcgccgaaagctttaaagctcaatttacgtgagaatgaactggaagtcctcaagacagctggtcatctattgacaagagaattcctgagagatgttacaatgaatttagtccaagataatgaaactaggggtgtttttagtagtggtaacgtgtcatttttctctttagtaatccttttgatatcatctggtttctgcgaactgaatatgtcggatctctttgagctatgtgaatcctactataacaaagacgataaggcttcgatgatcatgtctgtcgagatagtggctggcttagtttgcgggagtaagtttatgtcagtctctgacttggacaaacgtgacgcttttatcgaaaacttcctagccaaatgtttagattatgagttgaaccatgacgcatttgaaatttggagcaccttggcatggtggttgcctgcagtcgttgatttaagaaggtctaaaacttttttttgccattttatcaacgccgatggcatgtttgaccgtgaatctgatgcagccacacatcaaacctccaaaatttacatgctaagaagtatcttgatgagcatggaatttagagccccagatgttggtaagctatttgatgagttggtatttgatcacccatacgatcaggttcgccaggctgtcgctaaactattgacgaccttagttcaaaatcaaagtaatccgtcaatttcagatccaaccacattattagaagcagaacggaatgatccagatggattagggttaccattaaaaagcgtcccagaaaaggtggatgcctatattaagaagcagtttgagatcattaaaaatctggaatattccgttgtcggcttgaatcctcaacaatttattaagacagactatttttacaggacatccacaatattttactggatcaaagaaatggcgagagggcctaataaagttttgttagttccatatttagtcgattatgttttaccatttctgatcggattagtgaaacataaagatgtttgtgctcttgccaatttagatcctgttcgattgtatgccggcttgggctatatgccgatcagaaagaaccatgttgccgccattgttgactatgtttgttcgtcaaatgtagcactatcttcaaaccaaacgaaactacagctagctttcatccaacactttttatcagcggaactgcttcaacttactgaggaagaaaagaacaaaattttggaatttgttgtcagcaatttgtataacgaacagtttgtagaggtgagagttcgtgcggcatccattttgtctgatatcgtccataactggaaagaggaacagccgttgttgagtttaatcgagagatttgcaaagggtctcgacgtcaacaaatacacgtcgaaagaaagacaaaagttatccaaaacggatatcaagattcatggtaacgttttggggttgggagctattatatcagcgttcccctatgtttttcccctaccgccatggatacccaagcaactaagcaacttatcctcgtgggccaggactagtggtatgactggacaagctgccaaaaatactattagtgagttcaagaaggtgagggccgacacttggaagttcgatagagcatctttcaatacggaggaactggaagacctggagggtgtcctatggagaagttactatgcctga

SEQ ID NO: 82022 - DNA, 75 bp, Saccharomyces pastorianus
atgctgtttggagtgaagttggctaatgaggtttatcctccttggaagggttcttatatcaattatgagggcttg

SEQ ID NO: 82023 - DNA, 1659 bp, Saccharomyces pastorianus
atggagagattgtcccatctggagaaacaaacagatacggaagcagccataaaggccttggacgctgatgcattccaacgtgtattggaggaactgttaagcgagtctaccgaattagacaattttaagagattgaactttactgggtttgctaagattgttaagaaacatgacaagctatatccaaagtatccatctgttaaatctttgttggaggttagattaaaggaattgccttcccattcggaagaatattccccattgttgtatcgtatttcatttttgtacaacattttgagaagtaattttaacactgcatctgaacccttagccagcgcttctaagttttctagcattgtcagcaatgacatagacatgaatttcagaagctttaaattttgggttcataatgacaacttaatggaggtcaaaacaagaatcttgagacatcttcccgtgttggtctacgccaatgttccctccgaaaacgatgacctggtcaatagattcgaatcagatatatcaaataatgatgaaattgtgggtagttcgagctccactagtagcgtagaacatggcttgggagcgcgctccttcgatccattaatcaacacgctatattttgacaatgagcattttgaattatataacgacaagttattaaagttaaattcagcacctactttaagattaaggtggactggccagttatctgataagccggatattttcttggaaaagaaaactcttattgaagacgaagccactgggaagtctgaatttgatctaactaaattgcaattgaaacaaaaattcattaacgggtttattttcgaaggtgataagaaatttaaagaacaaactttgaaaaagttaaaagaaagtggtacggcagggagagacctggaaaggttagaagaagatttctctgagattcaaaactttattatcaagaatgaattgcaaccagtttttagaactgtttacaccagaactgctttccagattcccggcgatgacaagataagagtaaccattgactctaatattgtattcatcaaggaggattcattcgacagagagcgtccaattagagaccctaatacctggcatagaactgatattgatgccaatgttgcaaatcccttgaaattcctgagaggaggcgagtatgctaagtttccttattcagtaatggaaattaaagtgaaaagttcattggattcttcgatgtctgccagttctatgatttctaatgtaaaactgcctaaaaagcatggtcaatggctgaacgatttgacaaattctcatttggtcaaagaaattccaaagttttctatctttgtgcaaggtgtggcatcattgtatggagatgatgaaaaattagatatcttaccattttggttaccagatttggaaacagatattagacaggatcctaagcaagcatatgaggaggaaaagaaaaaactgttgaaacaaaaagagatacaaaagaaaattgatggaatgagaaggctttccaacttaaaagagcctcaacatcaagcagcagtaccggtatctcacgaggaaaatgagcgtattacctctcaaggtgatttggaggcagacggttcatccgatgaggaaactgagcaagaaactcatccgaaaaga

SEQ ID NO: 82024 - DNA, 1809 bp, Saccharomyces pastorianus
atgctggagacgttgcgcggaaataagctgcattctggcacctcaaaaggcgccaacaaaaagttgaatgaactcttggaatcgtccgacaatctaccatcagcatcctctgaattaggttcaattcaagtaagcattaatgaattgagaagacgtgtttttcaattgagaagcaagaacaaagctagcaaggactatactaaagcccactatttattggctaacagtggcctaagctttgaagatgttgatgctttcatcaaagacttgcagacgaatcaatttttggaaccaaatccaccaaaaataattgaaagtgaggaattagaattctatataagaactaaaaaggaagaaaacattttgatgtctatcgaacagcttttaaatggcgctacaaaagattttgataatattattaatcataacttaaatctcgattgggctcagcataaaaatgaagtcatgaaaaattttggcatccttatacaagataagaaaactgtagatcacaaaaaatccatcagttctctagaccctaagcttccaagctggggtaataagggcaataacattttaaatagcaacgaatccagattgaatgtcaacgaaaataatatccttagggaaaagtttgaaaattatgccagaattgtgtttcaatttaacaatagtagacaagcaaatggaaattttgatatagccaacgaattcatctcaatattatcttctgcgaacggaacaagaaacgctcaattgctagagagctggaagattctcgaatcgatgaaaagtaaggatattaatattgttgaagtcgggaaacagtacctggagcaacagtttttacaatataccgacaatttatataagaaaaacatgaatgaaggattggccacaaatgtcaataaaatcaagtcattcattgatacgaagttgaagaaagcagacaaatcatggaagatttctaatttaactgttatcaatggtgttccaatatgggccttaatattttatcttttaagagcaggtctaatcaaggaagcattgcaagttctagtggagaataaggcgaatatcaaaaaagtagaacaatcattccttacttatttcaaagcatatgcttcttcaaaggaccacggcctaccagtggaatattccaccaagcttcatacagaatacaaccaacacataaaaagttcactagatggtgatccttatcgtctagctgtctacaagttgatcggaagatgcgacttgagtagaaagaacattcctgcagttactttaagcattgaagattggttgtggatgcatctcatgttgatcaaagaaaaggacgcggagaatgatcctgtttatgaaagatattccttagaagacttccagaatataataatatcgtatggaccatctcgcttctcaaactattacttacagacccttttgttaagtgggctctatggattggctattgactatacttatacatttagtgaaatggatgcggtgcatttggcaatagggctagcaagcttgaagctatttaagattgatagctcaacgcgcttgaccaaaaaacccaaaagggatatcaggttcgcaaacatactagctaattataccaagtcctttaggtattcagatcctagagttgctgtcgaatatttggttttaataactctaaatgaaggacctaccgatgtcgagttatgccatgaggcgttgagggagctagtattggaaactaaggaatttactgttcttttgggtaaaatgacgcgtatggagctagaattccgggggtga

SEQ ID NO: 82025 - DNA, 270 bp, Saccharomyces pastorianus
atgagtgtggaagaggttcccgcagttttgcagcttcgagcaactcaagatcctccaagaagccaggaggcaatgcctacaaggcacaatgtaagatgggaagaaaatgtgattgacaatgaaaacatgaataaaaaaaagaccaagatatgctgcatttttcatccacaaaatgaggatgaagaagagtgcaaccatcattcagatgatgatggatcctcttcttccggatcctcttcttcagaatctgagaatgagaaggatcttgac

SEQ ID NO: 82026 - DNA, 1395 bp, Saccharomyces pastorianus
atggaggttgataacaaaaggagacattcagaagatgagttaaaacaggaggcagtaaaaaagataaagtctcaggaaccaaactatgcctatcttgagactgtagtaagagaaaaactagatttcgattctgagaaaatttgctgcattactctgtcccctttgaatgtatattgttgcctcgtgtgtggaaattattatcaggggagacatgaaaagagtcctgctttcatacattcaattgatgaaaaccatcacgtcttcttgaatttgacaagtttgaagttttacatgttgccgcaaaatgtccaaattttacatgacggtgaggttcaattgttgaacagcataaaatttgcagcttatccgacttattgtccaaaagatctagaagattttccgagacagtgttttgatttgagcaatcgcacatatctgaatggatttatagggttcaccaatgcggcaacttatgactatgcgcatagtgtattgcttttgatatcgcacatggttccagtgcgggaccacttcctattgaatcattttgataatcaaggggaatttatcaaaaggttatccatatgtgtaaagaaaatttggtcccctaaactattcaaacatcatctttccgttgacgattttttatcctatttgaaagttagagaaggtttaaatttaaatcctatagacccacgtctcttccttttgtggctattcaataaaatttgcttgtcctcgaacgaattaaagtcaattttaaaccattcttgtaaaggcaaagtaaagatagcaaaagttgaaagtaagcctgaggccagtgagtctgttacaggcaaagtcattgtcaaaccattttgggttctgactctcgatttgccggaattttcaccctttgaagatggcaacagcgttgatgatctcccacaaataaatatcactaaattattgactaaatttactaagtcaagaagctcctctactagcaccgtttttgaactaacgcgattaccgcagtttttaatattccatttcaataggtttgaccgtaacagtgatcatcctgtcaaaaatagaaaccaaacgttggtggaattttccagtgaacttgaaattttgcacgtcaagtatcgcttaaaagcaaatgtggtccatgtggtcattaaacaaccatccacagatggaaacgcatttaatggtgatgaaaaaagccattggattactcagctgtatgataacaaaagtgaaaaatggatagaaatagatggcataaatacgacagagagagaagccgagcttttattttctgaaggaaacgtttatacaagtatgggaaaagcaagagtgaaagaaaagaaagtaaaaaaaaaaaattggcactgggactaccagtag

SEQ ID NO: 82027 - DNA, 690 bp, Saccharomyces pastorianus
atgggaatgaagtacgtattgcctttgcgactaattggtctagcgtacctgttgatgctatttcgggtgcatagggtaactgggtgggagttgtcatatgagcagtaccatgcagcgcatctgaacgaagctatcaacctagacagcggttggaacaaaagtaccaagaacctgctgttgccttttaacagaacgcgcgtacccggatcggaaggctcgcgcgagatccagcgcttcatcatcgagcacttcaacaatacgctggcgggagaatgggccgttgagacgcaagcctttgaggagaacggttaccgcttcaataaccttgttatgacattacaaaacaatgcgagcgagtacttagtgctcgctgctcattatgataccaagatagcgcccacggggatggtgggcgctatcgacagtgccgcctcgtgtgccgcgctgctatatacggcccagttcctaacgcacatcgcgtgccacgagcgcacgaaagagtacaatgacttagagtcgaacactgtagtatcgaattctaccttgggtgtaaagatcgtattctttgatggagaggaggccattgaagagtggggccccgaggactcgatttatggagcacgccgattagccgcccaatggcttgctgacggcacgatgacaagattcgcctattatttcttctggatc

SEQ ID NO: 82028 - DNA, 1350 bp, Saccharomyces pastorianus
atggaagaattaaattacacgaaggttaatggtaaagaaattaggattatgccatcattgaggaatacaacgtttagaaagaatttcggcactaatgtctttttctctaatctacctctaaataatccattattaacaacaagagtattctatgatacgttttctagatatggtaaaattctatcatgcaaattagactctaggaaagatataggatttgtttactttgaggacgaaaaaactgcaagaaatgtgatcaaaatgtacaataataccagtttttttggtaagaaaattctatgtggaatacattttgataaagaggtcagaagtgttccaaattttgaaacacaaaaatcacgattagatgcggaaacaattattgaaaaagagcaatctttgaatgagaaacactccaaggggaatgataaggaatctaaaaatatttactcttcatcccaaaattctatattcatcaaaaaccttccaacaataactacaagggatgatattttaaatttcttcagtgaagtgggtccaattaagtcaatttatctatccaatgccactaaagttaaatatctttgggcatttgttacatataaaaatagcagtgactcagaaaaggcaattaaacgctacaataatttttatttcagaggtaaaaagcttttagtaaccagggcacaggataaagaagaaagagccaaatttatagaatctcaaaaaatatctacacttttcctggaaaatttaagcgctgtctgcaataaggaatttcttaaatatttatgtcaccaagaaaatattagaccgttcaagattcagatagatggatatgacgaaaattcttctacatattctgggttcatcaaattcaggaattttgaagatgctacgagaatatttaactttttgaataaccgtttagtaggaggaagcatcgtcacgacatcttgggaaagacaaaataatgcacctaaatatcatgatggttatggaatgcgcaatatacacacctcttctcatccacaaattaccccatattaccagtactcacatgcgaatagtttgaactccccacacatgagagatctttcgtcaatgaatagcagcacaagatcactaataaagaataaaaatttcaataagaaagttttggaaacattcgaaaagcaagtaagaagaggtatagatttcatgagatttccaagtgccactagagacgaaaatgtgcacggaatagctgagtatatattcgacacttattggaatcgcgatgtgttaatattggacaaatttttatcgttgctaaatagtagtccatatcatgaaggtgtattgcaataa

SEQ ID NO: 82029 - DNA, 108 bp, Saccharomyces pastorianus
atggttcccctgaatattttgaacgaccaggatttgacagtacaaaaagatcacgagaagaaactctcattcacccccgttagttctcctattaggccagacgactac

SEQ ID NO: 82030 - DNA, 519 bp, Saccharomyces pastorianus
atggcaggtgctggtgccggtgggatggttggtatagaattgactgattttgttttcattttaaatactcaggatgctgttaagtcgttttctgaatttgggaccatcacgctgggtggtaacgtctccgtttctgctgggcctcttggtagaagtgcagaagcagctgcatcagcctccgccggtggtgtggctgcagtttttgcctattctaagagtaaaggtctatttgcaggggtttctgtggaaggttcggctattatagaaagaagagaggctaacagaaaattttatggtgacaattgtaccgcgaaaatgattttgtctggtaggataagaccgcctccagcagttgatccattgtttcgtgttttagagtccagggcgtttaattacagaccctccaacggtggtcgtggcagtttcgatgacgacgaagacgattactatgacgacgacgattactataatgacattcctagttcattcagttctacagatgcttcctccactagacct

SEQ ID NO: 82031 - DNA, 387 bp, Saccharomyces pastorianus
atgacgccctatgcagtagcaattaccgtggccttactaattgtaacagtgagcgcactccaggtcaacaattcatgtgtcgcttttccgccatcaaatctcagaggcaaaaatggagacggtactaatgaacagtatgcaactgcactactttctattccctggaatggacctcctgagtcattgagggatattaatcttattgaactcgaaccgcaagttgcactctatttgctcgaaaattatattaaccattactacaacaccacgagagacaataagtgccctaataaccactacctaatggggggggggcagttgagtagctcatcaagggcaatcaaggttccaatcttgccggtttcatacatgttgataagccaatga

SEQ ID NO: 82032 - DNA, 1905 bp, Saccharomyces pastorianus
  modified_base (1651)..(1717): a, c, g, t, unknown, or other
atgcgtaggagtgtatacctcgacaacacgatcgagttcctgcgaggcagagtatatctcggtgcatatgattacacgccggaagatactgatgagctggtgttttttaccgtggaggacgcaatcttttacaacagtttccatttggatttcggtcccatgaacattggacatctatatcgttttgccgttattttccatgaaatcttgaatgacccagaaaatgccaataaagccgttgttttctattcatctgcatcgaccagacaacgtgctaacgccgcatgtatgctttgctgttatatgatcctcgttcaggcatggactccgcatcaagtgcttcagccgttggcgcaagtagaccctcccttcatgccatttagagatgccggttattctaatgcggatttcgaaatcacaattcaagatgtggtttatggcgtttggagggctaaggaaaaaggccttattgatttgcattccttcaatttggagagttacgagaaatacgaacacgtggagtttggagacttcaatgtactcaccccagattttattgcatttgcgtcaccacaagaggaccatccaaagggctatctcgctaccaaatcttcacatttgaaccagccgtttaagtcagttctgaattttttcgccaacaataacgtccaattagtggtaaggttgaattctcatttatataataaaaagcattttgaagacattggcattcaacatttggatctaattttcgaagatggtacatgtcctgatctttccattgtaaaaaactttgttggtgctgctgaaacgataattaaaaggggaggtaaaattgctgtgcactgtaaggctgggctaggtagaactggttgtttaattggtgctcacttaatatacacgtatggatttaccgctaacgagtgtattggcttcttaaggtttataaggccgggaatggtcgttggccctcaacagcattggttatatttacaccagaatgattttagagaatggaagtacacaaccagaatttctttgaagcctagtgaggccattggcggcttatatcccttaataagtttagaagaataccgcttacaaaaaaagaaacttaaagacgacaagagggttgcgcaaaataacattgaaggtgaattaagagatttaaccatgacgccgccatccaacggtcatggggcgcttagtgccagaaattcgagccaaccttctacggcgaataatggaagtaattcattcaagagctcagccgtcccacagacttcgcctggtcagccgagaaagggccaaaacggttctaatactatagaagatatcaacaataatcgtaatccaacttcccatgcgaataggaaggtagtaatagaaagcaacaactcggatgacgaatccatgcaggataccaacggcacaagtaatcattatcccaaagtttcgcgcaagaaaaatgatatctcctctgcttcatcgtcccgaatggaagataacgaacccagcgcaacgaacatcaataatgccgcagatgataccatactaagacaactattgcccaagaataggagagtaacgtcagggagaaggactacaagcgccgccggtggtataagaaaaataagtggcaccatcaagnnnnnnnnnnnnnnnnnnnnnnnnnnnnnnnnnnnnnnnnnnnnnnnnnnnnnnnnnnnnnnnnnnnccttgaaaagttttatgccatttttccagtgtcccttctcgctgtcttttcgaaagagtcatatgtataccggcaatagtaacttgcctgatttatgcataatgccgttgtatttgctagccagttttccaccgctgtctgtgggttgcgaccatgctacctggtacctaggaataacttcaccgtaa

SEQ ID NO: 82033 - DNA, 1926 bp, Saccharomyces pastorianus
atgagcagatgctcaaacgcggcgctgatgactgttgttgaggatgctgttggggccagggtggctgcaaggacgagaaacatgagcaatggcgtcaattaccgggagaaggaagtcaatgacctaacggctgacatctcggattcggattcagatttggattcagaggacaataaacatggcaaaggtgacaatgacactgccccgatatggttacaagatgatgtgcattcagacgaagatattcagctggactcagaggacgattccgatacagaagctgttcaagcccaagtggtggataaattggcaaaagacacgaaatcagagcaaaaatccttggatgatgagctctccgagatggataccaagacggtctctttaaaacttaagaaactaaacgagtttgtgaggcagagtcaagtatattccagtataatcgccgatactttactacaacgatctaatgaagtggctaacgctaatacaaaagataacagcaactctaatgatgaagaacattcttcaaaaaaacgtaaaacaaaaaaaaaatcaataacagatttcttcagaaaacagaaaaagaacgaagatacaaccacccaaaacggcgcaccagacgatgcagcaataaagcaacctcgcctattgaaaaactgtattttaaaaccttaccaactagaaggtcttaactggctgatcactctttatgaaaatggcctgaacggaattcttgccgatgaaatgggccttggtaagactgttcaaagtattgctcttttggcgttcatatatgaaatggacacaaagggtccctttctagtgactgcaccattaagcaccctagataattggatgaacgaatttgcaaaattcgctcctgatctaccagttctaaaatattatgggaccaatggttataaggaacgttctgccaagttgaaaaatttctttaaacaacacggcggcacggggatcgtcatcacatcatatgaaattattttaagagataccgacttaatcatgagtcaaaattggaaatttttaattgttgatgaaggccaccgtctgaaaaatataaattgtagattgattaaagagttaaaaaaaatcaatacttccaatagactgctactaacagggacgcctttacaaaataacctagctgaattatggtcacttttgaatttcataatgcccgatatctttgctgatttcgagatattcaataaatggtttgacttcgatagcttaaatttaggctccggttccaactctgaagcattgaataagttaatcaacgatgaactacagaaaaatttgatttccaatttacacacaattctgaaaccattccttttgagaagattgaaaaaagttgttttggctaatattctgccgccaaagagagaatatatcataaattgtccgatgacgtctgcacaggaaaaattctataaggctggattgaatggaaagttgaaaaaaaccatgttcaaagaattaatcaaagattttttcacattgaacgatgaatatatcggccacgtttctaatcggtccatacgagatttcatcaattataaactatctggtaatgaaacttcaaatacggacaatagaatcaatccaaccttgttgcaaatggacaaactatataagaagaacctgcaaatggaaatttcaaataagaaattgcaaaatataatgatgcaattaagacaaatcattgactcaacttttttgttttatttcccatatttacacccagaagacttgactttggaaactcttttaaagacgtctgggaaattacaaatcttacaaaaattaatccccccattaatatctgaggggcacaaagtgcttatttattctcagtttgttaacatgctcgacttgatccctatagtgagtcgtattatg

SEQ ID NO: 82034 - DNA, 672 bp, Saccharomyces pastorianus
atgctcgacttgatcgaagattggtgtgatttaaattcgttcgcgacatttcgaattgatggttcagtaaacaacgaaacaagaaaggatcaactcgagaagtttaatagctcgaaagataagcataacattttcctattgtccacaagggcggcaggactgggtattaatctagtcggggcagatacagttgtcttgtttgatagtgattggaatccacaggtggatttacaagccatggacaggtgtcaccgtattggccaagaatcaccggttatagtatataggttgtgttgtgataacaccattgaacatgttatattgaccagagcggccaataagcgaaatttggaaagaatggttatccaaatgggaaaattcaataacctgaaaaaattggcgttaaatgaaggttcttttttgaaggcaaacaaagcgggtgtcaatgtcactaataaggacttagtccaggagttatctatgcttttaatgagcgatgaatccagtataggctttgaaaatgggggacagaaagaaaataaggctactgagggccaactgactgataaggaggttgaagaattgaccaacagatctcttgaagcgtacaaggccaacagagtcgtagatctaccgcacgtcaagctatttgaaacaacctccggtctttaa

SEQ ID NO: 82035 - DNA, 1203 bp, Saccharomyces pastorianus
atgattgatcgtaccgagttatcgaagtttggtattactacgcaactgtctgttattggacgtaatccagatgaacaaagtggctttgttaatccacctttgtataaggggtcaaccatcattcttaaaaaacttagtgatttagaacaaaggaaaggaagattttacgggacagcaggttctccaactattgacaatttagaaaatgcctggacgcatttaaccggcggtgctgggacagtgctatcagcttctgggcttggttctatctctttggcgctattggccctttcgaaagctggtgatcatatcttgatgactgatagtgtctacgtgccaacacgtatgctatgtgatggtttattggccaagttcggtgttgaaacggattattatgacccatcaatagggaaggatatagaaaaactagttaagccaaatacaaccgtcattttcctcgaaagcccgggttctgggaccatggaagtacaggatattccagctttggtctctgttgccaaaaagcatgggataaagacaattctagacaacgcatgggcaacgccactcttttttgatgctcatgcgcatggtatcgatatttcggtagaagctgggacaaaatatttgggtggtcattcagatcttcttattggtctggcctccgcaaatgaagaatgttggccgctattacggtcaacttatgatgcaatggcaatgttaccaggtgccgaggactgtcaattagcattgcgaggaatgcgtacattgcacttaagattgaaagaggtagaaagaaaagccctggatttggctgcttggctcggaaatcgagatgaggttgaaaaagtgcttcaccccgcctttgaagattgtcccggacatgaatactgggttcgtgactacaaaggttcttcaggcttattttccattgtccttaaaaatgggttcacaagagctggtctggagaaaatggtagaagggatgaaagttttgcaattgggattttcatggggtggctacgactccttgattacccctgtaaatccttgtaataatagaaaagcttcaacatggccttacaaaggttttgcactaagaatacaagtgggtctcgaagaatttgaagatttaaaaagggattttgagttaggctttgaacgtctcgcagaagaaatttctttgaatcctttacaaatctga

SEQ ID NO: 82036 - DNA, 93 bp, Saccharomyces pastorianus
atgatatttggacctactagtgtctatagtaagtgctcggccaagtcaagcggtatcattaaagacgccgccagcttccaatatcacgagtaa

SEQ ID NO: 82037 - DNA, 231 bp, Saccharomyces pastorianus
atggtcaaattaacttcaatcgccgctggtgtcgctgccatcgctgctactgcttccgcaaccaccactctagctcaatctgacgaaagagtcaacttggttgaattgggtgtctacgtctctgatatcagagctcacttggcccaatactacatgttccaagccgcccacccaacggaaacctacccagttgaagttgctgaagccgttttcaactacggtggactctag

SEQ ID NO: 82038 - DNA, 138 bp, Saccharomyces pastorianus
atggagatgctcttgtttctgaacgaatcatacatctttcatagacttcgtatgtggagtattgttttatggcactcatgtgtattcgtatgcgcagaatgtgagaatgccaattataggggtgccgaggtgccttga

SEQ ID NO: 82039 - DNA, 318 bp, Saccharomyces pastorianus
atgagaattctaatggcatttgaaagacaaggaaagattgaaaagaagatatcgtattccttatttttgaatggacctaatgtacactttgggagcatcttattcggtgcagtcgataaaagtaagtacgcagaacagctctgcacacatcctatgcgtcaagcctacaatacccttgattcaaactcaagaataattatcacagcacagagtgttgcaattttggacggcaacttgtatggtaaaagtgttgtagatattcagtttccagtgctattagattccggtacatattctatttacctacaaaatttgtaa

SEQ ID NO: 82040 - DNA, 369 bp, Saccharomyces pastorianus
atgaaatttttgaagaacaaagcacctgctaatctggtggataacggcaggtttgtggaagcaataacgtgcaataaagttaaaccgaatccatcttgcgtctccaactgcctcaaatttctttccgaagttttagcggtagaagcaataactgattcggccagaaatttagctacggtttccaaatcggacatcctactattttctcttctacaattgagtagcaataaacagagcgggtcctctttgccactttttgatcttgtgtttatactactttcaacttttttttattccataatccctgcaattgaagtgaaaaaaaaaaaagcaaaaggcagggtaatagcaaggaagaaaatatcataa

SEQ ID NO: 82041 - DNA, 2010 bp, Saccharomyces pastorianus
atgctgcgtgtaacaaccttggcgtcttcgtgtacttcatttcccttacaggtcctcaggaggcggttgaccatatcttctttgacaagcttccaacccacaaccaagacacaggtcgtggtcatcggtgctggacatgcaggctgcgaagctgcagctgcgccatctaggactggtgcgcatactactctcattacaccatcgttaacagatattggtaagtgttcgtgcaacccctctattggtggagtgggtaagggcatccttgtaaaggaaatcgacgctctcgatgggctgatgggcaaagtaactgatctcgctggagtgcaattcaaaatgctgaacagaagcaagggtcctgctgtgtgggggcccagagcccagatagacagagagttatataagaaatacatgcaaagggaactttccgacaagaaagcacaccccaacttgtctctgctgcagaacaaagttgctgacttgatcttgtatgaccccggatgtggccacaaggtcatcaaaggtgtggttctggatgacggtacccaggttggggcagatcaggtcataatcactacaggtacgtttctcagtgcagaaattcacatcggcgacaagcgtattgcagcaggaagaattggcgaacagccaacatatgggatcagcaatactctacaaaatgaggtgggttttcagttagggcgtttgaaaacaggcactccggctaggctggccaaggaatccattgatttcagcgctctggaggtccagaaaggagataagttgcctgtccctatgagttttctgaatgaaaccgtgtcagtcgaacccacgaagcaactggattgctttggcacacatactacacctcaaatgcacgactttttgcgcaataacttgcatcaatccattcatatccaggacacgaccatcaaaggcccccgctattgtccctccatcgaagctaagattctacggttccctgatagatcttcccataagatatggttggaaccagaaggtttcaactccgacgtcatttatccgaacgggatatccaattctatgcctgaggatgtccagttacaaatgatgaggctcatcccgggcatggcaaacgttgagatcttgcagccggcatacggcgtggaatacgactacgtagacccacggcaattaaagcctagcttggaaacaaaattggtggatggactattcttggccggacaaataaacggtactacaggctacgaggaagccgctgcacaggggatcattgcaggtatcaatgcaggattactatcgcgccaagaacgggagcaattggtcttgaaaaggtcccaagcgtacattggtgtgctcattgacgatctaatcaataatggcgtcatagaaccatatagaatgtttacttccagatcagaattcagaatcagcgtaagagccgataacgcagacttcagactgacgccgattggtgctcaactagggattatatctcctgtccgtttaagtcaatattcaagagacaagcacctatatgatgaaacaatacgggcgcttcaaaatttcaagctaagctctcaaaaatggtctagcttactacaggctaatatcgcgccacaggctgaaaacagatctgcttgggaaatattcagattcaaagatatggatctacataaactctacgagtgcattcccgatttacccattaatttgctggacatcccaatgcatgttgtcaccaaaattaacattcaaggtaaatacgaaccttacattgtcaaacagaaccagtttgtgaaggcatttcaggcagacgaaaatatgctgttgccgcaagattacgattaccgtcagttacccacgctttccactgaatgcaaactactcttgaaccgcgtacagccattgaccataggccaagcaagacggattcaaggtatcactgcggcagccctatttgaactctaccgtgtggcacggaagccaagccaaccagtcatgtaa

SEQ ID NO: 82042 - DNA, 1218 bp, Saccharomyces pastorianus
atggatgaagtcttaccattgtttcgcgattctcatattccacagattaaagattatcaattggagttacagaacgatttgactaaaaccaatgaggccttccaaaagaatttgctaaagaactataacaagatcttaagcttgaccgattctgttaatgacttgtcgctcaatttgaaaaatgttgatcaagattttaaatccctgtgtttcaatgatgaaaaatttcagttgaataagttagctccactaccataccaaaccactacccatatatcaccacctcgtgacgaagaaaaagtcagcataccatcgcaaaacattttagtaatttcaaattggaccatctccatcaacaacttctgtaatcgtatagttacttccactactccgtcgcggatattcgacgagctactgttgaatttccacgaattatctttgataccagttccttccaaatttgaagcgcttgtcaaggacaaatgttgtcgactacagaagttcttggtggactctatgaagacattaaacttaactttactacagtgggtaaaactatacaatttactaaacacggagttttcctcgaagtgggacgatgatttactttctatattcaatgaatccctattcgagacactatttaacgataacgttcaagcgttactgatatcaagtgccaacagcaaagatcatcaatatcactccaatcagcaatataaggacgcgattgttgtcgattttgtgaattcgtccacctttagagaccatctcattcggagaaccgtgaaagaaataaacacacatttggatacactctctactttgagagccaagcttaaggagcctgaaactcttcataaattagatatcttccatgataatgatacgaacctcaatgatggcactgtatctccacttgatgatgatgcattgaaacaatatattgatacagcggtattctattcaaaaggtttaaccaatgataccacgttgcaaatttatcaaacggtgcagcctacgattgaaatcctacaaaacttagaattgtataaatgccctcaagagacactgacagatttgagaaataaattgattactcaattgcaagagtttaagactcagatctcatcccgcttaccttcaccactggaaaactcaacgagtgttgtggatgattttataacttcgtacaacaatcacatctcttgcaattag

SEQ ID NO: 82043 - DNA, 1095 bp, Saccharomyces pastorianus
atgaacgtgcctgaaacaagacaatcctccatagtcgtagctataagagtaaggccctttacgtcaatggaaaaaacaagattggtcaatgaagctagtggtgcagaagctaactttcccggtttgggggattcgtcgttaatattacccatgagtaataactccgactccgatatagacatagacgctgaagaaggttctacgcggagcaaaagaaatagcttgctgaggagaaaagtaattagaccggagggtatacgtaaaattgtggattgtgtggatgatagaatgctcatattcgacccagctgatagaaacccattgaacaaagtgagtgatcaggtcctgaactcgatgcgtgcaagggccactaaggccactgcgtcctctatcaataacagcaatgctacgaacaaattttcttcgcaacgtcgaaggcacggtggcgaaatcaagtttgtatttgataaattgtttgatgaaacctcttcccaagcccgtgtatacaaagagaccaccagcccgctcctagattctgttttagatggattcaacagtaccgtatttgcttacggtgctactggttgtggcaagacatatactgtgagtggcacaccttcacagccggggatcatatttctagccatggaggaactattcaataaaattacagacctgaaggacgaaaaagacttcgagatttcactgtcttacttggaaatatacaatgaaagaatcagagaccttttgaaaccagagacaccatctaaaagattggtcattagagaagatacgcagaaccacatcaaagtggcgaatttgtcgtatcaccacccaaatacggtagaagatgtgatggacttagttgtccagggaaacataaacaggactacgtcaccgacggaagcaaacgaagtatcttcacgatctcatgcagtgctgcaaatacacatcatgcagacaaataagcttgtagacttgacctcgcaacatacatttgctacactttcaataatcgatctagctgggagcgaaagagccgacgaaacaagaaaccgtggtatacgattacacgaaggtgcgacatataaatag

SEQ ID NO: 82044 - DNA, 1080 bp, Saccharomyces pastorianus
atgtcgtttactgctccttcagatcccgtcaataaaccgacaaaagtgaaggtatcacagttgtgtgaactatgtcattcaagaaaggctctcattagaagacccaaaaacctgtctaaactttgcaaacaatgcttctgcctcgtgttcgagacggagatccataacactattgtagcaaataacttgtttcagaggggagaaaaagtagccgtgggggcctctggtggtaaagactccacggtgttagcgcatatgctgaagcttctgaatgaccgttacgattacggcattgagattgtactgttgagtattgacgaaggaatcatcggatacagagatgattccttggccacggtgaaaaggaatcagcagcagtacggccttcctttggagattttttcctttaaggacctctatgattggacaatggatgagattgtatccgttgctggtataaggaacagttgcacgtattgtggtgtttttagaagacaatcattggaccgtggtgctgcaaagctgggcatatctcacgttgtcaccggccacaatgcagacgatatggcagagacagtactaatgaatatcctacgtggtgacgtagcaagattggaaaaatcgactgcgattatcacacaaagtagcggctctcccatcaagagatcaaaaccatttaaatattcttaccaaaaggaaattgtcctgtatgcgcactacatgaagctggattatttttccactgagtgtacctatgccccagaagcgtttaggggcactgcgagagaatacatgaagaatctggaagcagtgaggcccagttgcattatagacatcatccaaagtggcgaaaatttggcattaaaggctaaaaaatctaacgctggaaagagagtcgtcaaatttgttgacggcaatagatgcgctagatgtggatatctgtcgtcaaataacatttgcaaggcgtgcatgttgctggaaggactggagaaaagtagagcccaagtggcaatcgagaatgacacttctgccgatggtgcagccttgaagctgagagctcttgagaaactcagcttttga

SEQ ID NO: 82045 - DNA, 708 bp, Saccharomyces pastorianus
atgtcatacggaagagaagacactacgattgagcccgacttcatagaaccagatgcacctttggctgcttccgggggtgttgctgacaacataggcggaactatgcagaattcaggcagcagaggtacgctcgacgagactgtgctgcaaacactaaagcgagatgtggtggagattaattccagactgaaacaagtggtatacccgcatttcccctcattttttagcccctctgatgacgggataggggcggctgataacgacatttcagccaattgcgacctgtgggcgccccttgcgtttatcatattgtattctctatttgtatcgcatgcgcggtcgctgttctcgagcctatttgtgtctagttggttcattttgctggtgatggcattgcatctgagactcaccaagccacaccagagggtgtcgctgatttcgtacatctccatttccgggtattgcttattcccacaagtgctgaatgccttagtctcgcagatactacttccattggcctaccatattggaaagcaaaatcgctggattgtgagggtcctgtcgctcatgaaactggtggtcatggcgctgtgcctgatgtggtctgtggccgctgtttcgtgggttaccaagagcaagaccattatcgagatataccctctggcactctgtctttttggcatggcctggttgtcaactattttataa

SEQ ID NO: 82046 - DNA, 1287 bp, Saccharomyces pastorianus
atgagcgatgttctatctcaatataaagggtgctcagtcagagatttacccacacccaatttcgttattaatgaagaaaaatttgataagaattgtacgacaatgttgaacaacgttgaaaagctcagccaggaatgtggcgtaccaatcaaatttcgtgcacacgtaaaaacgcataagacagcaaagggaactttgaaacaattgggccacggacttccattggctaaacgcactacaagagccatattagtatcaactttgaaagaagcagaagaacttcttaattatcaagatagacaatgttcggattatattgacgatataacatatagtttaccctgttgcgttccagagtttattcctcttttgagcaatttgtcaagaagggtgaataattttcaggtttttgttgataacattgaacacttggagaatttaaagaatttcggtaggcctgcttccggcaagaaatggtcggtttttatcaaagttgatatggggactaagagggcaggtcttgctttcgactctccagaatttttgagtcttttaaaaaaactgacttcctcagaaattaaagaagtaattgagccatatgggttttatgctcatgccggacacagctactcttcaacctcgatcaacgacactcagaatcttttgatggaggaagtgaaagcagtcaattctgccgctaaagttttgtgctctgtggatcctcagtttgatccttctaaattaacactttctgtgggcgctactccgacttccaattccttgaaactcgataataaaagtacccttgttaaattcgttactactcaattagttagtacgcttgaaatccactgtggtaattactgcatgtatgacctgcaacaggtggcaacaggctgtgtccaagatcacgaattgtctggttttgtattaggaacagtactatcatcttacccttctagaggtgaattgttgagtaatacaggagtgatgtgtctaacgcgagaagcatcctcaataaaagggtttggaatatgtgccgatttggaacatgtgttaaaatccgagagcttcagtagggaatggtatgtagcaagggtctctcaagaacacgggatactgaggccaataagaaactggaacgaaactactgcgttaaaattaggcagcaaaattgccgtccttcctcaacacgcttgtatcacaatgggacaatttccatattatttcgtggtaaacagccaaggcattgtcaacgatgtttggttaccttttcagaaatggtaa

SEQ ID NO: 82047 - DNA, 243 bp, Saccharomyces pastorianus
atgaattcaagtctgaatgccaattcttatttttttcgaaaacccccaatgttaacttatatggtccgttttctttactgttatccatctccctttcctatagctccagcggttaccgatcttccagaatgccggggagatctttctctttctttgtttataacaagtttcacaagcacgaaagaaagcaatactgtacgccaaaagccgcctaaagacacatattcccgtcaatttatgtga

SEQ ID NO: 82048 - DNA, 381 bp, Saccharomyces pastorianus
atgattaacgataaactagtacattttctgatccagaattatgatgacatcctaagagcaccgctttctggacagctcaaagatgtgtattcactgtacatcagtggcggatacgatgatgagatgcagaagttgagaaacgataaagacgaggtcttacagtttgaacagttttggaatgatcttcaggatattatatttgcaacgccgcagtccattcaatttgaccagaatctgttagtggcagataggccagaaaaaatcgtttacctggacgttttatccttgaaaattctctataacaagttccatgccttctactatacattaagatcgtccagtcttcatgtgaagaaaaagtgtcgagttaacaacaaaacg

SEQ ID NO: 82049 - DNA, 1410 bp, Saccharomyces pastorianus
atgattggtttaaatatgcagtatgcatcgcattctctcactgaaggtcatcactcacatagttctgctaacgtaaaatcactcaattttccacacaggatacagataggagtattagcaaattgtattttattggtaactcaagaaggatgttttcatagtaaattagtatttgcaacaaacaagggctatgtcgcaggattttcatccctggataattttcctgaagaaaatttctttacggggttttccatggctgaattaaatcctatgttgaaatataagtccgagccaactgatgtgttcaaaacaatgaaacttgagagaacagttgccatcaaggaagggccgagccattatttttatcacaacgttaataccagatctaacgtgcatacttttgccatctttatacaagacttttcttccttaaaactgctcaaaattcgtcaggtcaaactcaaagaaaattgccaagtccatgattctcttgttgttggagacacgttgattattaccgtaaattatcgttgtcatttttatgatttgattccagaaacctttccaaatccctatatcttttctccagccaaaagctcaagaaaacataaaagtaggagtgacattacttccctatcattttgtctacaagaagatgctttatcacctttaaaaaaaacgaacactggtgtgttttatttaggttatagaaatggtgattcaatggcaatagtcttcactaatattacaaacatgacattacagtactccaagaccaacggtatggcatcagaaagtcgaaatcaaccgatcagaaattccccaaaatctgttgtttccataaaagcattgaataataaaggcctaatgcttatatctggaatggcagacaaagaggatgtgcaacaattggttatagcagatacgttcctggaggacattctgaccgaaatcccggttgtatcttttaaaactaagttcttaaacgtgactaaggatacagaaatactcgagatatcggatgacgggcgctacttcatttatggttcaactagtgctagggacggaaagggtgattttgaagtattttgtaccactttatctggaaatcttgactacgaaaaatccgaaggtggaaatattaccctctatccaataggaggtatgaagaactactgtaggttagaaaacttccagtttgaatctatccacctacattcggctttcatacccccaaggtacgtaaaactgtttgatgctgtggaacctctaggtgaagagagcagtacttcaccttacgatatacctgaagaaggactttctcaaaaaatatgcatcttaattcggagagaagatgatcctacaatggggccaatatcattcaaggacatcagctatgacctagtttag

SEQ ID NO: 82050 - DNA, 204 bp, Saccharomyces pastorianus
atgacacctaacttaccagggttttattatgatagagaacgtcgacgttattttcgcatatctgaaaatcaaagcatttctaccacgggaacgacgaaccagtacagaaaagataatataaagcgacaatgtgttgaggaaaattacgataaaaaattttatatgattaaaaaaaaaacgtcagcaaacattacaaaagtataa

SEQ ID NO: 82051 - DNA, 693 bp, Saccharomyces pastorianus
atgggtattccaaaatttttcaggtacatctcagaaagatggcccatgattttacagcttattgagggaacacagattcctgagttcgataacttatacctggatatgaattcgattttacataattgtacgcatggtaacgacgatgatgtaaccaagcgattaactgaagaagaggtttttgcaaaaatctgtacgtatattgatcacctttttcaaacaatcaagcccaagaagattttctacatggctattgatggtgtggcccctcgtgccaagatgaatcaacaaagagctcgtagattcagaaccgctatggatgcagaaaaagccttgaagaaggctattgagaatggtgacgagattcctaagggtgagccatttgattcgaattctattactccaggtacggagtttatggccaaattgaccaaaaacttacaatattttattcacgacaagatttctaacgattccaaatggagggaagtgcaaatcatattttctggccatgaagttccaggtgaaggtgaacacaagatcatgaactttataaggcatttaaaatcccaaaaggatttcaaccagaatacgagacattgtatttacggtcttgacgcagatttgattatgctgggtttgtctactcatgggccacattttgcgttattgagagaagaagtgacattgtag

SEQ ID NO: 82052 - DNA, 936 bp, Saccharomyces pastorianus
atggcaaccaagattctcaaccctgtcgacaataagtgtacagtttatgttaaaggtgcatttgaaagaattcttgagtactccacaagttatttgaaatcaaagggtaaaaaaactgaaaagttgactgaagcccaaaaagctacgataaatgagtgcgcaaattctatggcatctgaaggtttgcgtgtccttggatttgctaaactaactttgtctgattcatcaactcctctaaccgaagacctaatcaaagatttaacctttactggtttaatcggtatgaatgacccaccaagaccgaacgttaaatttgcaatcgaacaattactacaaggtggtgtccatattattatgatcactggtgattctgagaataccgcagtaaacattgcaaaacaaattggtattccagttattgatccaaagctttccgttttatccggtgataaattagatgaaatgtcagatgatcaactggccaatgtcatcgaccacgttaatatttttgctcgtgctacgcctgagcataagttaaacattgttcgtgcattaagaaagaggggtgatgtggtagcaatgactggtgatggtgttaacgacgctcctgcgttgaaactttcagatattggtgtttctatgggtagaattggtacagatgtagccaaagaagcctcagatatggtcttaactgatgatgacttcagtactattttaactgctattgaagagggtaaaggtatctttaataatattcagaatttcctgacttttcaattgtctacttctgttgccgcactatcattagttgcactatccacagcgtttaaactacccaatccactgaacgcaatgcaaattctttggataaatattctaatggatgggccaccagctcaatccttaggtgtggaacctgtgatcatgaagttatga

SEQ ID NO: 82053 - DNA, 1449 bp, Saccharomyces pastorianus
atgagtgacaatccatttaatgcgagtcttcttgacgaggactcaaaccgtgagagagaaatactagatgccacagcagaggccctttcgaaaccaagcccttctttagagtattgtactttatccgtggacgaaactctagaaaaactggacactgacaaaaacggtggtttacgatcatctaacgaggccaacaataggagatcactttatggccccaatgaaataaccgtagaagatgatgaaagtcttttcaagaagttcttgtcaaatttcattgaggatcgaatgattctacttttaataggatccgcagtggtctctctttttatgggtaacattgatgatgctgttagtatcacactggccattttcatagttgtcactgtcggttttgtccaagaatataggtctgaaaaatctctagaagccttgaataaattggttcctgctgaatgtcacttaatgagatgtggtcaagagagtcatgtactggcttccaccttggttcctggtgatttagtgcacttcagaataggtgacagaatccccgcagaccttagaattattgaagcaatcgatttatccatcgatgaaagtaatttaactggtgaaaatgaaccggtacataaaacctcacaaacgatcgaaaaatcttcctttaacgatcagcctaattcaattgtaccgatttctgagagatcttgtatagcttatatgggtacattagtcaaggaaggtcatggtaagggtatcgtcgtaggaacaggtacaaacacatcctttggtgccgtttttgaaatgatgaataatattgaaaaaccgaagactccattgcagttaacaatggacaaattgggaaaggacttgtcactggttagcttcatagttattggtatgatttgtttagttggtatcatacaaggtagatcttggttagaaatgttccaaatatcggtatccttagcggttgctgctattccagaagggttaccaattattgtcactgttactttggcattgggtgttctgagaatggccaagcgtaaagccatcgtgagaaggttaccaagtgtcgaaactttaggctctgtcaacgttatctgctccgacaaaacaggtacactaacctcaaaccacatgaccgtatctaaactttggtgcttggacagtatgtccaataagctaaacgtcctctcattagacaaaaataagaagactaaaaattctaatggaaatatgaaaaactatttgactgaagacgttagggaaactctaactatcggtaatctctgtaataatgcatctttctctcaagaacatgccatatttctgggaaatcctactgatgtagctcttttagagcaattggcaaactttgaaatgcctgatatcagaaacaccgttcaaaaagttcaggaacttccatttaactcgaaagaaaattaa

SEQ ID NO: 82054 - DNA, 501 bp, Saccharomyces pastorianus
atgccgtccaataatagcagttttttagatattgacgatgatctcgagggtgtagatgattttggcaacgagcccaacccatttgatgatgccaccgtacctgatagcccaaacatgaataactcgactgctggaaagggtagcgaattttataacacaacgggcagtaaggcagaatccgcaccattacagggtcaaatggacccaccagcgtacgaccaagtgataggacagaatgacaacgacggccttgggcgtaacggattgaggccaggattgataaactactattctaaatacttccagatcgatttgacgcagttcaaaaagagattgtccgcggtactgacgtttagaaacgatcataattccgaaagtaacgaagataacactgatttatacggtgctgtatggatcactgccacggtggtaatgatcaattttaccatgagcagggggttaaattttattagacctgcaggcatgcaagcttggcactgc

SEQ ID NO: 82055 - DNA, 1065 bp, Saccharomyces pastorianus
atgaacaattccataattactgatgatgaggttagagagttttacttaaactgctcttctcaaacaattattgaatctcttctcagcttgcacgagtcattgagattatattctcaaaaccatgagatactgctcaataggatgttcaaaaaattggatgaaaccaatgcagactctaacatatcccatatattcatgcctgttgtgagcaaggatttttcaggaataaaaattctagtgaataacaacaacaaaaattttcaaggtgtgataaatgttattgagcctgaaacaggaaaattaatcggatgttttgaggctaaacaaattaccgctataagaactgcccttgcatcgtgtatcggtttatataagcaactctcatgttcccatgataagttctttagatttgaaaatggcacttgctatttaacatgttttggtaccggtctccaagcattttggcacatatacatagctattaaactaatcatgtcagggattgttggcgaatctttgaagttagttgaaataaacatactatatcacaataacatgatgagtttggatcgtttgaaatcattgaaaaacttatttggaagtaatataaagatagagcttaatcagtatcaaataaacgacatcagttcagaaggtaatggcgctgtttctaacagtgatattatctttggttgtctacctactctagagcccaacttgtttttgaggcagttgctaaacagtaaagcttctgtggagcagaaacatacttatatctcattaattggaagttacaaaccagtgatgcacgaatgcgataaggagttgattgataagttcaaatctgataatgaaagcgcttgcattttggtagattcaagggaacatactttattggaatctggagaattaatcgattccaatatcgctccacataatctcatcgaaattggtgaattagatactttgaaagacacagttttgaatttgaacgaaaagggctgcaaaagaactatcaccttgtgtacactgtggtctagcggttatggacgtggcgcttgctaa

SEQ ID NO: 82056 - DNA, 444 bp, Saccharomyces pastorianus
atgaccactgataccactgttttcgtttctggcgcaaccggtttcattgctctacacattgtgaacgatctgttgaaagctggctatacagtcatcggctcaggtagatctcaagaaaaaaatgatggcttgctcaaaaaatttaataacaatcccaaactatcgatggaaattgtggaagatattgctgctccaaacgcctttgatgaagttttcaaaaaacatggtaaggaaattaagattgtgctacacactgcctccccattccattttgaaactaccaattttgaaaaggatttactaacccctgcagtgaacggtacacaatctatcttggaagcgattaaaaaatatgctgcagacactgttgaaaaagttattgttacttcgtctactgctgctctggtgacacctacagacctgaacgaagacgattcggtgatc

SEQ ID NO: 82057 - DNA, 801 bp, Saccharomyces pastorianus
atgtggctttcaaagttccagttcccctcgaggtccatctttaagggtgtttttttgggtcacaagttgccgttactagtgcgactgacatcaacaacgactaactctaagagcaacggcagcatcccaacacaatacacagaactctctccgttacttgttaagcaagcggaaaagtatgaagctgaactaaaagatcttgacaaagacctttcttgcggcattcattttgacgtgaataagcagaaacattatgctaaattatcagcgctcactgatacatttattgagtataaggaaaaactaaatgaattgaaaagtttacaagaaatgattgtatctgatccatcattaagggcggaggctgaacaagaatatgcagaactggtcccccaatatgaaacgacctcctcaagattggtaaataaacttcttccaccgcatccgttcgcagataaacctagcttactagagcttcgaccgggtgtaggtggtattgaagccatgatttttacccagaatctattggatatgtatattggctatgccaactatagaaaatggaaatatcgaattatatcgaaaaatgaaaacgaaagtgggtcaggcattatcgatgccattctgagcattgaagaagccggatcttacgatcgtttgaggtttgaagcaggcgttcacagggtgcagagaattcctagtacggagactaaaggaagaacgcacacatctactgctgccgtggttgtgttacctcaaattggtgacgaatctgctaaatctattgacgcttatgaagaa

SEQ ID NO: 82058 - DNA, 441 bp, Saccharomyces pastorianus
atgtcgcttaaatcaaagttgactaagattcagaagttatggctgtattatttcccctgtgacagaatcctcgcgaagagaatatgtaaatcgactgttaatactacggtagctttcatattttgcttgatacctaagataactgcgcatttgggagcagctcctgcgatgctgccaatgatttctgttattgttcatcctggaagaagggtcgggggtactatccatggtgctatctattgcataactggattgatatttggcctagcttacgcaatcttcggccggttccttgcgcagcgatgtttagggagttcttggcatgagctaacagaggcacagcagcacgtattgcactataaaagatatgaagcgggattagcaattttggctgttttcgaagtaatatgcttttttttcatgttggggggatcctctaga

SEQ ID NO: 82059 - DNA, 198 bp, Saccharomyces pastorianus
atggccgcgcaaaatccattggcagatattcaggtatataaacgttacaaagccaagaggagaatggaaggccaacaaaaaattcttgtacaattgcatatattgattcattacaatattactgccgtcgtcctctcagtcataaatcatgttttccctttccctctcagcatgctttttctcggcctcttccattaa

SEQ ID NO: 82060 - DNA, 351 bp, Saccharomyces pastorianus
atgtccgatctcgttaccaagttcgaatcgcttattatttcaaagtatccagtttctctcaccaaagaacaatctgctcaagctgcccaatgggaatcggttctaaaatctggtcaaatccaaccacacttagatcaattgaatttggtgttaagagacaacaccttcattgtgtccattttgtacccaacatctaccgacgttcacgtcttcgaagtcgccttaccattgattaaggatttagtggcaagctccaaggatgtcaagtcaatttataccacatacagacatattttgaaatggatcgattacatgcaaaacttgttggaaagtgtcagcaatgacaattta

SEQ ID NO: 82061 - DNA, 732 bp, Saccharomyces pastorianus
atgggtactagcatagtaaatctaaaccaaaaaattgaactgcccccaatccaggtcttattcgagtcacttaaccgagaaaatgaaacaaaaccccacttcgaggaacgcaggttatatcaacctaatccttcatttgttcctagaacaaatatagcagttggtagcccagttaacccggttccagtatcatcccctgtttttttcattggtccttctccacagagaggcattcagaatcacaacgctattatgactcaaaacatacgtcagtatccagttatatataataataaccgagaagttatatctacgggtgagagaaattacataataactgtaggggggcctccggtaacttcttcgcagcccgagtatgagcatatctcaactcccaatttctatcaagagcagagactggcacaacctcatccggtaaatgagagtatgatggtaggtggttatacaaatcctcagcctattagcatttcccgaggtaaaatgctatccggcaacataagtacgaactcggtccgcggatctagtaatggatattccgcaaaagaaaaaaaacataaggcacatggtaagaggtccaatttaccaaaggccaccgtttcaattctaaacaaatggttacatgagcacgtaaacaacccttacccaaccgtgcaggaaaaaagagaactgctcgcgaaaactggtctaactaaacttcaaatttccaattga

SEQ ID NO: 82062 - DNA, 183 bp, Saccharomyces pastorianus
atgcatgaggttacccgcacttattatttttttctctttttttttcttagctataaaaggcagatcaatgcagcatccattgctttattcgactttccttcactatttatttactttccatttcttattttagtgttattttataacagtaacgcaaatttaacagccattcgtaacacgtaa

SEQ ID NO: 82063 - DNA, 510 bp, Saccharomyces pastorianus
atggtgaccggaatatcggaggaaaatgatgatgaagagactttttcggctgttcattcttcaacacccagtattaattctcaatcctacgcgattcctataacagaggaaatgtccagctctttccatgattcgatcagcaccactagcaactcaagtggtagcttcgatagtgatggaagtaacgtttcagatgttgtggagcaaaatgaaatggacaatgaatctaacgttgacgaagatttgttcctagataacgatatccctcagtcaagcaatttgctacccacggatgcccaggatcctggtccaatatttgacgtttctagatatatttttgattctctaaaacaatctattgattctgctgatttctcagaggcactttctctacagaccaaaacctccgctgttataaattcgaaaagcctagagcttaaacaatatattgatgaaatgaagagcaggctcactcaactgcaagagaagtttgaaaatgggggatcctct

SEQ ID NO: 82064 - DNA, 141 bp, Saccharomyces pastorianus
atgctaacaaaaatattttattatttgtattattacagaaaaatcttgaccccagaatctcagttgaagaagtctaaggctcaacaaaagactgctgaacaagtcgctgctgaaagagctgctcgtaaggctgtatgttaa

SEQ ID NO: 82065 - DNA, 294 bp, Saccharomyces pastorianus
atgaataatgctgcaaatacagggacgaccaatgagtcaaacgtgagcgatgctccccgtattgagcctttaccaagcttgaatgatgatgacattgaaaaaatcttacaaccgaacgatatctttacgaccgatcgtaccgatgcaagtactacatcttccacagccattgaagatattattaacccctcgttggatccgcagtcagcagcatcgccggttccttcttcctcttttttacatgactcaaggaaagcttccactagtacacatcgtagtaaggagaggtactcc

SEQ ID NO: 82066 - DNA, 672 bp, Saccharomyces pastorianus
atgctcttaggttactgtggcagcggatactatggaatgcaatacaacccaccacacaagacgattgaaggtgagattctcaccaagctcttcgacgtaggagccatttccgaagaaaattcattggcaccgaagaaaaattcctttatggcagcggcaagaacagacaagggtgtacacgctatgttgaatctactgtcgctaaagatcacattgcgagaggacacagtagcgaagttgaacgccgcactaccgcccgaaatacgcgtgtggggtatccagcctgtcaataaaaagtttaatgctagatccgcgtgcgattcccgatggtaccaataccttatcccagaatttacactcattggtccaccccggagttctcttttgcatcgaaacgtggggggatgctaccgcgaagacggctcgcaagaggtgtgggatacgttcctggaacagacgcgtgggagatttagcggggatgagctgtgccgtttgcaggacactgcacagaaactaagcgagagcgatcctttggtacaagaatacgtggggctattgagcggtacccttagcggctactgcttgccgccctcgaagctggacgcgtttgaggcagccatgcaggagtacgtgggaagacctgcaggcatgcaagcttgcactgccgtcgtt

SEQ ID NO: 82067 - DNA, 561 bp, Saccharomyces pastorianus
atgagtgagcaaagccaattagatgattcgactatagacaaactgattccacagattttcaatgagatgagatctaacctcaataacacgaccaataaatttccaaaaagcacaggaggtggagcaagcgataatatttcggctaacagcaattctataagatcgtttaattcaatcacaacgcaatccttactcaaagaatcagaatcgttagataaaataacagcaatgataaaaaatgttacggccgcattaaaaaataacttgccagtatacgttaatcaagtacatgaggtatgtaaatctacgaattccattttagattcatggatcaacattcattctcaagctggttatattcataaattgatgagcgatcaaacctatttaaagctaattaatgatagactgcacaatgaaaatgtaaacacaaatgatgaagatgggagtactttacacaacgtgatagcgttgaaaaagaaggagatcttggatttgagacaaaaattagaaaataggaagggtgaaaggatgctgcaccagcaagccgggatcctctag

SEQ ID NO: 82068 - DNA, 726 bp, Saccharomyces pastorianus
atgcaagccccttcggaaaataccgacgtcaaattggatacatccaacgaacctagtgcacatttgatcgaggaaaatgtggctcttcctgatgaaatatttcattcgtacttgagttatatactttatgaaatggttcattatataccgatagtgattatcttcctgcttaacgtgtgtttagttctattatttctattttttcatgatggccccggtaccattttgttttatgtattttcattgttctgttcccttcccatgttggttgcatctgtaggcgagttcattatgaaaccgatccgaaatcaagattttaagattaatcttcttgtcgaagtcatcaaacgtaaacctgctgtaaaagggaaggaatggaggactatcacatacaacatgaaccaatatctatttgatcatagactatggaacactccctactgcttttatgatgacgaagattgccaccattattttctacgccttattgagggaaaaactttcaagaagcaaggggattcaccaaccagcaatgttacagacgcacaatcaaatgaggcaaccactagcccaccaattggagccactgaatcttttacttttcactccggcccaaattaccaaaagtacctttccaaggcagctgagatcgaacaacaatctcaagataattactggcaagggcgacatcccgatatcgatgcgcttcttaaaaagacggaatag

SEQ ID NO: 82069 - DNA, 162 bp, Saccharomyces pastorianus
atggatagtaaggaagtactggtacatgttaagaatctagaaaagaacaaaagtaatgatgctgcagttctagaaatcttacatgtcttggataaagaattcgtccccactgaaaagttactgagagaaacaaaagttggtgtggaagtacaacaagtttaa

SEQ ID NO: 82070 - DNA, 354 bp, Saccharomyces pastorianus
atggccaaagacgctcttgactctgtaactaaagaacctgaaaatgaagatctcctaacaatcattgaaaacgaagaaaacgagttgaaaaagattgaatcaaaattacaaagtctacaggatgattgggatccagcaaatgatgagattgtcaagcggataatgtctgaagatacgctgctacaaaaagaaatcacgaagagatcaaagatttgcaaaaacctaattgctacaataaaggactcagtgtgcccgaaaaatatgaatgaatttttggtatgtattttgaacattttcgaaaccttttcttttgaatatactaacgaaatctttacaggaagaaattggatttga

SEQ ID NO: 82071 - DNA, 162 bp, Saccharomyces pastorianus
atggcgccgagcgaaattttaaagagaacaacagaaacagtcaccaagacttcttcaattaggcagcgcaaaacggacacaacagcagtaaagacaaccggaatggactcgattataccggcaggcgttcagctagatgatttacaagtgatatcggctaag

SEQ ID NO: 82072 - DNA, 465 bp, Saccharomyces pastorianus
  modified_base (306)..(337): a, c, g, t, unknown, or other
atgtttgccattatctgtatgaattcattgaactgcaatcgcaacggcagaatttcatcgcgtgcttcgttgatctgcttacacactttgtccctggtttcattctcgttcttagccaatatcacttgtaaatcatctagcttgacgcctgccggtataatcgagtccattccggttgtctttactgctgttgtgtccgttttgcgctgcctaattgaagaagtcttggtgactgtttctgttgttctctttaaaatttcgctcggcgccataccgaaaatcctcaggaaagtgttagtgttatannnnnnnnnnnnnnnnnnnnnnnnnnnnnnnntttattgtatacataatggtcatacatcaatagtgtacatcctctcttcgcttgtctcgcaaaaaatgttcatcagaaatactccaattccgacctgcaggcatgcaagcttgcactgccgtcgttta

SEQ ID NO: 82073 - DNA, 708 bp, Saccharomyces pastorianus
atgggatccgaccggtcgtgtgttttgtctgtgtttcagaccatcctcaagctcgtcatcttcgtggcgatttttggggctgccatatcatcacgtttgtttgcagtcatcaaatttgagtctattatccatgaattcgacccctggttcaattatagggctaccaaatatctcgtcaacaattcgttttacaagtttttgaactggtttgacgaccgtacctggtaccccctcggaagggttactggagggactttatatcctggtttgatgacgactagtgcgttcatctggcacgccctgcgcaactggttgggcttgcccattgacatcagaaacgtttgtgtgctatttgcgccactattttctggggtcaccgcctgggcgacttacgaatttacgaaagagattaaagatgccagcgctgggcttttggctgctggttttatagccattgtccccggttatatatctagatcagtggcggggtcctacgataatgaggccattgccattacactattaatggtcactttcatgttttggattaaggcccaaaagactggctctatcatgcacgcaacgtgtgcagctttattctacttctacatggtgtcggcttggggtggatacgtgttcatcaccaacttgatcccactccatgtctttttgctgattttgatgggcagatattcgtcaaactgtatt

SEQ ID NO: 82074 - DNA, 1257 bp, Saccharomyces pastorianus
atgactgatacatcatcctcttcatcatcctcttcagcatcttctgtttcagctcatcagccaactcaagaaaagcctgctaagacttacgatgacgctgcatctgaatcttctgacgatgacgatatcgatgctttaatcgaagaactacaatctaatcacggtgtcgacgacgaagacagtgataacgatggtccagttgccgccggtgaagctagaccagttccagaagaatatttacaaaccgacccatcttacggtttaacttccgatgaagttttgaaaagaagaaagaagtacggtttgaatcaaatggctgacgaaaaagaatctttagtcgttaagttccttatgtttttcgtcggtccaattcaattcgttatggaagccgctgctattttggctgccggtttgtccgattgggtcgatttcggtgttatctgtggtttgttactgttaaacgctggtgttggtttcgttcaagaattccaagctggttctattgtcgatgaattgaaaaagactttggctaacactgctgttgttatcagagacggtcaattggttgaaattccagccaacgaagtcgtcccaggtgatattttgcaattggaagatggtactgttatcccaactgatggtcgtattgtcactgaagactgtttcttgcaaatcgatcaatctgctattactggtgaatctttggctgtcgacaaacattacggtgaccaaactttctcttcttccactgttaagagaggtgaaggtttcatggttgttaccgctaccggtgacaacactttcgttggtagagctgctgctttggttaacaaagccgctggtggtcaaggtcatttcactgaagttttgaacggtattggtattatcttattggttttggtcattgccactttgttgttggtctggactgcttgtttctacagaaccaacggtattgttagaatcttgagatacactctaggtattactattattggtgtcccagtcggtttgccagctgtcgttaccaccactatggccgtcggtgctgcttacttggctaagaaacaagccattgttcaaaagttgtctgctattgaatccttggctggtgtcgaaatcttgtgttccgacaaaaccggtactttgaccaagaacaagttgtccttgcacgaaccatacactgttgaaggtgtttctccagacgacttgatgttgactgcgtgtttggctgcttccagaaagaagaaggtttga

SEQ ID NO: 82075 - DNA, 447 bp, Saccharomyces pastorianus
atgtccattcccgtcaaaagattgctaaagccctcgagaccgggaagtgccgcattgggaaacacagttgcgatgcgcgcgagtttgagaaattctcgcataggtttttccggccgggtgcggctggttctgggtcgtagtgtgggctgtgggtgtgcccatgcggcaattattgccagatctccgtatcgagaactgagttgttggccaattaccggaagcggccgactagacccgtcgtggggtgtgggtgctctgccgatgtactgtttacatttgcccgcttcgggcaaatgtattttcgttttttccccgttggccggcggtgacgtaaacgacttttgcacagcgctggtgccggaaaaactctcggccgtttcccgagccgtcgggtttacgcaagaaaaacgaaaatgtcgtaccatacccgagaagtatccgaactga

SEQ ID NO: 82076 - DNA, 2268 bp, Saccharomyces pastorianus
atgtctagacaagacgaaaattctgctttactagcgaataatgaaaataacaaaccatcgtatacgggaaatgagaacggagcctacgataatttcaaattatcaaaaagtcaactttcggatcttcataaccctaaatcaataagatcatttgtcagattatttggatatgagtctaacagcctcttcaaatacttgaaaacagataaaaatgcaggcatttctcttccagaaatatcaaattatcgaaagacaaaccggtataaaaattatggcgataattcacttcctgaaagaataccaaagtcttttttacaattagtatgggctgcttttaatgacaaaacaatgcaattactgacagtcgccgctgttgtttcctttgttttaggtctatacgaactatggatgcaacctccacagtatgatcctgaaggaaataaaattaagcaagttgactggattgaaggcgttgctatcatgattgcggtctttgtggtagttctagtgagtgccgctaacgattaccagaaggagttgcaatttgcaaagctaaataaaaagaaggaaaaccgtaaaattatagtcataagaaatgatcaggaaatattaatttccattcaccacgttttagtcggtgatgtcatttcattacaaaccggtgatgttgtccctgctgattgtgttatgatatcagggaagtgtgaggcagatgaatcatccatcactggtgaatctaacacaatacagaaatttccggtggataactcattaagagatttcaaaaaatttaattctatcgatagtcataaccatagcaaaccattagatataggtgacgttaacgaagacggtaacaagattgctgattgtatgttgatttcaggttccagaattctttctggcttgggcaggggtgtcatcacgtccgtgggtataaactcagtttacggtcaaaccatgacttcattaaatgccgaacctgaaagtactccattacagttacatttgagccaattggctgataatatatccgtttacggttgcgtgtctgctataattcttttcttggtccttttcactaggtacttattttacataatacctgaggatggcaggttccatgatctagatcctgctcaaaagggttctaaatttatgaacatttttatcacatctatcacggttattgtagtggctgttccggaaggtttaccattagctgtaactttggccttagcgtttgcaacaacaagaatgacaaaagacggtaatttagtacgggttttaagaagctgtgaaacgatgggatctgctactgcagtgtgctctgataagactggcactttgacagaaaatgtcatgactgtcgttcgtggcttcctgggcaattctaaatttgatgataataaatcgttgcccgttagcgaacaaaggaagctgaattctaagaaagtttttgaagaaaattgttcgtcatccttgagaaatgatttattagccaatattgtcctgaattctaccgccttcgaaaacagagattataagaaaaacgataaaaatacaaatggtagtaaaaatatgtcaaaaaatttgagttttttagataagtgtaaatctagattatcgttttttaaaaaaggcaacagggaagatgacgaggatcaattattcaaaaatgtcaacaagggtaggcaagaaccctttattggctctaaaacggaaacagccttactcagtttggcaagattatcattaggattacaaccgggagaattgcaatatttgagagatcaaccgatggaaaagtttaatatcgaaaaagttgttcaaacaattccgtttgaaagttctcgtaaatgggccggcttagtggtaaagtacaaagaaggcaaaaataaaaaaccattttacaggtttttcattaaaggtgcagcagaaattgtttccaagaattgttcgtacaagaggaattcagatgatactttggaagaaatcaatgaggacaataaagaaaaaactgatgatgaaatcaaaaatcttgcgtccgatgctctcagagccataagtgttgcccacaaagatttctgcgaatgtgatagctggccccctgaacagctgcgtgataaagactcaccaaatatagctgctcttgacttgctatttaacagtcacaagggcttaattctagatggtttacttgggatccagaccctttacgtgcaggcgttagggagtcagtacaacagtgccaacgtgctggtgtaa

SEQ ID NO: 82077 - DNA, 1023 bp, Saccharomyces pastorianus
atgagcagtggttcagcaggggcaccagcactttctaataattccacgaactctgtcgcgaaggagaaatcaggtaacatttccggtgatgagtatctttcgcaagaggaggaagtttttgacggtaatgatattgagaataatgaaaccaaagtttatgaagaatccttagatttggacttggaacgtagtaatagacaggtctggttagttagattgcccatgtttctagcagagaaatggagggacagaaacaacttgcatggccaagaactgggtaaaattaggataaacaaggatgggagtaaaatcacacttctattgaatgaaaatgataacgattctataccgcacgaatatgatttagaacttacaaagaaagtagtagaaaatgaatatgttttcacagaacaaaatttaaagaaatatcaacaacgtaaaaaggagttggaagcagatcctgaaaagcaaaggcaagcttacctgaagaagcaagaacgtgaagaggaacttaagaagaagcagcagcagcaaaaacgtagaaataatagaaaaaagtttaatcacagagttatgacagatagggatggtagagatagatatataccatatgtgaagacgattcccaaaaaaaccgccattgtgggtacagtttgccacgaatgtcaggttatgccatcaatgaatgatcctaattatcacaagattgttgaacagagaagaaatattgtcaagcttaataataaggaaaggatcacaactttggatgaaaccgttggtgttacgatgagccatagcgaaaacagtgattatatgatggatacgcaggtagaagatgactatgatgaggatggccatgtacagggtgagtactcttattatcctgatgaagatgaagatgaacatatgctttctagcgtcggaagttttgaggcagatgatggtgaagatgacgataacgattaccatcatgaagatgattctggacttttatatggatatcatagactcgggatcctctag

SEQ ID NO: 82078 - DNA, 756 bp, Saccharomyces pastorianus
atggacctagatctagccagtatcttaaaaggtgaaatttctaagaagaagaaagagctggccaactctaaaggtgttcagccaccatgcactgagaaattccagccacatgaatccgcaaacatagacgaaacaccgcgacaggtagaacaagaaagtacagatgaagaaaacctgtcagacaatcagagtgacgatattaggaccaccattagcaaattagaaaatcggccagaaaggatacaagaagcgatagctcaagacaaaaccatctctgtaatcattgatccatcacaaattggttctactgaaggaaaacctcttttgtcaatgaaatgtaatttatatattcacgaaatattatctcgttggaaggcgtctttggaagcttatcatccggagctgttcttagacactaaaaaagcactctttccactcctactgcaactacgaaggaaccagcttgccccggatttatttatttcccttgcgaccgttctctatcatttacaacaacctaaagaaataaatttagccgttcagtcctatatgaaactcagtatcggcaatgtggcctggcctattggtgttactagcgtaggcattcatgctcgtagtgcacattcgaaaattcaaggaggccggaatgctgctaacataatgattgatgaaagaacgcgattatggattaccagtattaaaagattaataacttttgaagaatggtataccagcaaccacgatagcttagcctaa

SEQ ID NO: 82079 - DNA, 480 bp, Saccharomyces pastorianus
atgacggtaaacttagatccggataaagtttggatagacggctgctttgatttcacacatcatgggcatgcgggagccattttgcaggctcgtcgaacagtttcaaaagaaaatggtaaactattctgtggtgtgcataccgatgaagatattcagcataacaaaggatcaccagtaatgaactcttcagaaagatatgagcatactagatcaaataggtggtgttcggaagtggttgaagcggcgccatatgttacagatcccaattggatggataaatatcagtgccaatatgttgttcatggtgatgatatcaccttagatgctaatggagaggactgctataagttggtgaaagagatggggcgcttcaaggtagttaaaagaacatatggcgtaagtactaccgagattatcctggaatatggcgaacaaatctttgccaccgatcatcttgattatatcccagaaccaggaatc

SEQ ID NO: 82080 - DNA, 357 bp, Saccharomyces pastorianus
atgttgctatatttatatattttatatattgctctcaaaactgtatctcatctttttttctgcaatccttgctttcgtaatctaagtgtgggtgacatgctaaatccgcggctttccttaagctttttcacaaaccatctattatgtccagaagctccgctgattatccgtggaaaagggtcttattctgccgtaggaacttcttctcgagaaaaaagtgagttcacccgcggcgctctcgtaaaacccgagggccgattctttccctccgtggaacaatcggccccgcggcgtcagagggtattatctccgcaagtgatagaactcacatttattctacgttctgcatggttttga

SEQ ID NO: 82081 - DNA, 234 bp, Saccharomyces pastorianus
atgaagctgcatttttgttctcaggcagcatcatcgttcccttcacctaacccttctaacttccttttacctgttgcaagctgtctcatacccgcgctgaaaaggctgagaactgggtattgtcccaatattacgctcggcttttcttttcaaaaactttgtattccagatacttccatgtgcaatttccctagtgctcctgtaccaagccatcggagaggagatgccttctag

SEQ ID NO: 82082 - DNA, 324 bp, Saccharomyces pastorianus
atgaaatcgttttcagtagcatcatgtttgccactctctcctaatttcctaaagagagattcaaactgtaataagattctcctgcccccattagatataaaagccattgaacctatctcaacgagtaattacacctacgtgaactcggcccctaagcaacaagagaaggaacaaccattgttaagggcaacaggaaacaatatcaatttagtccaaacaatagtggtcccaccccaggtaaacatggaatcacaagaattctcagcttcttcaactgacaataaacaaagtaaaaacattgaaatttttagccaaataaaataa

SEQ ID NO: 82083 - DNA, 1920 bp, Saccharomyces pastorianus
atggctgcgggtcaaaaaaaatatatatgttccttttgtttgaagcctttctcgagatccgagcacaagataaggcatgaaaggtctcatgcgggcgtgaagcctttccagtgccaagtctgtaaacactcttttgttagacgcgatctcttacagcgacacatcaggactgtccacagaaccttcctcttatccagttacgcgtcaatgacaggcgataaggctgatatccctgtatcacttggcgttggtgacgttgattcgacttcacccagagatatcaaaatggaaacactcgttaattcgatgattaaggtcaacagcggccttatcaatattcactaccatagtagtaatgttgaaaaaatggataagcagcaacgttgtgtgattgggaaggagtcctctagtttaaagaaagggaaaagccgctttaagcaggttaaaagccggttggagtcctccatcagtgtaaaaattttgcaagaatattcattagattttattagctcaagagatattctaactttcttcagaatgggtgtaagccacttggtagaaaataagatcttccaaaatttctttccagacctgttctcatcactacaaaatgacgagctggtggaaagtttttggattaacaagccttttggtctcataatagcttgtctgggtatgtccatttcgttaaatcaagattctcaaaaactatggtttatctgttgtacgaatttgtatgctagctcatctaaacatgacaatgactttgacactgaggacattttgtcacagacagagcaacatgatgtttttgccttgattctattttattctcttctagtaatgttggagaataacattcctgtttctaattccattaaaaagttcgatgtgttttcaatgcttcaagatattctgaagccattcaccgtggcatcctccagttaccattatttgaatagtaaggaaaatgcatggttcatattcgatctatgggtcaatatcttgcgcgattcaaacaacttcaacaacgattctttactaatatttggttggttcgtcaatcaagagtttatttcgtctaatccacttaaggacttcatatacaagggaccgtcaatgtccactactgacttaactttaaagcatatcaatattttggcagattccgcgtacgtgtattttataataaagaagacttatccgcaagagctgccatctgattttagagtgcatgatttgctggtttacttgaatgaatgtttcgtaatgcagcagccgatcaaacctgaaactagtgcaaacccctctttatttgcgaacgttatgaacgccaggattacggactgcaaatcgaaaagtaactggttattgtgggaaactatttggttcgaattcatcaacaacttgactttgagaaatgggaccacaaggaacatatggttcattgataactttccacaggtatcgacctcgtgcttacttcatcattcttcctcatttgttgatgaaaccttgatcaccacgaacttatcaatcatatcaatgcttcttaatttgaagtctttcacgctggcatctttaaacccaaggaatattcagttaattaccgacattgtcagcttccaactaaaattgttttcatcggagttaattgcaagctcggatgtttcaccatcacaagtatctcaattactagtaaaccccaatgttcacctaatgttatatttctggttcgataccatttatgtacaacgtcagagctacctttcatcaacagagaaagaggaatttgagaaggttgaagtgtttgtgaatgactacattataacacaccaaaagaacttggtgacagacttacactccattttgttcgatttttgtagattccttcattgcttaccatatactactggggat

SEQ ID NO: 82084 - DNA, 171 bp, Saccharomyces pastorianus
atggtcttgcttcaccctattctcgccgagagctgtacaagatattttttacttttgccatcttatactcatcctaatcatctgtttcattttccttctatttcttttttttttttttttttttttttttttttttcagttttcgaagaaactgcctttttagaattgtaa

SEQ ID NO: 82085 - DNA, 1581 bp, Saccharomyces pastorianus
  modified_base (1165)..(1165): a, c, g, t, unknown, or other
atggtactagagaatagaaacagtcataattttactttccatagcgggagtgtgagggagataaagtaccatacttgcatagtatctgaattacttcattgttttttacagccgttgtttaatgttcctactgaatcaatgctgtcttccttttctgtggccaaagaaaatcattcaggaggctctttgttagactcattaatagatttttcccatattgatttatcatctactattctcggcaaaatatgctgtttgatagaagaagttaacttaaacgactccctaaaatcggatttcctattatactgccaaaattatacacaacctaactgcaatgaacttacttcaatcctttcctgtaactgcgatagattttcagctttgaagagtatcttagaaaaatttgcaaacttagttcctttcttcaagtctatcaactctcatttagaaaatgaatcacttagtgaatccgattttcgtctaataaacacggtagaagagacgttaagaactttcgagcaatcaattgagtactttgcttcttccgctccattgaaatttacccataccttggtttttatcattaagtttgagttatatttgacagagattatacgaagcttcaaattcaccaaatctaaaaagccctttgaaaaaatcctagcaaggcttctaaaagttaaagacctttatttacttgatgatgtaaacttgattggtgctttcctgtatccatcaatcttccaaagtaaaagccttctaaatgaaatctttggcacaacatcggtaaataaaatagttcataacatgaccaaaattgttctaaggtatcttaaaaactttatcaatataactaattttcgttcctctaatagtggtggggagagcggtcggaattccggtaataatcttctttctgactacgaggccatttttatgaaagaatcacgggacgtagagcttttatgtaacaccaagttaaccgcaccactaacagaagattcattacttgtccaaatcattcgggatgatctattacgctatgtcaacagaattgcgcatgagctgcctaatgcataccatgactacttaaatgataatgatattagcttcgatggatctcactttacaaaacatgagttatctgaggaaaacgactctnactcgggggaatggtgcctaaatcccatggaagagacatttgatattcatattcctatctcggattcaatttggaataattacataagcagtaaaaacaagattgaagtaatcgatattttacttcagttgctttcagtaaattcgacatcttcaatacggtcagaattatcttctctaacagctaatcaagacttcagtaccaagttgagtgaggaaacaattaaaatcaaacttttgaattcacagtttaatctcgaaaaaattaattttcactctggatcaattttcgatgcttgcctagtgacattatattccaaaggaaaggacaatatactttcaagactttattttctaggacaaaattcttgtccattgtattatattttcttaatggcacccatatatttcaggtaa

SEQ ID NO: 82086 - DNA, 897 bp, Saccharomyces pastorianus
atgaacactgcattggatgatttacatggggatttggtgactttagaagataacgaaatcatcaataattctgatcattcatcttctcactctactagtcatgaggaggaagacgaggaagaagacgatactgaggatatagaacttatagaaaaagacggcaataaacccctatcaagtagaattcatccggaagacgaaatcataaatgatgggttaaatatatggattccggttcaaatgctcaagaagaatatagcgaagttctggtcccattttctagcaattgaaaagaaattaacgaaagttaaatgtaaacattgtggagagatactaacaagaagcgatgcaagtttgacaaaaacctttagatttcacttgaaaacaaagcataatataagtaccaataaaaacttctattccatgaatttcacagtgggagactccaatctcaaaaacaatacttccagcacagaaattacacgtagacacggctatgattcgttaaccttcaattccgaccaaagtttcaaatgctttgacataggaaaattacagagcagtaattacctttctatttcccaattagtagccatagtcatagcctcagaaaatttaccgctgaacttctttgagaatgtgtcctttaaatctcttttatcaaaatttcataagatccctcctttaactaccaatataatagaggagtcaattatagggttgtcaaaatcaattgatgagttgatcagaaggtctatatcaaggaatgatacacaattaccctttactatccatttacccgatagtaaggaatcaaatcaacctctttacttgaaatattctagggaaattcgggcacaattgtctaacttggacttatcccatcttatttctgta

SEQ ID NO: 82087 - DNA, 402 bp, Saccharomyces pastorianus
atgaagttggttaactttttaaaaaagctgcgcaatgagcaggttaccatagaactaaaaaacggtaccaccgtttggggcacactgcagtcagtatcaccacaaatgaatgctatcttaactgacgtgaagttgaccctaccacaacctcgactaaataaattgaacagtaatggtattgcgatggctagtctgtacttgactggaggacagcaacctactgcaagtgacaacatagcaagtttgcaatacataaacattagaggcaataccataagacagataatcttacctgattccttgaacctggattcacttttggttgaccaaaagcaacttaattccctaagaagatcgggtcaaattgcaaatgaccccagcaaaaagagaagcgcgattttg

SEQ ID NO: 82088 - DNA, 309 bp, Saccharomyces pastorianus
atggacacactgttcaactccacggaaaagaatgccagaggcataccgcaggctccattcatcgaaaatgtcaacgaaataattaaggacccaagcgacttcgaattgtgcttcaataagttccaagaacggctttctaagtacaaatttatgcaggaatctaaattggctacgataaagcagctgaagactagaatcccggacttggaaaacacattaaaaatatgccaaagtctgcgcaatcacagcgacgagggcgatgcgagcgatgaacctatcctgttgcactaccaatatgaacgaaacgct

SEQ ID NO: 82089 - DNA, 558 bp, Saccharomyces pastorianus
atgagcgtccaagcagaaatagggatattagatcatgtagatggttcatctgaattcgtatcacaagacaccaaggttatttgttctgtaacaggccctattgaaccaaaagcaagacaagaactgcctacacaattagcattagaaattattgtacgtcccgcgaaaggggtggccacaacaagagagaaggtactcgaagataaattacgggcagttctgaccccactcatcactcgtcattgttacccaagacagctctgccagataacttgtcaaattctggaatctggtgaagatgaagccgaattctccctgagagagctaagttgttgtataaatgcggcatgtttggctttagttgatgcaggaattgccttaaatagtatgtgcgcaagcatccctattgcaataatcaaagacactagtgatatcattgtcgatcccactgccgagcaattgaagatttcgctctctgtccacactttagctctggagttcgtcaatggcggtaaagtcgtgaaaaacgttttattgttagcagcaatggtgatttaa

SEQ ID NO: 82090 - DNA, 102 bp, Saccharomyces pastorianus
atgaaccagttaagatgcataaaatatctctgcatatatggtaataacaaggagcccaataccaagaatagattacattctgctgaaaaaaaaaaaaaatga

SEQ ID NO: 82091 - DNA, 702 bp, Saccharomyces pastorianus
  modified_base (419)..(452): a, c, g, t, unknown, or other
atgggtatggcgccggattgggttttttcatcaagaattttgaggatattccactattggataacgagtggtgcatacatgccatcgatttgcctgggtatggtttcttcaagacctaagtttccattcgagtatccgagagataatattcacagcgttcaagattggtttcacgaaagaatacacacatggtttagtaaaagaaatcttgtgaaccgacctgagaaaaacattgttatggcacattctttagggtcttacttgatggctttatatttgcaaaaatataaggaatctccatcttttaaaaagctgatcctttgttccccagcaggcgtgtcttatagagatttcaacaatactgcttcagaggttgaaaaatggaaaccgcctccttggtggtatgtcaagctttgggnnnnnnnnnnnnnnnnnnnnnnnnnnnnnnnnnnttttcgccagttaggttcgaagattacaagtggatggtcatatcggcgctttaagcacattttgaatggtgatccagaacagtcaaaacggtttgaagccttgcatagatacgcatatgctattttcaataagcgtggttcaggtgaatacttattaagctttgctttgaaatgtggtggtgaaccaagactttcattggagcgcagctattcgatggcaaaaggggatcctctagagtcacctgcagca

SEQ ID NO: 82092 - DNA, 558 bp, Saccharomyces pastorianus
atgttcaagtcaactttaaactccataataagaagacccttgaaaggttttcaacttcttagaggggctgacccatcgaatacacggccacagtcccctagagcctccgcaagagatgttacagagaaacagatattaagaactccgtcagcaccaactgcaataccattaagggagattatctatagagtcccaagcttgtttcctcgccctttagaagattctgttaaggacttccgagattttatcaagaacgaggatgcattccagactgaacttttgaaaacgctgccattctaccccactccttcggaatcaaaaacagcaagacttataagaactgttgttgatgatgagggcaattacatcaatgaattttgcatacgccctcgaaaaacctcagtgcctgaggctgacttaaaacatctggttttcattcatgggtatggcgccggattgggttttttcatcaagaattttgaggatattccactattggataacgagtggtgcatacatgccatcgatttgcctgggtatggtttcttcaagacctaa

SEQ ID NO: 82093 - DNA, 114 bp, Saccharomyces pastorianus
atgggtaaaggtaagccaagaggtttgaactctgctagaaagctacgtgtccacagaagaaacaagtatgttgactatttcaaaattaaaaaaactatcaaccccctattgtga

SEQ ID NO: 82094 - DNA, 126 bp, Saccharomyces pastorianus
atgtcaagacacaagtacaagttatggatgtgcatcgcaaagggaaaaaggggagtgggggaaagaaatacgtttgtccctaagtgctcttatgctcccttttgtgcttcagaggttcttgatcaa

SEQ ID NO: 82095 - DNA, 2481 bp, Saccharomyces pastorianus
atgctattcaatatcaaccgtcaagaagacgacccctttacgcaattgatcaatcaatcttcggcaaatacgcaaaatcagcaagcgcatcagcaggaaagcccttatcagtttttgcaaaaggttgtgtccaatgagccaaaaggtaaggaagagtgggtctcgccatttagacaagatgccctcgccaataggcaaaacaaccgggcatatggggaagacgcaaaaaacagaaagtttcctaccgtaagtgctacttctgcctattcaaaacagcaacctaaggatttagggtacaaaaacataccaaaaaatgctaagagagccaaagatattagatttccaacttatctaactcaaaatgaagaaagacaatatcagttactaactgagttggaactaaaggagaaacatttgaaatatttgaagaagtgccagaaaattactgacttaactaaggatgaaaaagatgacactgacactactacttcttcgtccacttctacatcatcatcgtcatcgtcatcgtcatcgtcatcgtcttcatcagatgaaggggacgttacttctactaccacatctgaggccactgaagcaactgctgacactgcaactacgacaaccactaccaccagtacttctactaccacatctgaggccactgaagcaactgctgacactgcaactacgacaaccactaccaccagtacttctactaccagcacttctactactaatgctgtcgaaaatagtgctgatgaagcaacttccgtggaggaagaacatgaagacaaagtgagtgagtctacttcaattggcaaaggcactgctgattcagctcaaattaatgtagcggaaccaatctcatccgagaatggggtgttggaaccacgcactacagatcaaagtggcggttcaaagtcaggtgtcgtgccaacagacgaacaaaaggaggaaaaatctgatgtaaaaaaagtcaatcctcccagtggggaagaaaaaaaggaaatggaagcggaaggggatgcagaagaggaaaccgaacaatcgtctgcagaggaatcagccgagagaacgtctactccagaaacctcggaaccggaatccgaagaagatgaaagcccaatcgatccaagcaaggctcccaaggtcccttttcaggaaccttctcgaaaggaaagaaccggaattttcgctttatggaaaagccctacttcttcatctacccaaaaaagtaagaccgccgctccatccaatccagtggccactccagaaaatcctgaattaattgtaaagacaaaagaacatggttatctatcaaaggcagtttatgataaaatcaattatgatgaaaaagttcatcaagcatggttagctgatcttcgagcaaaggaaaaggataaatatgatgctaaaaataaagaatacaaagacaagctacaagatttacaaaatcagattgacgaaattgaaaattcaatgaaggccatgagagaagagacttctgagaaaattgaagttagtaaaaaccggttggtcaaaaaaatcattgacgttaatgccgagcataataataagaaactaatgatattaaaagacactgaaaatatgaaaaaccaaaagttgcaggagaaaaatgaggtcttggacaaacaaaccaacgttaagtcagaaatcgatgatttgaacaatgagaaaacgaatgtccaaaaggagttcaatgactggaccacgaacttaagtaacttatctcaacagttggatgctcagatctttaagattaaccagattaatttgaaacaaggcaaagttcaaaacgaaatcgataatctagaaaagaaaaaggaggatttggttacccaaactgaagaaaataagaagctgcatgaaaaaaatgtacaagttttggaaagtgtagagaacaaggaatatcttccacaaattaatgatattgataatcaaatatcaagcttattgaacgaaatgaccataatcaagcaggaaaacgccaatgaaaaaactcaactatcggcaattaccaaaagactcgaagatgagcgccgcgctcatgaagaacagttgaagctagaagctgaagaaagaaaacgcaaagaagagaacttattggaaaaacagcgccaagagctggaggaacaagcgcatcaggctcaattagatcatgagcagcaaattactcaagtcaagcaaacctataatgaccaattgactgaactacaggataagctggcagccgaagagaaagaactggaggcagtcaagagggaaagaacgcgattacaagctgaaaaggctattgaggaacaaacgcgccagaaaaacgctgatgaggccttgaagcaagaaatattgagtaggcagcacaaacaagctgaaggtatacacgcggctgaaaaccacaaaataccaaatgaccgttcacaaaagatacgagcgtccttccaaggacgattccttgtatga

SEQ ID NO: 82096 - DNA, 750 bp, Saccharomyces pastorianus
atgtccagttgtaaaaccactttgtctgaaatggttggttctgtgacaaaagataggggcactatcaacgtcaaagccagaacacgttcgagtaatgtaactttcaaaccgcctgtaacccacgatatggtgcgttcgcttttcgatccaactttgaagaaatctctgctggaaaaatgcatcgcgctagctattatatcgaattttttcatttgttattgggtcttccaaaggtttggcttacagtttaccaaatacttttttctggtacagtatttattttggagaattgcttataatttaggtattggactggttctgcattaccagtcacattatgaaacactaacgaattgtgctaaaactcatgcgattttcagcaaaataccacagaataaagatgctaattcgaatttctcaacaaattccaattccttttcagaaaaattttggaattttattaggaagttctgtcaatatgagattaggtctaaaatgccaaaggagtatgatttatttgcctatccagaagagatcaacgtctggttgatatttcgccagtttgtcgatttaatcttgatgcaagattttgtgacttacattatttacgtttacctttctattccatatagctgggttcaaatcttcaactggagatctttgctaggtgttattttgattttatttaacatctgggtcaagttagatgcgcatcgcgtggttaaagattatgcttggtatctggggtga

SEQ ID NO: 82097 - DNA, 384 bp, Saccharomyces pastorianus
atgatcgctacctccagagccgtaaacatgaataaagaatcaaaacacaagaaggctgttgccaaaccatgcagagagagacaaacttcagttacaagagccatgacaccagctgtagcacgtgatccttgcagactttcgacgtcgtcgtctccttcttcgtcaccaatgtcagcacagagaaggctttcgagggaagaaataataaacgaaatggaaaaggagcaagacgctattgtagtaagacttctacgggaaattgaaactttaaaagaagaaaactctaggttaaaaaatcaactgcaccatccggtcccggctagaaggtcgtctccatttttcgaaggcgagtctgccatcctagatgatgatgactgcaattat

SEQ ID NO: 82098 - DNA, 1077 bp, Saccharomyces pastorianus
atgcccatgtgggatggtttctacaacgatgatgaaaaacaagcttatattgacgatgatgttttagaggctttgaaggagaacggtagttgtggatctaggaaagtatttgtatcctgtaatcatcacatccatcataactgcttcaagaggtacgttcaaaaaaagagattttcatcaaacgcgtttatatgtcctttatgccaaacattttcaaattgtactttacctctttgtcaaacctcaaaggcaaatactggtttgtcgctagatatgtttttggaatcagaactttctttggatacattgtcaaggctcttcaaaccttttactgaggaaaattatcgtacaataaactctatattttcgttgatgatatctcagtgtcaaggttttgataaagcggtaaggaagcgggccaacttttcgcataaggacgtttctttaatattaagtgtgcactgggcaaataccatttcaatgttagaaattgcttctaggttagaaaagccatacagtatttcatttttcagaagcagggaacagaaatataaaactttaaaaaatatcttagtctgcatcatgctgttcacctttgtcataggcaagccaagtatggagtttgaaccgtacccgcagcagcccgatactgtttggaaccaaaatcaactcttccaatatattgttcgaagcgctttattttctccagtttcacttcgtcagactgttacagaggcgttaacaacgttctctagacagtttctaagagattttcttcagggtctctctgatgcagaacaggttaccaaattgtatgctaaagcgtccaaaattggggatgttcttaaagtaagtgagcagatgctcttcgccctaaggaccatatctgatgtacgaatggagggattggactcggaaagtattatttatgatctagcttataccttcctgttgaagagtcttcttcctacgataagaaggtgcttagtctttatcaaagtgctacacgaattagtgaaagattctgaaaatgaaacgctggttatcaacgtcatgaggttgaagaagaactggatt

SEQ ID NO: 82099 - DNA, 3411 bp, Saccharomyces pastorianus
atgtccgttgctgatgatgatttaggatctttacaaggtcacattaggagaacactgaggtctattcataacctcccctattttaggtatacgagaggtcctactgaaagggctgacatgagcagagcccttaaagagttcatttacagatatctatactttgtcatttctaacagcggagagaacttacctactttattcaatgctcatccaaaacaaaaattatctaacccagagcttactgtttttcctgacagtttagaagatgctgtggatattgataagataacatctcaacaaactattccgttttataagatagatgaatccagaataggagacgcccataaacataccggaagaaattgtgggaggaaattcaaaataggggaacccttgtataggtgtcatgagtgtggttgcgatgatacttgtgtgctttgtattcattgttttaatccaaaagatcatgtgaatcatcatgtttgtaccgatatatgtactgaattcactagtggaatttgtgactgtggagatgaagaagcttggaattctccacttcattgcaaagctgaagaacaagaaaacgatatatcggaagaccccgccacaaatgccgacataaaggaagaagatgtatggaatgattcagtgaatatagcattagtggagttggttcttgcagaagtgtttgactattttatcgatgtttttaaccagaatatcgaacctctacccacaatacagaaagatatcactatcaaattaagagagatgacacaacagggaaaaatgtatgaaagagcgcagtttttgaacgatttaaaatatgaaaacgattatatgtttgacggaacaacaacagcaaagacgagcccctctaatagccctgaggcatctccatcgcttgcgaaaatcgatcccgaaaattacacggtaataatatataacgatgaatatcataactattcgcaggctacgactgccttgagacagggggttccagataacgtacacattgatctattaacatccaggattgacggagaaggtcgagcaatgttgaaatgttcacaagatttatcatctgtcttaggtggtttttttgctgttcaaacgaatggattaagtgccactttaacatcgtggtcggaatatcttcatcaagaaacatgcaagtatatcatcctttggattacatactgtttaaacataccaaactcctccttccaaaccacttttaggaacatgatgggtaaaaccctgtgttcagaatacttaaatgcaacagaatgtcgtgatatgacaccggtggtggagaaatatttcagcaacaagttcgataagaatgatccctacagatacatcgatttatctatccttgcagatggcaatcaaattcctttgggtcatcacaaaattctacccgaatcaagcacccattcactttcaccattgataaatgatgtagaaactccaacatcaagaacatattctaatacaagattacaacatattctttattttgataacagatattggaaaagactgagaaaagatattcagaatgtgatcattccaacgttggcctcttcaaatttatacaagcccattttctgtcgacaggtagtcgaaatattcaaccacatcacaagatctgtggcatatatggatagagaacctcagctaacagctataagagagtgtgtcgtacagttatttacatgccctacgaatgccaaaaatattttcgaaaaccaaagttttttggatattgtgtggtcaattatagacatttttaaggagttttgtaaggtggaaggtggtgtattgatctggcagagagttcaaaaaagcaatttaacaaagagttacagtatatcattcaagcaagggttgtatacggttgaaactttattgagtaaggtacatgatcctaatattccattgagacctaaggaaattatatctctattaactctttgcaagctcttcaatggagcgtggaagataaagcgtaaagaaggtgaacatgttcttcacgaagatcaaaatttcatctcctatttagaatataccacctccatttacagtattattcaaacagcggaaaaagttagcgaaaaatcaaaagattccattgattcaaagctttttttaaatgcaataagaattatcagttcatttctaggcaatagatcactaacatacaagttaatatatgattctcatgaagtcattaagtttagcgtaagccacgaaagagttgcatttatgaatcctttacaaacaatgctttcattccttatcgaaaaagtgtctttaaaggatgcatacgaagcgttagaagactgttcagattttctgaaaatatcggatttctctttgagatcagttgtattgtgctctcaaattgacgtcgggttttgggtaagaaatggtatgtctgtgttacatcaagcatcgtattataaaaacaatcccgaattacgttcctattccagagatatacatttgaatcagttagctatcctttgggaacgtgatgacattccgagaataatatacaatattcttgatagatgggaattactagactggtttacaggtgaagttgactatcaacacactgtctatgaagataaaatttcattcatcattcaacaattcattgcctttatttatcaaatattgactgaaagacaatattttaaaactttctcttctctaaaggatagaagaatggatcaaatcaaaaattcaatcatttataacctttacatgaaacctctttcgtattcaaagctactaagatcagttcctgactacctaactgaagatactaccgagtttgacgaagcacttgaagaagtctctgttttcgtcgagcctaagggccttgccgacaatggtgtttttaaattaaaagcaagcttgtatgcaaaggttgatccgttaaagttgctgaatttggaaaacgaattcgaaagtagtgcaactattattaaatcacatttggctaaggataaggatgaaatagcaaaagttgtactaatacctcaagtctcaataaaacagttagataaagacgctctcaatctgggtgcttttacaaggaatacggtatttgccaaagtggtctataaactactccaggtatgtctggatatggaggatagcactttcctgaatgagctactacatctagttcatggtatattcagggatgatgaattgataaatggtaaggactctataccagaagcttatttgtcaaagcctatatgcaatttactcttgagcatagccaatgctaaatcagacgtattttccgagagtattgtccgtaaagccgactatttgttagagaagatgataatgaaaaaaccaaatgactttttgagtcattaa

SEQ ID NO: 82100 - DNA, 186 bp, Saccharomyces pastorianus
atgtccagacgcaatccaccaggcagtagaaacgggggaggtccgacgaatgcctctcccttcattaaaagagacagaatgagaagaaatttcctgaggatgagaatgggtcaaaacggcagcaattctagttccccagcgtaccaaatggagacaacagcagggggatcctctagagtcgacctg

SEQ ID NO: 82101 - DNA, 186 bp, Saccharomyces pastorianus
atgaatttagatttaggttctactatacgaggctatgaatcagataaagacacatttccgcaatcgaaaggcgttagctcatctcaaaaagagcagcatagtcaactgaatcagacaaaaatagcttatgaacagagacttctaaatgattttgaggatatggatgatcctttagcttgtttttag

SEQ ID NO: 82102 - DNA, 1212 bp, Saccharomyces pastorianus
atgaaagtgcttgacctactaacggtactcagtgcctcttcattattatctacattcgcggctgccgaaagtactgctactgcagacagtacaactgcagcttctagcactgcttcgtgtaacccgttaaaaactacaggttgtacgccggatacagctttggcaactagttttagcgaagatttctcatcttcatccaaatggtttaccgacttgaagcacgcaggtgaaatcaagtacggttcagacggtttgtcaatgacactggcgaaaagatacgataatccaagtttgaagtctaacttttatatcatgtatggtaaattggaagttatcttaaaagctgccaatggtaccggtattgtttcatcattctatttacaaagtgatgatttggatgaaattgatattgaatgggtgggtggtgacaacactcagttccaatctaacttcttttctaaaggtgataccacaacatacgacagaggcgaatttcacggtgtcgacactcctaccgacaaatttcataactacactttagattgggcgatggacaagacgacttggtacctcgatggagagtctgtcagagtattatcaaacacatcaagtgagggttacccacaatctcctatgtacctaatgatgggtatctgggccggtggtgacccagacaatgctgctggtaccattgaatgggctggtggtgaaaccaactacaatgacgctccgttcactatgtacattgaaaaggtcattgtaactgattattctaccggtaaaaagtacacatatggtgaccaatctggttcttgggaatctattgaagctgacggtggttctatttacggcaggtatgaccaagcccaagaagatttcgcagttttagccaacggtggtagtatttccagcagctctacatcctcttctactgtatcttcctcggcgtcttccactgtatcttcctcggtttcttccactgtatcttcctcggcgtcttccactgtatcttcctcggtttcttccactgtatcttcttcgtcttctgtatcttcctcttcatccacatctccatcttcttcgaccgctacttcatctaaaacacttgcttcctcatcagccaccacatctagttccattagttcactcgaaaagcaatcctcctcttcatccaagaaaacagtggcttcctcttctacaagtgagtccatt

SEQ ID NO: 82103 - DNA, 420 bp, Saccharomyces pastorianus
atggttagagttgctattaacggtttcggtagaatcggtagattggtcatgagaattgctttgtctagaccaaacgtcgaagttgttgctttgaacgacccattcatcaccaacgactacgctgcttacatgttcaagtacgactccactcacggtagatacgctggtgaagtttcccacgatgacaagcacatcattgtcgatggtaagaagattgctacttaccaagaaagagacccagctaacttgccatggggttcttccaacgttgacatcgccattgactccactggtgttttcaaggaattggacaccgctcaaaagcacattgacgctggtgccaagaaggttgtcatcactgtccatcttccaccgccccaatgttcgtcatgggtgttaacgaagaacaatacacttctg

SEQ ID NO: 82104 - DNA, 516 bp, Saccharomyces pastorianus
atgcaaccatttcccacgtattcatcccttttaatagccgcacctttaaacgacaccaccccttataaaagcctagatgtagcagtgcgaagcgaactcgatacttgctcatcattgatttcggcatccttgtgtagaaaactacaaatgtctgacggaacactgtttactgatttgaaggagagaaagttgattaggaccattgtgccaagaggcttagtgcgttccttgaagctggacgttaagcttgctgatccaagtgacgcccagcaactttacgaaaaggagtttcccttacgtaagtatccaactttcgttggaccgcatgacgagtggacgcttacagaggcaatggctattgactactacttgatccatctgtcgagcgacaaggaagctgtgcgccagttgttgggtcccgaaggtgacttcaaaactcgtgcagatattttaagatgggaatcgctttccaacagtgatttcttgaatgaggttgtgaggtgtttttccctctaa

SEQ ID NO: 82105 - DNA, 372 bp, Saccharomyces pastorianus
atgtgtgataagtcaaaaacggtattggactacacgatagaattcttggataaatatatacctgaatggtttgagacgggaaataaatgccccttgttcattttcttctcgggcccacaaggctcaggcaaaagttttacaagtatccaaatctataaccatttgatggaaaaatatgggggtgaaaaatctatcggttacgcctcaattgatgatttttatttaactcacgaggaccaattgaaactcaatgagcaattcaagaacaataagctgttacaaggacgtggtttaccaggtactcatgatatgaaattgttgcaagaggtattgacaccgacctgcaggcatgcagcttgcactgccgtcgtt

SEQ ID NO: 82106 - DNA, 669 bp, Saccharomyces pastorianus
atgtctgcaaaacagcaactacgtatattggttccggtgaaaagggtagttgatttccagatcaagcctagagtaaataagaccttaactgggattgcaaccagtggaatcaaattcagtatcaaccctttcgatgatattgctgtcgaagaagccatcagaattaaagaaaagaacaagagtttagtagaatctacgcatgcagtttctattggctccgccaaagctcaggatattctaagaaattgcctcgctaagggaatagacacctgtagtttaattgactctgtgggtaaagaaaacatagagcccttagcaattgctaaaatcttaaaagctgttgttgaaaagaagggttctaatctggttttgatgggaaagcaagccattgatgatgactgtaacaataccggtcagatgttggcaggtttattaaattggccacaggcaacaaatgcggcaaaggtggaattccttgataatggtaaagttcaagtaacaagagaaattgacgatggagaagaagtaattgaagcctccttaccaatggttattactacagatttgagattgaacactccgcgttacgtaggactgcccaaagtaatggaggcgaagaaaaagctattgaaaattggatatagcaaagatttcctgaaattattttga

SEQ ID NO: 82107 - DNA, 1797 bp, Saccharomyces pastorianus
atgcaggggagaaaaaggacgcttacggaaccatttgagccaaataccaatccatttggggacaatgcagcagtaatgacggaaaatgttgaggataacagcgaaacagatggtaaccgtctagaatcaaaaccacaagctttggtcccaccagctttaaatatcgtgccaccagagagcagcatccacagtactgaagaaaaaaaaggtgacgagtacaatggaaatgataaagatagctccttaatctccaacatatttcgtactcgtgtcggaaggagtagtcatgaaaacttgagcaggcctaaactctcacttaaaacagcatcatttggtgccgctgaatcttcccggcgtaatgtttcaccctctacaaaatctgccaagtctagttcgcagtatattgatttaaatgatgaaaggctacgcaggcgtagcttcagtagttatagccgatcatctagtaggcgtgtttctaattcaccaagctcaacggataggcctccacggtcggcaaaggttttatcgctaattgccgctgatgatatggatgattttgaagatttgcaaaagggatttaaaagtgcaatagacgaagagggcctgacatggctaccccaattaaaatcagaaaaaagccgttctgtatcagacgttggagaagatagaggagaaggagaacaagaatctatacctgacgttcatacacccaatgtaggagcaagcgctactccaggatcaattcatctaacacccgaacccgcgcagaatggttcggtatctgagggtctagaaggctctattaataattcaagaaagaaacccagtccaaagttttttcatcatttatcaccgcaaaaagaagataaagaccaaacagaagttattgagtatgctgaagacattctagattttgaaacccttcaaagaaaactggaatcaaggccctttgtgctttatggacattctcttggggttttctcgcctacgaatccgctaagaataaaaattgctcgttttttgttgcataggcggtattcgttactttacaacactttgttaacattttatgccattctcctggcgataaggacatataaccctcacaatgtggtttttttataccgtttctctaactggaccgactatttcatttttattttatcagcttgctttacaggcaatgatattgctaaaataattgcgtttggattttgggacgattctgaaatgtttaaagcctatggacgtgagtataaatcaatcttacagagatctggaattatgaaactatacatatatctgagagaaaagtatggtagaaagctaatagatttcattattccatttaggatcatatcgccgggagaagagacaaaatatcaacgaagttcgttgagtacttccctgacgaaaccttatggggcaaaggaaaatcagaggccttttggcaccccaagagcctttgcgagatcatcgtggaatagaatagatctggtatcttctgtcagtttttggctaggtatgtttttatccataagaagttatgatacaaaaacaggcataagaatattcaagccccttgctatattaaggattcttcgacttgtaaacgtggatactggtatgccctcaattctaaggggattgaaatatggtatcccacagttggtaaatgttagttcaatgctagtttacttttggattttctttgggattttgggagtacagatttttcagggctcttttcgaacacaatgtgtatggtttaacctgaagatccgaccgatactacca

SEQ ID NO: 82108 - DNA, 1230 bp, Saccharomyces pastorianus
atggctactccccatttatattacagatataactccaaaagctctaacaaaaatatcaattctagcggaaattctacagaggttgaccgtttcattccaaaatcagtttcgagaaatgcttataagtctattccaatgttaaatgggtttgacataagttactcagaactttgcgagaaatctccttcacctgagcggctatcatcccctgaattctttaacgaactgcgaaacaccgggcattacgaatcaatcagtacaacaaatgagttttccatgtcaagtatctctagctcttctgagagtcaagttaccagaagtggaagtgcaagagcttcaagaaacgattattcaaaattaactaaagagcaaaaggaccatagaaagaatattgcacattctcttggttttcaattgcccgaccgtgtctttacgtttgagaccacaagtgctgaaattctggaaaagaataaagccatcaaaaattgctttggaccaggaagttgcgccgaaataagatcaacctttgactttagtacactctcgcccgatgttgcccgttattatatcgctaattctaacgcaagatcagcttccccacaaagacaaatccaaagacctgctaaacgagtaaagtcacatattccataccgtgtattggatgcaccttgcctgagaaatgatttttattcgaacttaatttcttggtcaagaaccacaaacaacgttttggtgggactgggttgctccgtatacatctggtctgagaaagaaggagcggtatctatattggaccatcaatacttaagtgaaaagagagatttagtgacatgtgtctcattctgtccttacaatacttattttattgttggtacaaaatttggccgtattcttctttatgatcaaaaagaattttttcattccagcaacacaaacgaaaaggaaccagtatttgttttccaaactgaatccttcaaaggaatatgttgcctagaatggttcaaaccaggtgaaatttgcaaattttatgttggagaggaaaatggcaatgtgagcctcttcgaaataaagagtttgcatttccccataaaaaactggagtaaaagacaaaaactcgaagatgaaaatttaataggattgaaacttcattccacttatcaagctcaggcacagcaagtctgtggtacgttattaagagcttatgctttcacatacccttttttgatatag

SEQ ID NO: 82109 - DNA, 1461 bp, Saccharomyces pastorianus
atggatctattcaaaagaaaagttaaagaatgggtatactccctcagcactgacgaccattatgcagagtataaccccgatgaaacgcctacttttaacatgggtaaacgtttaaacagcaacaatggtcaggtaaatccctctcaaatgcatttgaatagtgtagatgaggaaatgagcatgggatttcaaaatggcgtgccatctaatgaagacataaatattgatgaatttacgtccacggagtcaaacgatggtgtctctgaaaccctcttagcttggagacacatcgatttttggaccagtgaacataatccagatttaaatgcaactttgagtgatccttgcacccaaaacgatatcactcacgcagaggaagacttggaagttagctttcccaacccagtaaaagcgtctttcaaaattcatgatggccaagaagatttagaatcgatgaccggtacttctggcttgttttatggcttccaactaatgacactagatcaggttgtagctatgactcaggcctggagaaacgtcgcaaagaacataaacaaaagatctcaacaaggtttatcccatgttacatctactggctcttcttcatctatggaaagactaaatggtaacaagttcaaactgccaaatatcccagatcaaaaatctattcctccaaatgcagtgcaaccggtatatgcacatcctgcttggattcctttaataacggacaatgccggtaaccatatcggtgttgacttggcgcctggtccaaatggtaaatatgctcaaattataacatttgggagggacttcgatacgaaatttgtcattgctgaaaattggggtgaatttctgttatcgtttgccaacgatttggaagctggtaattggtatttagtagatgacaatgacgactactttagcggtgatggtgaattggtcttcagggataagaaatctaatggtcctatacaagattatttcgaagttttaaaaagaagaacgtggatcaagtatcaagaaaacttgagatcacaacagcaaaaatctcaacctgacacatccttgcaggagcagaaatacgtgcctgccttgcaaaagaaagtggcagctgaacagccttctaccctcaacgcagaatccataaagggcgaagatagtggtagtgcagatgtacaatctgttcaagatcacgaatctgtcaaaattgtgaaaacagaacctagcgaagcggagactacaactgtaaatacagaaagccttggacaagcagagcatgaaatcaaagctgataatgtagacattaaacaagaaagcgagaggaaagaagacgaacagcaaccaaaggttgaagaaaaagaacacgttgaaaacgaacatgtcacagaatcagcaaaaaaagacgatgatgtaaataagcaaacagaagaaatgaacaaaaaaggaagaaaatcgaaataa

SEQ ID NO: 82110 - DNA, 933 bp, Saccharomyces pastorianus
atgaatagatcacctggtgagttccaaaggtacgcaaaggcgttccaaaaacaattgtccaaggtacagcaaaccggaggcagaggtcaagtgccttcaccaaggggggcatttgcaggcttgggaggtttgcttttactcggaggtggtgcactgttcattaacaatgcactgttcaatgtagatggtggtcatagagccattgtttattccagaatacatggtgtttcctctaggatatttaatgaaggtactcacttcattttcccttggcttgacacaccaattatttatgatgtgagagcaaaacctcgtaatgttgcttctttaacaggtaccaaagacttacaaatggtgaatatcacctgtagagtactttcaagaccggatgtggtgcaattgcccaccatatacagaaccttaggtcaggattacgatgaaagagtgttgccttccattgttaatgaagttttaaaggctgtagtggcccaatttaatgcgtcacaattaatcactcaaagagaaaaagtttccaggttgattcgcgagaatttggttcgtcgtgcaagcaaattcaatatcctactggatgatgtttctattacgtacatgactttttcgccagagtttacgaacgctgtagaagcaaagcaaattgcccaacaagatgctcaaagggctgcatttgtagttgataaagccagacaagaaaaacaaggtatggtagtgagggcacaaggtgaagccaaatccgccgaactgattggtgaagccatcaagaaatcaagagactacgtggaattgaaaagattagatacagccagggacattgcaaagatcttggctagctctccaaatagagtcatcttggataatgaagcattgttgctaaataccgtagtggatgcaagaatcgatggaaggggcaaataa

SEQ ID NO: 82111 - DNA, 288 bp, Saccharomyces pastorianus
atgaagttagattcaggaatatactcagaggcacaaagagttgtgagaactccaaagtttagatatattatgttagggctggtgggcgctgctgtggtaccgaccgcatacatgaggagaggctatacggttcctgcacatagcttagacaacatcaacggcgtagacacaactaaggcgtctgttatgggtacagaacagagagtagctatgacgaagggtaagagtttacaagagatgatggatgatgatgaagtaacgtatttgatgttctcttcaatcatgtaa

SEQ ID NO: 82112 - DNA, 1980 bp, Saccharomyces pastorianus
atgggtagaagaagtagagcagctatgctcccaacaaatatcattcttttacagaatttggtaaagcgtgacccagagtcctatcaagaggagtttcttcaacaatatgcacattatgaatcgctaagggacatttttatgttaaatgggcttgctggaggtgattctgcagctgccactaatgggctcgatgtaggaaatggatcttctacaatggcaggtactaacggtaccaccatgagcacttcaacttcgcaacttattgaattggttggcttcgtatctcaagtctgctcatgttttcctcgtgaaactgcaaacttcccgtctgaattaaagcagcttttgctggaacaccataagtccttgccatttgaattgaaagaaaaaatcttaagttgtttgacgatgttaaggaataaggacgtcattactgctgaggaattaattcaaagcttatttcctttattggttgcttactcttcccatggtaattcactcggcgttaattcacacgccaaggaattgaggaaaatcatttatacaaatttaatttctttattaaaaagttgtaatactaatggtaaaaaccaaaaattgaacaaatctacgcaggccgtttgctttaatttgctagatcaaccagattctcagggaatctgggccacaaaattaaccagagaactttggagacgtggtatttgggatgattcaagaacagtagaaattatgacccaagcagcattacatcaggatgttaagattgtcatgtctggtgtgatgttttttttggatgctgacagagaacgtgaagaaaattttgaagaaaattccgaggatgaggatgggtttgatttagatgcattaaggcataagatgcaagtcaataaaaaaacgggtagacgtggtaagaagctggagaatgccataaaaactgtgaagaagaagaagaagaacggaccgggtgctccccaagggtatttaaacttcagtgctatccaccttttgagagatccacaaggatttgccgaaaaattgtttaaggaacatctttcaggcaaaacgaaaaacaaatttgacatggaacaaaaaatatctttgatgcagctgttatcaaggttgattggtacccataagttaattgttttaggaatttacactttttttttaaagtacttaactccgaaacaaagagatgttacaagaattatgtccgcatgtgcccaagcatgtcatgatcttgtccctcctgaagttataaatgtcatggtgagaaagattgcagacgagtttgtatcagacggtgttgccaatgaagtcgctgctgcaggcattaataccattagagaaatatgctctcgtgcacctttggctatcgatgagattctactacaggatctggtagaatataaggggtctaaagctaaaggtgtcaatatggctgccaagtcattgatagcgttgtatagagacgtggcaccagaaatgctaaagaagaaggatcgtggtaagaatgccgccatggaagtacaagaagccaagaaaggaggtaaagattcaaaaagaccgcaatttggtgccgacaacagtgttcaagggattgctggtatcgaactgttagccaaatggaagaaagaacatggtgaagagagtgaaaatgaagacgttgatgccaactgggaagtagatgtcgatagcgaagaagacgatgtcgacggtgagtgggtcaccatggatagtgataaagaatatgacgttgatatggaagatagtgacgatgaaaaagacaatgctaagggcaaggaatcagattccgatttggaactaagcgatgatgacgatgaaaaagaggtgaaggatgagcaagaagatgcagatatagatcccgaagctgccttccgtgaaattgcttctacacgtattttaactccggcagatttcgctaaactacagaattgcgtaatgaggaagcgttgctaa

SEQ ID NO: 82113 - DNA, 903 bp, Saccharomyces pastorianus
atgtcaaactttgaatttgatggtgttgaatacacattcaaagagagacccagtgtcgtagaggaaaatgaaggtaaaattgagtttagggtggtgaataatgataatactaaagaccacatgatggtcctaacggggttaaaaaacatttttcaaaagcaattaccaaaaatgcccaaagaatacattgccaggttagtctatgatcgaagtcatctttccatggctgtcattaggaagccattgactgtcgtaggtggcataacatatcgacctttcgataagagagaattcgcagaaattgttttctgtgccatcagttcgacggaacaggtacgcggttatggtgcgcatctaatgaatcacttaaaagactatgttagaaatacctcgaacataaaatattttttgacatatgcagataattacgctattggatactttaaaaagcaaggcttcactaaagaaatcacgttggataaaagtatatggatgggatatattaaagattatgaaggtggtacgctgatgcaatgttctatgttaccaagaatacgatatttggacgcaggtaagattttattattacaagaagcggccctgcgaagaaaaataagaacgatttcgaaatcgcatattgtgaggcctggtttagagcaattcaaagacttaaacaatatcaaaccgattgatccaatgactattcctggcttgaaagaagccggctggactcccgagatggatgcgttggcgcaacgtcccaagcgtggtccacacgatgcagcaatacagaatatactcacagagctacaaaatcatgcagcagcttggcccttcttacaacccgttaataaagaggaggtccccgactattatgatttatcaaagagccaatggacttga

SEQ ID NO: 82114 - DNA, 183 bp, Saccharomyces pastorianus
atggtcacaaaacatcagattgaagaggatcacttggatggagctacgacggatcccgaagttaaacgggtaaaattagaaaacaacgttgaagaaatacaacctgagcaggctgagaccaataaacagagggcaccgataaagagaataaaggaaagttcgagaaagaaactgagagaatag

SEQ ID NO: 82115 - DNA, 1629 bp, Saccharomyces pastorianus
atggtagattcaattcaccgtattgcatcggcgttggatacggccaaagtaataacgagggaagctgccgcggtagccacctctaagctgggtgaatcctcctatacttattattctcaaaacatcaatcctcaacagttagtcaccttgttaaattctaggaactctagagaagttagagatgcaatgaagagaataatatctataatggcttccgatgatgactctattgacgttcaattatactttgctgatgttgtaaagaatatcaccactaatgacaccaaagtgaaaagacttattcacctgtatttacttagatttgcagaaaatgacccaaacctgaccctgttatctattaattctcttcaaaaatcattgtctgattcgaattccgaactgagatgctttgctttgagtgccctttctgacatgaaaatgtcatcattagcacctataattttgcatactgtcaagaaattggttacagatccatctgcaatggttcgtggtgaagtcgccttggccattatcaaattatatagggctggaaagaatgactatcatgaagaattgttggatattctgaaagaattaatggcagatacagatcctaaggtgatatcctgtgctgtcctagcttacaaagaatgttatgcggatcacttggagctattgcatggacattttcgcagatattgtagaataattaagcaactagattcgtggtcacaatcatatttaattgagctgctaatcaagtactgtaagcagtatttaccaaaaccaactgtggtcgataaatcatcagaaggttccccaaggagttgtcctttaccagataaatacaacgagattgaatacccatcttacgaggtggtaaatgaccctgatttagatttatttctacagagtttgaattgcttaatttatagttccaaccctacagtgattttatcgtgttgcaatgcgctatatcagttagcttcaccattgcagatgaaaaatactaaatttattgaagcattggttagaacggtaaccatgacagaaaaccaaggtaacaaagaaatgcttttacaagcaattcacttcttatcgatcttagaccagacactatttttaccctacaccaagaaattttacgttttccccaaagatcctattgtggcatcaatttggaagatccaaattttgtccacgttaataaatgaatcaaacgttaaagaaatattcaaagaattgaaatattatgttgccagtgctcatttcccagaaaatgttgttattatggcggttaagtcattatctcgatgtggccaattgtcaacgagttgggaatcacatgtaatgaagtggttaattgatcatatggaatcccacaacctctctgcttctgtcctagatgcatacgtgaatgttatcaggatgctggtgcaaaaaaatcctacaaaacatcttcgcataatcttcaagcttgcagatttattaacagttcaaacgagtttggctgataatgctcgtgcaggtattgtttggttatttggtgaaattgcctcgattgaatttaagatatgtccggacgttttgaggaggctaatccagaattttccaaatgagggtcctgag

SEQ ID NO: 82116 - DNA, 777 bp, Saccharomyces pastorianus
atgcataacatccaattagtgcaagagatagaaagacatgaaaccccgttaaacattagacctacctctccatacactttaaaccctcctgtcgagagagatgggttttcttggccaagtgtgggtacaagacaacgtgcagaggaaactgaagaggaggaaaaggaacgaattcaacgcatttcaggcgctatcaagacaattttgaccgaactgggtgaagatgtcaacagagaaggtctactagatactccacaaagatacgctaaagccatgctttatttcactaaaggttaccaaacgaacattatggacgatgtcattaagaatgctgtctttgaagaagatcatgatgaaatggttattgttcgtgatattgaaatttactcgttatgtgaacatcatttggtgccatttttcggcaaggttcatatcgggtatataccaaataaaaaagtcatcgggttaagtaagttggccagattggcagaaatgtatgcgagaaggctccaagttcaagaaagacttacaaagcaaattgcaatggccctaagtgatattctaaaaccattaggtgtagccgttgttatggaagcttctcatatgtgcatggtttcaagaggcattcaaaaaacgggatcttctacggtaacttcttgtatgcttggagggtttagggctcataaaaccagagaagagtttttaactcttttaggaagaagaagtatttggaaaaaaaaaataaaagcgacgatatatcgtgtatgtattaactaa

SEQ ID NO: 82117 - DNA, 507 bp, Saccharomyces pastorianus
atgaaattatcgactagtttattaatgaacaaggcgataaaacctaatgttggaaagaaagagctacgtcagcaagagatagagaaaatggacccacagacgctcattactaaggccaataaggtttcttactatggcaaccctacgagtaaggaatcatggaggtatgattggtaccaaccatctaaggtgagctccaatgtgcagcaaccacaacaacagctaggggacatggagaataacttggagaaatatccattcaggtataaaacatggttgaggaaccaggaagatgagaaaaatctacagagggagagctgtgaggatatattagatttgaaagaatttgatagaagaatactgaaaaagtcgttgatgacatcgcacactaagggtgatacaagtaaggccaacggtgctccttctgctaaccaaggagatgaagctcttagtgtggatgatataagaggcgctgtcggtaatagtgaagcatcctgggtatctgcg

SEQ ID NO: 82118 - DNA, 840 bp, Saccharomyces pastorianus
atgcaagtagaagggcctgacactaacttcgtgagtgatttggctttgggatcaaagaaaagaaggttatccaagacttctgtacaagaggatgatcatacaaatgtggtatcggaagtgaataagaataagaagaaaaaaaaggcaaagcctatgacatgcacattgctaaagtctgtggttgaaaaaggtattggtataaaggatgtaagagacatgactcaatacttgttgcaggctgaaaacaactctcccaaatggattgatatttgtaacaggtcaagtttacagaaaatgatagttctgttcattccaggtttacaaccagatgattttgagaacggcaaaaatacctttaatgaaatcagtgatgataacttcaaatatattcctggagaaattgcctccacgtttcatacatttcccgtgatggcgcctggttccaagatgacgctcttttcgccctacaattcatttattaatgttggattgtccaaaatggagaaaataaataaattgaaagagttacaaaagaagaagaaaattactattaacgatttggttctatccgaacaacagttagtggcaaacgattacccactggattctggagacaccaattttgatacagactgggtacaaactgttgactttacccatggtggctcccacatctttgcactagactgtgaaatgtgtctttccgaacaaggtttagttctaactaggatttctctagtgaattttgacaatgaagttatctatgaagagttggtgaaacctgatgtccccatagtggactatttgacacgttacagtggtataactgaagagaactaa

SEQ ID NO: 82119 - DNA, 1776 bp, Saccharomyces pastorianus
atgtctaccgctaccatacaggatgaagacattaaatttcagagagagaactgggaaatgataaggtcacacgtttcacccataatatccaatttaacaatggacaacttacaggaatcgcacagagacttatttcaagtcaatatacttattggccgcaacataatttgtaaaaatgttgtggattttactctgaacaaacagaatggcaggctaatccctgctttatccgctttgattgccttgctaaattctgatattccagatattggagaaactttagcaaaagaactaatgttaatgttcgtgcagcaattcaatcgcaaagattacgtgtcctgcggaaatatccttcaatgtctgtccattttatttctttatgatgtaattcatgaaatcgtgatcttacagattctattgctactccttgaaaagaattctttacgactggtcattgccgtgatgaaaatatgtggctggaaacttgcacttgtcagtaagaaaacccatgatatgatttgggagaagttaagatatattttgcaaacacaggagttatctagtacactacgtgagtcgttagagactctgtttgaaataaggcaaaaagattataaatctgggtctcaaggtctgtttatattggacccaactagttacacagttcatacgcactcctatattgttagtgatgaggatgaagccaacaaagaactgggaaattttgaaaagtgtgaaaatttcaatgaactaaccatggcgtttgatacgctacgacagaagctgctgataaataatacgtccgacacaaatgaaggtagtaacagtcaattacaaatctatgacatgacatctaccaatgatgtcgagtttaaaaagaagatttatttggttctgaaaagttcattatcaggtgacgaagcggctcacaaattgctaaaattaaagattgcgaacaatttgaaaaaaagcgtggtagatataatcatcaaatctagtttgcaggaatctacattctctaaattttattctattttgtccgaacgtatgataacgttccacaggagttggcagacagcttacaatgaaacttttgagcagaattatacacaagatatcgaaggttatgaaactgaccaactgcgaatcttaggtaagttttggggacacttaatatcttatgaatttcttccaatggactgtcttaagataattaagttaactgaggaagaatcgtgtcctcaaggaagaattttcatcaaatttttatttcaagagctcgtaaatgagctcggattagatgagctgcaattaaggctaaactccagcaagcttgacggaatgtttccgctggaaggagacgacgaacatataagatactccataaatttctttactgccataggattgggcctgctcacagaggatatgagaagccggttgacaattattcaagaagttgaggatgcagaggaagaagaaaaaaaattgagagaagaggaggaacttgaaaagttacggaagaaggccagagagtcacaaccaacccaagggccaaaaattcacgaatccaggttatttttacagaaggacaccagagaaaatagtagatcaagatcgccatttacagtggaaacaagaaaacgtgctagatccagaactccaccaagaggatcgagaaaccatcgtaacagatccaggactccgccaagaagaccgaaaaaccatcgcaacagatccaggactccacctgcaagaaggcaacggcatagatga

SEQ ID NO: 82120 - DNA, 1218 bp, Saccharomyces pastorianus
atggagggccgcaaaagtgaagatgaaaagaacgaagccgctttagtctgtgatgtctttgaatcctccaatgccaaactaccaaagaatgtattcagaagttcctttacttggtattgctatgaagttatcaataggtcagcattccatatttggttattgttatgtttaacgctcattgttggttggaaggttttttcaggcatcggtggtagaagaccatctgactcaaacatggacggcccccaaaccaaacataaacggaatccaggttttttgaggcgtcattcggccatcgttatcttagttatatctttagcagtgtctttctcatgggaagctttcaaaatgtatcgtgaacgcaccttcgggaaacaaatcactcagtttgccaaagaaattattaaaagtgcgccaagcacagatatggaaagctgggaccgtgttgcagcggattttaactcttatatgtacgaaaataaactttggaacacagaatactttttttttgatggttctagctgccatgtagcatttaggagaacccttctatggatttcctcaagaattgacggcgactataaaatagaatattttaggaaacacccttatattgaagaagcccttaaagtatattttgcagaagtggatagaaagtggaatttaaatacttctcagcaattgttaagcaatatttcggttggaaatatcaaacttcctggtcaatcatgtcgtttcaaattatttcatattttcaagaaagtcatgaaacagcgtttttctcaagtagcaactgttatattcttcgtcatgagtatccgttctccaagaaatctcggctttttttttactcttgccctttttgtcgtacttgtttgctcccaggaatggttctcctttgaaatgaatagatcttgttcaatgaaagtggaacatagaatgcaatttttgtcaactataatcagtgaacatcagaaatcggatgtgaattgttgggaccaaatcgcaaagaagatgaatgtatacttatttgagcagaaagtttccggctcagacgtgtttttcttagatggagcagattgtgagcgctttttcgaacgtaatttcctccgttatctaccctcaagaaagtcttcccatcctgacctaccaattgctgaattgttgccgtatatcagaaaagccgacattgcctgtgctggtaagcaattgatttaa

SEQ ID NO: 82121 - DNA, 342 bp, Saccharomyces pastorianus
atgtactcgtcagcatcccctataggagctggcgcgtccgttgtggaattagcaatatcgttcttcacgctgaataacaagtttagtctgttgcgctcttgctggatggaggacctgatattgcggaagctcttccagtggtcttgtaagatctccttgtggcgctgcagttgggaaagctttgaggcggagattgccgggttagaatcgcagatttgtgttaatgaatcgattacatcctgtctctggcctaagattccctccaactgcttgtctatcttcttttcttggccagtttgttctgaactgggatcctctagagtcgacctgcagcatgcaagc

SEQ ID NO: 82122 - DNA, 1341 bp, Saccharomyces pastorianus
atggatagaacgtggctattactgacgtggctgttgctactctgtggggtagttcaagggaaccaagaaagcataaatcaaaaatatcacgatgtctgttcagggatgtattccaaggaggatttcaatggaaaagttgacccctatatatcgtttacgttggaggaattgtcacttgctgatgaagacgatgatggcgagggggttagtgttgctgtgtttgatttgaaagattatgagcatattggtgtgcggttaccaaatggagaaattcagtatatttgcgatgactacgcattggatttgggcctctgtgaggattcgtcggaggggcaatttatcattcaagagacagccatcgatccgttcaccagtaaggaacataagctaacgagtcagattttgactttcactcaacaagaattgggcactaacgacaaggtatactcaattaacaaaactggttactattgtgtgaccacgtcatctttcatttcttccagttccaagtttaaggctactgtgaattttaggaacgcttacggtcaattggacgcttcagaggcgtacaagatgcctatttatgcctttttggccgtagcttatgccgtctgtacattagtgtactcttggctatgctggaagcatagacatgagttactgcctttacaaaggtacattttggtattttgtattttcctaacagctgatactattttcgtctggatgtactatattattgagaaccagaagggaaactccaacgtcgctcttcatgtctatatggttttcatatcgatctttagcgccggtaagatgactttcacgcttctcctcgccttgctgatatctcttggatatggtatagtatatccaaaactggaccgtacattgctaagaagatgtcaaatatttgcgatatttacgtttgcagtgtgcgttgcattcctggtccaaaaatattcccagaattctgagtctttatccaatttgattttgattactgctatccccttagtattatgtctattcgctttctattatttgacactgtcttcaatgaacaaaacaatgacttatttgagggaacaaaaccaagtggtgaaattaaacatgtacagaaaactgatcatattgtgttatatttcgttgtttatactcttcttaggcttactagtctccacttttgcatacgtcggtatggacactgttgacatgatagaacaatattggaaaacagaattcctcatcacagatacttggcctagtttcgtttacttcttggtcttcgtcattttcgcatccttctggagacctacaagtacatcatatttactagcg

SEQ ID NO: 82123 - DNA, 1218 bp, Saccharomyces pastorianus
atgcagagacacgtttttgcgaggaatttcagacgtctttccttattgaggaacccttcccttaccaaaaggtttcagtcgtcagcatccggtgcggccaacacccctaacaataacgatgaggtgatgctgttgcaacagaaacttttgtatgatgaaattagatcagaattgaagtctctatctcaggtaccagaagatgaaatattacctgagttgaaaaagtcattagagcaagacaaactctctgacaaagaacagcagctggaggctgaattgagtgactttttcagaaattatgctctgttgaacaagttgtttgacagcaagacattagatggacaatcttctacaacgacagcagcagccacgccaaccaagccttaccctaaccttataccttcggccaatgacaaaccatattcctctcaagaacttttcttgcgtcaactaaaccattccatgcgtaccgctaaattgggtgccactatttcgaaggtttactatcctcataaggacattttctatccgcccctcccagaaaacattactgttgagagcttaatgtctgctggtgttcacttgggccagtctacctcactttggaggtcttccacacaatcctacatatacggtgaatataaaggtattcacataatagatctaaaccaaactttgtcctatttgaagagagccgccaaggtagtagagggcgtttcggaatccggtggcattatcctatttctgggtacaagacaaggccagaaaagagggctcgaggaagctgctaagaagacacatggttattatgtgtctaccagatggatcccgggtactttgacgaattctacagaaatttcaggtatctgggagaagcaggaaatcgactctaatgacaatcccaccgaaagagcgttatcaccgaatgaaacatcaaagcaggttaagcctgacttgctggtcgtattaaatcccacagaaaatagaaacgctttgttagaagcaattaaatcaagggtcccaactatcgcaatcatcgatactgactccgaaccttctttggtgacctaccctatcccaggtaacgatgattcattgagatctgtcaatttcttactaggagtcttggcgagagctggccaaagaggcttgcaaaatcgcttggccagaaataacggaaaaatgacacttttattttcttttggcttgttaacctaa

SEQ ID NO: 82124 - DNA, 138 bp, Saccharomyces pastorianus
atgtccactgattctattgttaaagcctccaactggagattagtcgaagtcggccgtgtcgttttgatcaaaaagggtcaatccgcaggtaaattggctgctatcgttgaaattatcgaccaaaagaaggtatgttga

SEQ ID NO: 82125 - DNA, 1329 bp, Saccharomyces pastorianus
atggggtgtacagtgagtacgcaaacaataggagacgaaagtgatccttttctacagaacaaaagagccaatgatgtcatcgagcaatcgttgcagctggagaaacaacgtgacaagaatgaaataaaactgttactattaggtgccggtgagtcaggtaaatcaacggttttaaaacaattaaaattattacatcaaggcggtttctcccatcaagaaaggttacagtatgctcaagtgatatgggcagatgccatacaatcaatgaaaattttgattattcaggccagaaaactaggtattcaacttgactgtgatgatccgatcaacaataaagatttgtttgcatgtaagagaatactgctaaaggctaaagctttagattatatcaacgccagtgttgccggtggttctgattttctaaatgattatgtactgaagtactcagaaaggtatgaaactaggaggcgtgttcagagtaccggacgagcaaaagctgctttcgatgaagacggaaatatttctaatgtcaaaagtgacactgacagagatgctgaaacggtgacgcaaaatgaggatgttgatagaaacaacagtagtagaattaacctacaggatatttgcaaggacttgaaccaagaaggcgatgaccagatgtttgttagaaaaacatcaaaggaaattcaaggacaaaatagacgaaatcttattcacgaagacattgctaaggcaataaagcaactttggaataacgacaaaggtataaagcagtgctttgcacgttctaatgagtttcaattggagggctcagctgcatactactttgataacattgagaaatttgctagtccgaattatgtctgtacggatgaagacattttgaagggccgtataaagactacaggcattacagaaaccgaatttaacatcggctcgtccaaattcaaggttctcgacgctggtgggcagcgttctgaacgtaagaagtggattcattgtttcgaaggaattacagcagttttatttgttttagcaatgagtgaatacgaccagatgttgtttgaggatgaaagagtgaacagaatgcatgaatcaataatgctatttgacacgttattgaactctaagtggttcaaagatacaccgtttattttgtttttaaataaaattgatttgttcgaggaaaaggtaaaaagcatgcccataagaaagtactttcctgattaccagggacgtgtcggcgatgcagaagcgggtctaaaatattttgagaagatatttttgagcttggacctgcaggcatgcaagcttgcactgccgtcgtttaca

SEQ ID NO: 82126 - DNA, 144 bp, Saccharomyces pastorianus
atgcatcgtaaaaaaagaaaaaaagaaaagaaaagaaccgaaaaagacaatacaaccaaccttcctccactttttctttttccttgttctctctcgcttcctacgttacttgcgcctgtgcactacattcctttcccagattaa

SEQ ID NO: 82127 - DNA, 1500 bp, Saccharomyces pastorianus
atgggtgaagattttatgcacccaccgtttcaaacgtacccttcaaagaacagcgaagggaaaaaacatattgtcattgtaggtggcggtatcatcggttgctgtactgcttactacttgacccagcatccaagtttcagcccttcgacgcatcatattaccatcattgaatcgaggcgcattgctggaggggcttctggtaaagcaggtggcttacttgcatcttgggctttccctcatcaaatcgtacctttaagtttccagctacatcaggagttgagtgatgaatatgatggagaaaacaactgggactacagaagattgacaactgtgtccttagaagcagatgttcgcgaagaagtcattgaaaactacgaaagactgagcaagaaggcatataatctgaacgtccctcctccaaagaagagaccaggctacatatccaacaagtttaacatcggggactctaattcatctttgagttcttcgggctcttctttgaaaaacgactccgctagtaacgaggaagaaggatcagacgttcatgtttctagctcagtacccagtttacattctctaacaaatgagcgcatgaggagccacacaaatagcgcatctgatcttgactctgtaagtcccgcggagcaactgagagagactaatatccataatcctttgcctgctgatttagattggataagaagagaattggttaatgattggtcatcactaggtggtactgataccacagcgcagcttcatccctataaattcactcatttcatcttatcgaaggcaatggaaacaggtgctgtcgatcttctcctaggtaaggtagttgggctaaagtgtgacgagatggattgtgttcattctcttaagtaccttccatctgtcgtcaagaatcgcagaaatagcagagggcatgcagaaaattcagacattaagctgggtacaatcttcaacgatgagaacgcaaagcccattgaaatcaatgacatccagcagattgttttgagtatgggaccctggacttccaagattctaaaagattgtccaatttctggattgagagcccactctgtcaccattaagcctagtgaaaagacagtttcaccttacgctattcttgctgaactaaaagttaacgaccgtgaatttttctcccctgaaatgtatgctagaaaagatgaagtttatgtgtgcggcgaaggcgacactttggtcaatatacctgaaagttcggacgatgtggaggtagtttcggagaagtgtgatgaattgtaccattacgtatccaaattatcgccaactctatcaaagggccatctcttgcggaaacaagcctgttttttgccagttttaaacgttcctacaagttctggtcccttaattggtgagacaaatgtcaaggatctttatattgcaagtggacattcttgttggggtattaacaatgcgccagcaacaggtaaattaatggctgagattctcccttga

SEQ ID NO: 82128 - DNA, 1203 bp, Saccharomyces pastorianus
atgtcagacggcactcaaaaactatggggtgggagattcactggtgaaaccgatcctttgatgcatctttacaatgcctctcttccgtatgattataagatgtataaggcagatttagaaggaactaaagtatacacagcgggcttgcagaagttgggtcttctaacggagacagaattggcaaagatccatgaaggtttggctgaaatcaaaaaagaatgggacgctgacaaatttgtccgtcatccaaacgacgaggatatccatactgcgaatgaaagacgtcttggtgaactaattggccgcgatattgctggtaaagtccacaccggtagatcccgtaatgatcaagttgttaccgatttgagaatatactgtcgtgacattgtcaatgacaccctctttccagctctaaagggcttggttgaagttctaattaagagggccgaaggtgagatagatgtcttaatgccaggctacacacatttacaaagggcgcaacctattagatggtctcattggttgagctcttatgcaacatacttcaccgaagattacaagagactgggtcaaatactacacagattgaatcaatcaccactgggtgcaggcgctcttgctggtcatccttacggcattgatagagaatttttggctgaaggtttgggtttcaatagtgtaattggtaactccttggttgctgtttctgatagagatttcatcgtggagttgatgttttggggaactttgttcatgaaccatatttctcgttttgctgaagatttgattatatattgtacagcagaatttggtttcatacagttgagcgacgcctattcaacaggttcttctttaatgcctcagaagaagaatgcagactcgttagagttgttaagaggtaaatccggtagagtatttggtgatctgacaggattcttgatgagtttgaagggtatcccatctacttatgataaagacatgcaagaagacaaagagccattatttgattgcttaacaactgtagagcactccatgctgattgccacaggtgttatttctaccttaactgtaaataaggaaaagatggaagctgctctcacgatggatatgctagctaccgacttggcagattacttggtcagaaagggtgttccattcagagagactcatcacatatctggtgagtgtgtcgctactagctga

SEQ ID NO: 82129 - DNA, 312 bp, Saccharomyces pastorianus
atgcctgtttcggaagcgtttgccaagttgtgtgtgaatgagaagcctcctgctgaatctgccgttgcggtgaagtctttggtcttcaaaccaaagactccaaagtccgccacccctgttcctatcgttgtggtggctttgcaatctactactactccttctgcgttgattgccaacgctacgtccagtaaggatccaagattggctcgcgatgatttggtcaagcaagcgttccaatctgaatccgctagagctttcatcttgggggatttggctaacgccacttccaatttcactgcgattatcctttag

SEQ ID NO: 82130 - DNA, 675 bp, Saccharomyces pastorianus
atgagtgctcgcttatcatacggcgcaagccttgcgtcaatcccaagatgtttcgacttgaaatcttcgaagattactgtaatgggggatgatcattatggaaaaacttctctagttcgcaattggctaggtagttcatttcaaatatcagatgctaatcgttgtagggtttcggacctctaccacaagacaatccaatttgacactttcgtaaaatactatcgtacctttggcgtaaaaggacagttgccgaattatgtggatcttaaagctaaaaactctggcacaatttataaaagttgtggcaatttcctagaagagcgcctgatcaatgccaataaatcgactgctcaaagacgcaccagtattgatgttcaagttttcgataccaatcgaatggaggtttcgtacctttcggagctaactactcttcaaattaagcagtctgatgcaattatattatgtttcgattctactaatgacagctcttttgccagcttagagtcttatatttgtattattcaccacgtacgtttggaatgtgaattggttattccaattattatagcgtgtacgaaatgtgatcttgattcggaaagaacaattactcatgaaaaggttttaacatttatccaagagttgggtttctcgccaggcaattttagactattttga

SEQ ID NO: 82131 - DNA, 534 bp, Saccharomyces pastorianus
atgcgcagtatcaagtatccaaaaagtggtacgccaaatcctcatgcagagctatgggtttacagtatgaaagatggaacatcgttccatccaagaataagtggaaataaaaaagatggaagtctgttaattactgaagttacatgggtaggaaatggaaacgttttagttaaaactaccgatcgatcctcggacatattgactgtgtttttgatagatacaattgcaaagacttcaaacgtggtaaggaacgaaagttctaacggaggatggtgggagattactcataatactctgtttattccggcaaatgaaacatttgataggcctcataatggttatgttgatattcttccgattggtggttacaatcatctggcttatttcgaaaatagtaatagttcacactataaaacattgacagaggggaaatgggaagtggtgaatggcccacttgcctttgattcaatggaaaatcgtctttacttcatttctacagacctgcaggcacgcaagctggcactgccgtcgttt

SEQ ID NO: 82132 - DNA, 780 bp, Saccharomyces pastorianus
atggaaggtggcgaagaagaagttgagcgcattcctgatgaacttttcgatacaaaaaagaagcatttgttagataagctcataagggtcggaataatccttgtactcctgatatggggcactgttttgttgctaaaaagtatacctcaccattcaaacacaccagattatcaagaacccaactctaattacaccaatgatgggaaattaaaggtgtcgttttctgttgtaagaaacaatacatttcaacccaaatatcacgagctgcaatggattagtgacaataaaattgaaagcaacgatctaggtctttatgttacatttatgaacgatagttatgttgttaaatctgtctacgatgactcatataatagcgttttattagagggaaaaactttcattcataacggtcaaaacctcactgtggagtcaataactgcgtcgcccgacctgaagcggttattaattagaacaaatagcgtacaaaattggaggcactcaacgtttggttcttattttgtctacgataagagtagctcgtcctttgaggagattggaaacgaggtggctctagcaatatggtcccctaattctaatgatattgcatacgtccaagataacaatatatatatttattctgccatttccaaaaagaccatacgggctgtgaccaacgacggaagctcctttcttttaacggtaagccagattgggtttacgaggaagaagtttttgaagacgacaaggctgcgtggtggtcaccaactggtgattacctag

SEQ ID NO: 82133 - DNA, 630 bp, Saccharomyces pastorianus
atggaaggtggcgaagaagaaattgagcgcattcctgatgaacttttcgatacaaaaaagaagcatttgttagataagctcataagggtcggaataatccttgtactcctgatatggggcactgttttgttgctaaaaagtatacctcaccattcaagcacaccagattatcaagaacccaactctaattacaccaatgatgggaaattaaaggtgtcgttttctgttgtaagaaacaatacatttcaacccaaatatcacgagctgcaatggattagtgacaataaaattgaaagcaacgatctaggtctttatgttacatttatgaacgatagttacgttgttaaatctgtctacgatgactcatatagtagcgttttattagagggaaaaactttcattcataacggtcaaaacctcactgtggagtcaataactgcgtctcccgacctgaagcggttattaattagaacaaatagcgtacaaaattggaggcactcaacgtttggttcttattttgtctacgataagagtagctcgtcctttgaggagattggaaacgaggtggctctagcaatatggtcccctaattcgacctgcaggcatgcaagcttgcactgccgtcgttta

SEQ ID NO: 82134 - DNA, 102 bp, Saccharomyces pastorianus
atgagcttatctaacaaatgcttcttttttgtatcgaaaagttcatcaggaatgcgctcaacttcttcttcgccaccttccatgagtaatttggcttattga

SEQ ID NO: 82135 - DNA, 264 bp, Saccharomyces pastorianus
atgagcttatctaacaaatgcttcttttttgtatcgaaaagttcatcaggaatgcgctcaatttcttcttcgccaccttccatgagtaatttggcttattggtatgttgcaaaaatactctctgaaagaatacttcgaatttcggcacttcttatgtacactttgatggaagctttcttgataaggaattccccgtctatttcctacataccgccttcggcgttattaaaggagaaaaatctgggcgggagcatattattgtaa

SEQ ID NO: 82136 - DNA, 396 bp, Saccharomyces pastorianus
atgattttaaccacagctagattaaattgtagaccagttaccgttcctcgtctattaaatcgttcttttagtcaatctttcataattttgaagaaaaaaagttctacccctactgagaaagtcgaagaagatgaaattgacgtgaatgaactgctgaaaaaggcagaaactcaattcaaaaaaactttagaagttcaaaaacagaaaatgaatgagataaaacagggaaattttaatcctaaggtattcaatagtttagtgttcaaaaataacagaaagtttacagatattgctaccacatccttgaagggtaaaaatgcacttttaataacagttttcgaccccaaagatgtgaaaactgtgatcagtggggtgcttgctgcgaacctgaattaa

SEQ ID NO: 82137 - DNA, 231 bp, Saccharomyces pastorianus
atgaccattgatctagcttctatcgagaaattcctctgtgaactggctactgaaaaagtaggaccaatcatcaaatccaagtccggcactcaaaaggattatgacttgaagactggctccaggagcgttgatattgtaactgctatcgataaacaggtcgaaaagttaatttgggaatcggtaaaaacccaatatccactttcaagtttattggagaggaaagttatgtga

SEQ ID NO: 82138 - DNA, 126 bp, Saccharomyces pastorianus
atgactagaagcaaaaggagactgattctgaaatttaatatgatttcttttttttctgccgtttctcttctgcattattttcttccttcgagaaagagtataagtatgtttaaaaggtcttcgtaa

SEQ ID NO: 82139 - DNA, 435 bp, Saccharomyces pastorianus
atgaacattactactaacggtactactattctgacgaggagcagtattattattggtgttattattctggtagctagcggccttggtccactgcatcgcggtatccacagaggggttgaaagagaagttggatgcctctatcgacgtttgcataatcggatactgcgtttgaatcattacgtttttctgatttacaccatttccctgactaaaatggttggaaccttggccattgccgtgcgtggacatcccggacgcagagggcacagcgaccatcttaccaggtccatctggataaaaacagtccggcttgttatacttgacgcaattcccacatatcggttttgccctgtcgcacccgatctttctcttcctgcattgggtgcaagcaggcggcttcctcacttttctcacttgcatgtccatcatgattaa

SEQ ID NO: 82140 - DNA, 909 bp, Saccharomyces pastorianus
  modified_base (898)..(898): a, c, g, t, unknown, or other
atgaacgtgacaccgttggatgaattgcaatggaaatctccagaatggattcaagtttttggtttgagaactgagaatgttcttgattactttgcagaatcaccatttttcgataagacgtcgaataatcaggtaattaaaatgcaaaggcagttttcccagttaaatgatcctaatgctgccgtgaatatgacacaaaacataatgaccttaccagatgggaagaatggaaacttggaagaggagtttgcctatgtggatccggcaagaagacaaatccttttcaagtatcctatgtatatgcaactggaggaggaattaatgaagttagatggtactgaatacgtattgagcagcgtaagagagcctgacttctgggttatcaggaagcaaagacgaacaaacaattctggtgtgggaagcgctaagggaccagagattattccattgcaagactactacataattggtgcaaacgtttaccaatcgccaacaatttttaaaattgtgcaaagtaggctgatgtccacgagctaccatctaaatagcacattggagagcttgtatgacttgattgagtttcaaccttcccaaggagtacactataaagtacctacggacactagcacgactgcaacggctgccaccaacgggaacaacgctggagggggcagtaacaagagcagtgtacgacctaccggcggtgccaatatggcgactgttccctcaaccacaaatgtcaacatgacagtcaacactatgggtacaggaggacaaactatagacaacggtaccggtcgtactggcaacggtaacatgggtataactacagagatgttggacaaattaaacctgcaggcatgcaagcttgcactgcgtcgtttacaccccacccccnttttttttttt

SEQ ID NO: 82141 - DNA, 813 bp, Saccharomyces pastorianus
atgctgcaggtgactctagaggatcccgtcttatctagtcaccgaaccaaagcgtttgatagtttactttgtaggagactccctgtatcaaaggcaacgaagcatcttcaactgggagaacatttcctgttcttcccaccatcattcgaaaaattggatagagatggttattttaactatcaaaatcctggaagtttgctaggaaaccctgatttacgctaccgtagaaggatttggggacaaggagaacttgttcagtatttaccagtcaccttagaccaggagtatacatgccacgaatcaatcaaatacgtaaagaaaatacgagatgaacatgttgtctgtattgaaagaacccttttacaagaaaggcccgaaaatgtgtcgagtccaatggacatttgcttattcgagagaagggtattaatgtacaccaatgcacccgcaaacaagactgcagtcaagatgcccgtcggagaggagaactataagatcttaaaaaattttactgttactgatatggatattgtagcttatggtcagatgtctttgaatccgcaccgaattcattgggacaaagagtacagtcgctatgttgaaggctacgacgatattatcatgcaaggacccttctcggtccaattactacagaaatgcatccaaccttttctcgaacaaccaatcagacagttgcgataccgtaatttgaattatatatatccaaacactactttgagcatatgtcagtctttaagctcttcgagcggaatgtacacattcaaattagggacctccagaaaagcacttagtcta

SEQ ID NO: 82142 - DNA, 333 bp, Saccharomyces pastorianus
atggattcgtgtagcagcacacctttcgtgactggggtattattaccatctgcagtctttagtttcttgttctgtacacttgtcagttcgtcctttggcttggatgagtttaacttaacaacgtgcgggatacggggaattctcaagatgcaattcttgaagtttttagaaaacacactgatatttttgggttcggggaactttactgcacacattggtatcttggtgatgaaaaatgacctgtccaattctcgcatttggcgattcacgggtgggttgtatgggaacactcctgacatcttgcacgaactgatcaaactattaaatttttga

SEQ ID NO: 82143 - DNA, 960 bp, Saccharomyces pastorianus
atgaaaatcgcactgccagtatttcaaaaatttaatagtttgatcagttcgtgcaagatgtcaggagtgttcccatacaacccacccgtgaatcgccaaatgcgagaattggacaggtcatttttcatcaccaagataccaatgtgtgcagtaaagttccccgaacccaaaaatatcagtgtgttttctaaaaacttcaagaattgcatcttgagaattccccgtatcccgcacgttgttaagttaaactcatccaagccaaaggacgaactgacaagtgtacagaacaagaaactaaagactgcagatggtaataataccccagtcacgaaaggtgtgctgctacacgaatccatccacagcgtggaggatgcgtatggaaaattgcctgaggacgccttggcgtttcttaaggaaaacagtgcggaaattgtaccacacgaatacgtgctcgattatgatttctggaaagctgaggagattcttcgagccgtgctgcccgagcaattcctggaagaggttccaacgggttttacaatcacaggccacattgcccacttgaacttgcgcaccgagttcaaaccattcgactcgctcatcggacaagtcatccttgacaagaacaacaaaatcgaatgtgtcgtggacaaagtcagctccattgccacacagttcaggacttttcctatgaaagtcattgctgggaaaagcgatagtctagtggtagagcagaaggaatccaactgcactttcaaattcgactttagcaaggtgtactggaactcccgattgcacacagagcatgaaagactcgtcaaacagtacttccagcctggccaagtagtctgcgatgttttcgccggcgtggggccctttgctgtacctgcgggcaagaaggatgtcatcgttttggctaacgacttgaatcctgagagttacaaatacttgaaggagacatcg

SEQ ID NO: 82144 - DNA, 924 bp, Saccharomyces pastorianus
atggaagttcattcaggttcccatgccagtaaaaggatattggacacatttccggtacaaacatatgctgcgcagactgacaaggacgaggccgttgcattagaaatacagcggaggtcctacacattcacagaacgcggtggtggaagctctgagttgactgtggaggggacgtacaagctaggtgtttacaacgtttttttggaggcaaatacaggggcggcattggccacagatccatggtgtctgtttgttcagcttgcgctgtgtcaaaagaatggtctagtcttacccacgcactcgcaggaacaaaccccatcgcatacctgtaaccatgaaatgctcgttctgtcccgtctttctaaccccgatgaggccctacctattctagttgagggttacaagaagagaattataagatccaccgtggcaatcagcgaaattatgaggtctcggatacttgatgatgctgagcagttgatgtactatacgttgctggataccgtgctgtacgattgttggatcacgcaaatacttttctgtgcctctgatgcgcaattcatggaattgtactcttgccagaagttaagtgattcgatagtcactccattggacgtagaaaactctttattacagaagttgtccgcaaagagtttgaagatatccctaacaaagcggaacaagttccagttccgccatcgagaaatcgtcaagagtatgcaaggagtttatcacaaccatcacaactccgttaatcaagagcaggtcttgaacgttttgttcgagaatagcaagcaagttcttttaggtttaaaagatatgttgaaaagcgacgggcaacccacttacttacatctgaaaattgcagttacattcttttgtataacgaacgttaaggaacggggatcctctagagtcgacctg

SEQ ID NO: 82145 - DNA, 141 bp, Saccharomyces pastorianus
atggggccccatggaaaaaaaactgctcggggaaatatcttcttctccacagaaagagacgcaggccaggaaaaatgtggaatattatataaacattgtttttccattttgtacggattttttttggaagaaagcggataa

SEQ ID NO: 82146 - DNA, 381 bp, Saccharomyces pastorianus
atgaatattctttttctcatatatctgaaagacaaaagatcggcacggcaatgccctgcagcatttcttcctagtttttccgaatttccattacgtattggatcttgtgcgcatatttgtcagtccttcacggaaaaaaaaaaagagcactgggtcacttcggaaaaacttttgactcaatgcaacagtgtcataatcctttgcgctgtctctttgaagaaaaatcaggagtgcaagatatcgattaattccttggaagttatgatggttagtcttagtttaactctcttgaagaagggttttttcagttggccaacactctttagaggtaaaaaaaaaaaaaaaaaaaaaaaagagaattcttcatgtgatttaccatga

SEQ ID NO: 82147 - DNA, 1104 bp, Saccharomyces pastorianus
atggaattactgaattctcctgaggattaccattttttcttacaagctgtgatacctttacttctaaaccagctaaaggaagttcctatttcatatgatgcgcattcaccggaacaaaagttgagaaactctatgcttgatattttcaacaggtgtctcatgaaccaaacctttcaaccctacgcaatggaagtgctcgagtttttactttcagtactaccaaaggaaaacgaagaaaatgggatattatgtatgaaagtgctgacgacacttttcaaatcattcaaatcaatactacaggacaaactcgactccttcatacgaataattattcagatttataaaaatacaccaaaccttataaaccagacgttttatgaagccgggaaagcagaacggggtgatttggattcaccaaaagaaccacaggcagatgaacttctcgatgaattctccaaaaatgatgaagaaaaggactttccatcgaaacaatcatccacggagccaaggtttgaaaactctacctcatcaaacgggttgaggtcatctatgttttcctttaaaatcctttctgaatgccctattacaatggtcactttatattcgtcttacaagcagttgactagcacctcgcttccggaattcactcctcttattatgaatctattgaatatacaaattaaacaacaacaggaagcgagagaacaggcggaatcacggggagaacatttcacttctatatcgacggagattatcaacagaccggcttactgtgattttatattagcccagatcaaggccacgtctttcttggcttacgtattcattagaggatacgctcctgaatttttgcaggattatgtgaattttgttcctgatttaatcataaggcttttacaagactgcccttctgaactatcatctgctaggaaggaacttttgcatgccactagacacattctatctacaaactacaaaaagctctttttacccaaattggactatctgtttgacgaacgtatacttattggtaacggttttactatgcatgaaacattaaggcccctggcttatagtactgtggcagatccattcataatctag

SEQ ID NO: 82148 - DNA, 162 bp, Saccharomyces pastorianus
atgcaaactgtgttgaaatatttgttgcttattatgtgtggaagcttttgtgcttcggaggaattgcaaaaccagaccaatgttcctgcgatattcttctcttacaaactgtatgtagaacaagaaacattaatctttagtaactttcatttttcttactaa

SEQ ID NO: 82149 - DNA, 819 bp, Saccharomyces pastorianus
atgtttgtatttttggatagaactcccggtattttaaagtatcaagaggattatgatagggctgtgactttaccaagagacacctttattgaagcggctgagaaattcttaggtgtatgtaatgctgacacttatgtgtttattaatcaaccaggcctgaggaaattggacttcttggaatttgaaacagagtttgtttcgttacagagatatataagacggagttcaaccgcgattaagttcgaaaaggtagacctattgcctcaagatttatactatgatcttgcagagtttgtaaaggagtattgtaacgtagaccaggtgttgaacttacgaggtaacaatacagaagatttccagccctttattgatagcgaaaaaagagtgattataatagagtaccctaagttaccagaggacactaatgaacgtaaagaagcattccgccattatgacaagtatttgaggactatactggcgcagattccgtcgccagaacaaaatgtcatttacacctcgttaaacccaggaactacgctggctcacgagtcgatcatccctatccaaatatttccagatatctttgacataaaatccagagtgggtgaagtggaacaaaataatagagttttggatgtgcctcgtctgtcgtttaatgactatactccacgattttcagagccaccttcggagtatgtctcaatatttgattcacaattaattgagaataacagaggtttattacagctgattttcacaattttggttgggtatattcttattcagtttttttttcacaaaaaaaactattgtagatga

SEQ ID NO: 82150 - DNA, 96 bp, Saccharomyces pastorianus
atgtggatcatggatatgatagtagtcaactattcccagagctactattatagccccatctacgaagatgtgtttgttaacaaggattgggaatag

SEQ ID NO: 82151 - DNA, 2235 bp, Saccharomyces pastorianus
atgacctcgattcaggagcgaggcacaagcgctcatctgcattcgcttaaagaaggtgaggctagtgatcgttccagcgagatgcttcctaaacaaagaagtatcataggatcccacgtgcaacgtccaccgtctcaaacaactttaggaaggtcaagggctggaagcaatacaatgaataaagtttcaggcttagatattgctcgaagaccaagtgagaatttattatcaaacatgaactgtagcgacaacggcaatgggggaaatatgctaaattcattcgttaactcggctttaccaccgccaaaagtcaaccctgctcaaacaagacgtgaacgtcccgcttcaaatagctcaataggtaccaagactaccgaggtattttcatccacttctgcatcttcctccttgggagataccagcgatgagggagaaggcagtgatgccgacaaatctaaaataaatacttttcccagcatattgatggaaaaggctactcaaggtagaggcgctaatggaaatggaatgagaagcgcaagcaataataccattgtggaagcaactacggacggttccaaaatggcactgcaaaaaagcatgtcgtttgatgatacagccgcagagaaaactatgaataaatctagacattcttaccaagaacagttctcctcgaagaaaagccagtcatctttactgaacagcaagcaaagatcacgtgctaaatcgcaaacatgctcgtctacgggttataacaacagcagcattctgaaaacgtttggcataagctccaaaatttctaattcaagtgatcggatagaggcttcgtcattagaatttaacgttccatctcagaaacctttgaattgcaagccattaactccgtctcagaaatacagacttcgtaaagagcaatcggagatgaatttaagaaatacaatcaaaagaaaagagaaattttatgatagtcaagaacaaattcttgagttacaagagggagacgttgatgattcgttgatttggaacgttcctatggcatcattatctactaattcatttctagcgtctgctaagcccgatgatatgaataacttggctggcaagattgacttatcagaatataccggaggtttggtaaatgataactctgaaatttcttatacaaaacaaaatcataggtactctaacatctcttttgcgagtacaacatcaaacgcctcattattggactttaatgagatgcctacgtctccgattccaggtttgaacaaagtaactgattttcagttcattcaagacacaaccaagagtctagcctctgtttatttgcattcttccaataggctttcaagatctaagctgtccgaaagaacaaagtcttccgatttcttgccaattgaactaaaagaagctcaaaatcaaggcatggaagatttgatacttgtctcggagaacaaactagatgtggtcagccattcaagaccgagttggttaccacccaaggatcgccaggaaaaaaagcttcatgaaaggcaaattaacaaaagcatgagtgttgcttcccttgaccaactaggaaaaaataaagacagagaagaaaagttgattagagatgaaacaaataggcaaaaatatgtgttattattggacagaaatataactagaaactcctcgttacaaagcctaagtaaaatggtttgggacactccatttagtgacgaaactaggtcaacaatttacagcgaaattttacagagcaagactaggtttattaccaaaaactatattcaaccatttcatgagctacaggagcttttaacaaaaatgggagactttcctaaaaacaaggaaattgaaatatcgcagctaatcgaaacaagtttgaggcgaaaagtgagcggtttacatgatatatgtcctgatttgatgcttttattgaagataaaatctatctcatcacagggtatagtcaccggtgatgaactccttttccatcatttcttggtgagtgaatcatttcagaacctggggctaaacgagatttggaatattgttaatttagtacaaatgacgtgttttaatgatctttgtaaagaaaagttcgatgcaaaggttttagaacgtaagggtgtcgtagccggttatttatcgcaaaacgaggagttcaaggatgaatttaatacggagtgtataaactctacacctggtggacatcctagaacgggggatcctctagag

SEQ ID NO: 82152 - DNA, 225 bp, Saccharomyces pastorianus
atgaagacagaaggaataaaaagcccatcggcaaaataccatgatatggcgggctcccagagaatccctcacaagaacccgcacattcaaaaagtggctgttttgcaaagtaagcccaataaggaagatgcgctaaatttactaaaggaaatcgcacataaagtttcctatctaatgaaggaaaatcacttcaaagtgccaatgggtggagtttacccacgtgat

SEQ ID NO: 82153 - DNA, 771 bp, Saccharomyces pastorianus
  modified_base (742)..(742): a, c, g, t, unknown, or other
atgtccatgcccatagcaagtaccactctagcagttaacaacctcaccaatataaacggaaacgcaaattttaacgtacaagcaaacaaacaactccaccaccaggctgtcgactcgcccgcaagatcttcgatgaccgccacgaccgccgccaactccaacagcaactcttccagagatgactctactattgtcggcctacattacaagatcggcaaaaaaataggggaaggttcctttggtgtgttatttgaaggtactaatatgatcaatggcgtacccgtcgcgatcaaattcgagcccagaaaaacggaggcccctcaattaagagatgaatataaaacatataaaattctgaatggcactcccaatatcccctacgcgtactacttcggccaagaaggtttgcacaatatcttggtcattgatcttttgggtccctctttggaagatttatttgattggtgtggaagaaaattttctgtcaaaacggttgtgcaagttgctgtccaaatgattactttgattgaagacttgcacgcacatgacttgatataccgtgatatcaaaccagacaatttcttgattggaaggcccggccaacctgacgcaaacaacatccatttgatcgacttcggtatggctaaacagtatcgtgatccgaaaactaaacagcacatcccatatagagagaaaaaatcactcagcggcactgccagatatatgtccattaatactcacncttggaagagagcagtccagaagagatga

SEQ ID NO: 82154 - DNA, 201 bp, Saccharomyces pastorianus
atgagtagtgaactcatgttcaactatacttttagctggcctgctggtccaaaagatgttattttaacaggaacgtttgatgactggaggggcactttacccctcgtgaagaccgccaagggaaatttcgaaattactatgcccgtgaagctagccaacaaggatgatacgtttcagtttaagttattgtggatggcgtag

SEQ ID NO: 82155 - DNA, 603 bp, Saccharomyces pastorianus
atgacgaaatattacatggggtattcgataaagatgggaattatattaagacagttaatcgccacagaaaatgatcaacaagataatgaggaatggatgaatgatgtcataaatacagaggaggtaaatcgcttagaaaaggaacaaagtgtcaaaacgcagaattcgagacattatatggtccacgaagcattaaatcttttgaaattttttcttgttgatgagaatgaaacagtactggaatccttgggcaggttaaacaagctgcgaaaaattgccatttcaaaaaagaacaaatcattgaaatatgttattcacggaatcgagctattatctgatttgatcaatatactagaaaaaaagggattcagtgaaatatatgaatataaccgcttagaagttcaggatgctatagaagaggaatttttcgatgactcctccagaatagttaaccataaaacaaagttatggggcttcaagtggttgaacaaattagatgaatatcacggcctgtacacgaactatgaaatgtcttattggcaaaaatcctacttcaaaaacagtgttatagtaaaatttcacagcgaacccagatcgagatga

SEQ ID NO: 82156 - DNA, 459 bp, Saccharomyces pastorianus
atgaaatatacgcaatacccgaacagctcaaaactgaaaagaaatagtgatcgacgtgaacacgacgaaaagcttagcgatgagttacataatcaaagtacgatatatgaagatgaagagctaagcagggcagaatatgattctgattctgattctagcgttgaagattctacagataatgaaaatagtgggaaagaaatggatgaaaaatcctatgaaaaaaatgaagatcacgttgaagaccatagaaagcgaaagaaatctaaaattcagcttttggatattgcagagttcaagaaagaaaacttagccgacttagattatcagatcggtaattcagagagcaaggtagaaaaaggtgtgaatatagagccatttaatatagatgacgaaatattacatggggtattcgataaagatgggaattatattaagacagttaatcgccacagaaaatga

SEQ ID NO: 82157 - DNA, 477 bp, Saccharomyces pastorianus
  modified_base (454)..(454): a, c, g, t, unknown, or other
  modified_base (459)..(459): a, c, g, t, unknown, or other
  modified_base (464)..(464): a, c, g, t, unknown, or other
  modified_base (469)..(469): a, c, g, t, unknown, or other
atgaatgacgacagccaggataaaataatacatgatatacgtattcagctacgaaaggctgccacagaattatcacgatggaagctatacggctcctcaaagtgggcagcagaggcgctagcaggtcttgcagaagctattgatgttgatcaaacacactctttagccgatgaatcgccactaagaaataaacaaggtgtaccgaaacagatgtttgaaataccacaaaacgggtttggcctatcagagactgagtatgacctgtacctccttggttctacgttgtttgatgctaaagagtttgatcgatgcgttttttttctaaaagatgtcactaatccataccttaagtttttaaaattatacagtaaatttctatcgtgggataagaaaagccaggaaagtatggaaaatatcttaactacagggaagtttacggacctgcagcataacncgctnggcantgccngtcgttta

SEQ ID NO: 82158 - DNA, 222 bp, Saccharomyces pastorianus
  modified_base (159)..(159): a, c, g, t, unknown, or other
atgtcgatagcttggtctagcgttttcaaaagagaattacggcttgaaagatttttaccaagagtatattcgacgaaagttcctgataatgcaccaagagcggctgacaatgaacaatggctagaaaccctaagacctataactcacccagaacagaanaagtccgaccatgatgtcagttacacaagacacctaaatgttcctctgggcgaagtcacttct

SEQ ID NO: 82159 - DNA, 1119 bp, Saccharomyces pastorianus
atgaagaccacatataccgctgaagacggagaagcaggtgctgccaggcaactggatggcatgcgaggaagagatgttttaatacaagttcctgtgggtactgttgtaaaatggtgcttaccaccccaaaaagttcgagagctcgtggaaagagaaatgcgcaaagacaataatgctacattaaggtctatacttggctcaacagccgtcaacttaagcgtttcttctgattctcatcggaaaaaaatacaactatacagacatgaaatggcggagagttggctcttcaaggacaaggccaaggaataccatgagaataaggactggttcaaagatttacataagaaaatggaggcatacgaccactcgttagaacaatctgaactgtttaatgatcagtttccactggctggtcttgacttaaatcagccaatgacgaaaccagtatgtctgctgaaaggtggccaaggtggactcggtaacatgcactttttaacaaatttgattagaaatccaagattttccaaacccggcaggaatgggttggaacagcattttttattcgaattgaaaagcattgctgatcttggactcattggtttgcctaacgctggaaaatcaactatactaaacaaaatctcaaatgcaaaaccgaaaatagggcactggcaattcaccacactgagccctacgattggcacagtttccttgggttttgggcaagacgtcttcactgtggccgatatacctggaataatacagggagcatcattagacaaagggatgggtcttgagtttctaaggcatatagaacgttccaatggttgggtatttgtccttgacctctctaataaaaaccctttgaatgacttacaattactgatagaggaagttggtactttagagaaagtcaagaccaaaaacatactaattgtatgtaataaagtcgatattgatgccgagaaatccgaatcttttgccaagtacctacaggttgagaaattttccaaaagtcagggatgggactgtgttccgataagcgccctcagagaggaaaacatagatgtgttaaagaaaaagatgtttaagtgtgctcgtcagtctgaatttgacaagtag

SEQ ID NO: 82160 - DNA, 1299 bp, Saccharomyces pastorianus
atgacagtgaatgacaaaaaaagattggcaatcataggtggggggccaggagggttggcagctgcaagagttttctcgcaaagtcttccaaattttgaaatagaaatatttgtaaaggattacgatattggcggtgtctggcattatccagaacaaaaaagtgatgggagggtcatgtatgaccatttggaaaccaatatatcaaagaagttaatgcagtttagcggctttcccttcgaggaaaacgtccctttatatccgtctcgaagaaacatttgggaatacttgaaagcctattacaaaacgttcattgccaacaaagatgctatcagcatccatttcagcaccgaagttacctacttaaagaagaagaactctcaatgggagataacatctaaagacgaactaaggactactaaatcggattttgacttcgttattgttgcgtctggtcactacagtgtccctaaactaccaactaatatcgcaggtctcgatctatggttcgacaataagggcgcctttcattctaaggatttcaaaaactgcgagtttgcccgtgaaaaagtcgttattgtggtgggaaacggcagttccggccaagatattgccaaccaactaactaccgttgcaaagaaagtatataatagtaaaaaagagcctgcgagcaatcaactgaaggccaagttaatcgagactgtccaaacaatagacagtgccgattggaaaaatcgttcagtcactttatctgatggaagagtacttcagaatatagactacattattttcgccacaggctattattacagctttccatttatagagccctccgttagactggaagtgctaggtgagggtgttactggcgacaagcactcgtctgtcaatctgcacaatttgtgggagcacatgatctatgtaaaagatcctacgctgtcctttatcttgaccccgcagttggtcatcccgttcccgttgtcggaactacaggcggctattatggtcgaagtattctgtaaaagcttaccgataactacaactttcgactctaatgcctgcggaacgcacaacttcccaaagggaaaggacctggaatactatgcagaactacaggaactactgaatagcattccacgtagggtcggtcatttcgaaccagttgtatgggatgatagactgatcgatctaagaaacagtagttatacagacaaagaagaaagaaatgtgcttctagcggaacacgcacaagccctaaagaaaaaaaaagcaccatacttccttccggcgccacatacttaa

SEQ ID NO: 82161 - DNA, 396 bp, Saccharomyces pastorianus
atgattttctgtaatacatacaatactctcccgcaacaacctactgcagcaccttatgaacggcgtggcgtgtcgccttcagtgatatattcctccaatacattgagcccaataccataccaaaatatcgatccatactcttcgaggtcgggtcctgaatgcaatcactctaaggcgcctatcgccccaacaatgatgcccccagtacaccatatacttgtgcatgattaccgacaaccaaaaccagtcacagattctattaatcctccaaatgtaaacataaccacctccacaaccaacaagaacctagatggcatttatattttgccagctcctcgtatgaatcccccggctcaaacacaataccaaatgattcatgcgccagacagcatgtaa

SEQ ID NO: 82162 - DNA, 879 bp, Saccharomyces pastorianus
atgatggatatcagccctacctgttatgggtacatcgacgacgagcaagatctagcccttgttttccagggcgtattcaatggaaatttgagatgcatcgaacggaggccatatgatgcagaaaaggttgaattagtcaaccccggaaacatttttgttttcaacgaagagaaatccggcatcaaaagatggacagatggtttttcttggtctccttcaagaatttcaggcaaatttctcgtatatagagagtataataggctgggttccacgcacgatctaccgctgcataatgtacctgagtataatatcttcgagagggctcataggaagtatttttatactggactactgaaaaaaacattttctctaaaattcaatatggatcccaccgacagcactaagctggaaacatttcatcttattgcgtactatacggaaaaggatattcatcaaggaagtttgaggagaccttcagaaaatcctttcttccataaatttcgaccttcacagaaactattagatgctttacaaaaagttgctgtaggaaatggcagatctaacccgtctaaaaataatgagagaggcagaaccaaagctcataattataaaacgtgcaggtctttatcatcttctccgagctattgtgatctcttgagcaattataacaaccatcctggaaatattccagttaggaccgcagttcagttacctttaaccaccttcaataacgctcctcgagaaatgcaccaacagcagcaccgacaacagcaacaatatctcttacccatagatgaacagaataaattacctctcccgtatatgcagcaccagccacaaccaattggtgttacaatcctaactatcagcctggattga

SEQ ID NO: 82163 - DNA, 882 bp, Saccharomyces pastorianus
atgtggttacagagttcaaatatggaagaccctgatacaatattattaatacatgaaattgaaaaaatatttgaagaggatatccattttgaacaaaacgtgtcggattgcttaaaagaaatctcaaataatttcgaatatatctgcatgcgagaaacccaattgataaacgaaggaaacatactaaaaaataacttaaaaaagtacgcaaaagcaagggaacataaaggcgaaaagcatgaagatactgaagtcttgagggaaaaagtaatatcatcacaaaaatcgtttgatgttacaaagaggcactataagcatgcaatttcaataacgacaagacagctatttatgaatttggcgtttgagtactacgaaaattgttcagatatgaaggatatttcgagaaaatacctacaagaatctttgtccactttacaaactatcgacacattgagtttttcggaagaattagaaaaaattagaaagagaagatttgataagttttgggcaaaagctaatcctgatccaacaaacaatattcaaaagtttgttaatatgagaacaggagtagcaggttttaatgattccttaatgaatcacttgtacgggaaactaagtttcggggtagcgccagttgaagaagaattacaaaactcacagccggagcacactgatgtgcctgaaaatgtttggaatgaggttctctctgattataattcaatggatggtaatccaattacttcaaataaattcctttctgcgaaagaacttgagcccgatcaattagttgaacttctcgctcaggaaaaagaagagaaagaggcaaaaaatatcagctcctcaactgcagaagttccctcgatatcgcaacctgaaatatag

SEQ ID NO: 82164 - DNA, 684 bp, Saccharomyces pastorianus
atgaatcaaggttacacacagctttccgcaccggaactgaaggagactaaaacatcgaagctaaataaaatgaacaactttcgaagctctccgattgctgagataattaataagataccaccagattgcgggaagatacagaatacaacatttcctgagttcaatccagcgttaagaagacgacaacacgaacagtggcctgcatacgaaaaaccaataagagttactgacagtatgtcaccacagctttcttcaatcaattgtttgccaaatttgtatccccacggtacgctaccattaccaaacccttatttatcctatttaaatcacattgaaaaagttaattgccaagatgtcaagtttagtaactggagtgttttacataattcgaataatggatttgaaattccgacatatttcagtccacggacaacacaaaacatgccttgttccgaaaaagttgaaagctggcttgaaagattaccaatttttgtggggttcgacggttatttatttacaaactgctttgattatgaatatatgttggattgggaagagacagaatttacattcgagaaaacatcatgtatggagacggattattctaaagctttaaccgatactgatattatatatattcaagagaaaaaaagacctgcaggcatgcaagcgtgcactgccgtc

SEQ ID NO: 82165 - DNA, 630 bp, Saccharomyces pastorianus
atgatcctcacactggcctatttcatgctgggcactctactgctgggtgtgttcgcagaagacacggtgtcgcagattggtataaatgacagtttatggtatccgtacgacgaagcactggtgttgaagccgctgcccaacaatgatctgctactctcatttgcattccaactgcaatcggaaccgtttgacccggccgtatcatccatgtcatatgatgcgtatgagcactacacgactttcccacgggccatcccaccattgttggaatctactgccacgcgtcagtttcatttaagatttaccagaggattctgggatgccctgtcgtggggacagttgccacatgctggaaaagaggcaggtgcctcaggtgtggaattgtggtcgcaagtgcaggccatggatcaggaacaggcgttccataattggaaaaaactggccaattcattgagcggattgttttgttcttctttaaattttatcgacgagtcaaggacgacctttccccggcggtcatatgcttctgatataggagctccccttttcaatagcaccgagaaactgtacctgatgcgagcatcgttgccaatgaacccatctgtaccgagacttaacgccgttcataaa

SEQ ID NO: 82166 - DNA, 1014 bp, Saccharomyces pastorianus
atgaacgatgtcctttgtacactgtaccagccaaacgggttcaggccattccaggtgagtatatttaattgcgatctaccgcaattgagaaaacattggttgttctacgatatcttgaatgcgaacaatatcaatgggacctacgacaattcaatgttcactatccacaagaagttcagaaccgatgatcagcatcaggaccccacgctgttatggaagcaaatgacaaggtttagggtagacaatctcgacatcgatcacctgaacgccggtatcgaaggaccctttggatggatcaacgaaggtcgcgtgaacatgattggcgacgttcttttaccagatgacgatgccgcatctgactcgctgcaactgacagaaatcctcacagagatcggtgaccgcttaatcaaaaaagcgaaaaggtacacttcatcccttcctctggttgggccaggattctccccggccgttgatgaaattgacccgaacgactactttattatggacttttctttaagactatacaatgtcaaagccgaagtgcctctgttcacttctggcttaacatatatcaatagtgcattgataaggcctattgtcgggtacatcaattctcacaggacatacatcccaatcaaatgccgcattgtaaagaaaaagtctgattttgagggctcctggaccatatatgattcataccttatgcgggatctaagtgcggaagcgtacgatgccttcgccgactacgtcgctgacgatgaaaagaggacattacgcttgagaagggtgggcttatggtcacctgcaacttatactccaggtgattttgatgagtctcggtgctatcgcgtgaggaatacctactcctgtcactttctgtacatatgcatttacatagcatcgttctttctatcagtttatctaatttgtgacgcatctttcttctttctacactgcggaaaatcctatttgaaaaaaaatagacgaaaaatatcaggacccacccccttatga

SEQ ID NO: 82167 - DNA, 564 bp, Saccharomyces pastorianus
atgactgttgatctttggaaaggatgtcacacctctgttgtgatttgcgcctataatccactggtcttatcgactcatggaggtcaattgcttgctgccatttattccagattggaacagaagacgggtttctattcttcggttatttcttcatcacatggaaagcagctattcaatacccttatttcttctgtagcgattatcattgatttaatgaagaataaacctacgttatcgagagaagcactggttcccaaattaaaggctatcattccaacgttaattacattgtctcaatacgagcccgaacttgttctaccagtactacagaggatattgaagagaaacactacaacatttaagccatttaccaacaaattccgcactgtgttaatcaatttaatcatatcagactatgcttctttaggcactaagacgcagaggcttgtttgcgaaaactttgcttatttgcatttgctgaaaattcaggttagtgatactagcgatgacgaaactcaagcacatcacaaaatatatgctgattctaattggagaacaggataa

SEQ ID NO: 82168 - DNA, 135 bp, Saccharomyces pastorianus
atgtcagaggaatttatcgcagtttctactttggctagaaacctggaaattgccaagggtaatgagtttcataccattttggcgactttgagatcaccagtttatatcaatgaacagctgctaaatctgaattga

SEQ ID NO: 82169 - DNA, 537 bp, Saccharomyces pastorianus
atgttcgctggaacagtgattgatgaccaagtcagtgataaatttcataccgagcttatgtgtcttttcgatcaaggcaaagcagtcctcgttcgtaccgtaggttggccagaccttttcgtagttggcaatatcgtaacccatatcatcttgtggcgagtcgtaaaatggcgagatccaaatggcatcggcgccaagctccttgatgtactccaacttggaggcgatacccttcatatcaccccaaccatcgttgttggagtctttgaaacttgcgggataaatttgatagattgtggcctctttccaccacttgggttctgtttctggatgtgcagaagaaatagtcattgtacgttgctttcttttctttatgaaaaaactttcacttttgtttgtgtgtttggattggtgaatggaacatatattctactacagctaattcctcgagtgaagaagtcttccttacttatatatgtcttttacgtgcctatggacgtcttacgaatgatcgaaaataagaaaagaacaaagtaa

SEQ ID NO: 82170 - DNA, 3219 bp, Saccharomyces pastorianus
atgttcaatcgtttaaacaaattccaagctgctttagctttggccctttactctcaaagtgcattgggtcagtactatagcaatagcacctcaatttcaagcaacagctcatccacctctgtggtatcaagttcctctggatccgtttcgatcagtagttctattgctgagacatcctcgtccgctaccgatatcttaagttctatcacacaatcagcttcatccacttctggtgtctcaagctctgtcggtccatcctcttcatccgtttctgatgtctcaagctctgtcagtcaatcttcttcctcagcatctgatgtctcaagctctgtcggtccatcagcttcctctacttctgatgtctcaagctctgtcggtccatcagcttcctctacttctgatgtctcaagctctgtcagtcaatcagcttcctctacttctgatgtctcaagctctgtcggtccatcctcttcatccgtttctgatgtctcaagctctgtcagtcaatcagcttcctctacttctgatgtctcaagctctgtcggtccatcagcttcctcagcttctgatgtctcaagctctgtcagtcaatcttcttcctcagcttctgatgtctcaagctctgtcagtcaatcagcttcctctacttctgatgtctcaagctctgtcggtccatcctcttcatccgtttctgatgtctcaagctctgtcagccaatcagcctcatccgcttctgatagctcaagctcattccctcaatcagcttcctctacttctggtgtctcaagctctggcagccaatcagtctcatccgcttctggtagctcaagctcattccctcaatcagcttcatccacttctggtgtctcaagctctgtcggtccatcctcttcctctgttgtctcaagctcattccctcaatcagcttcatccgcttctactgcctccggttcttccacttccaattccttgagttccattacttcttcagcatctagtgcaagtgcaactgcttccaactccctttcttccagcgatggtactatctatctaccaactactacaatcagtggtgatctaactcttactggtaaagtaattgcaacagaaggtgttgtggtcgcagctggtgccaaattgactctacttgacggtgacaaatattccttctcagctgacctaaaagtctacggtgacttgcttgtgaaaaagtccaaagaaacctatccaggtaccgaattcgacatctccggtgaaaactttgacgtgaccggtaacttcaacgctgaagaatccgctgccacctctgcatccatctactccttcactccaagttcttttgacaacagtggtgacatttccttaagtctatcaaagtccaagaagggtgaagtcactttctctccatactccaattctggtgccttctctttctcgaacactattctcaacggtggttctgtttccggtctacaacgtagagacgacactgaaggttcagtaaacaacggtgaaattaacctagacaatggaggtacctatgttattgtcgaaccagtttctggaaaaggtacagtcaacatcatttccggtaacctatacttacactaccctgacacatttactggccaaactgttgtattcaagggtgaaggtgtccttgctgttgacccaaccgaaaccaatgccactcctattcctgttgttggctacactggtaagaaccaaattgccattaccgctgacatcactgctctttcttatgacggtactaccggtgttctaactgcaacccaaggtaacagacaattctcttttgctattggtaccggattctccagctctgacttcagcgtctctgaaggaatctttgcaggtgcttacgcttactacctaaactacaatggtgttgtcgctactagtgccgcttcttcatccactgcatctggtgcttccgcttccgttaccggttcaactgcttccacttcatttggtgcttctgtgacaggttcaacatctgtttacactacaacactagactatgtaaatgccacaagcacagtcgtagtttcttgttcagagacaactgactccaatggtaacgtctataccattaccgcaaccgttccatgctcatccactaccgccactattacttcttgtgatgaaactggatgtcacgttagtacatcaactggtgctgttgtaactgaaaccgtttcttccaaatcatacacaactgccactgtaacccactgtgacgataatggctgtaacaccaagactgtcacttctgaatgttccaaagaaacatcagcaactactgtttcttctcaatcgtacaccactgccaccgtcacccactgtgatgacaatggatgtaagaccaagactgtcacttctgaagctcctgaagctaccaccacaactactgtttcttctcaatcgtacaccactgccaccgtcacccactgtgatgacaatggatgtaagaccaagactgtcacttctgaagctcctgaagctaccaccacaactactgtttcttctcaatcgtacaccactgccaccgtcacccactgtgatgacaatggatgtaagaccaagactgtcacttctgaagctcctgaagctaccaccacaactactgtttctccaaagacatacactaccgctactgttactcagtgcgatgacaatggatgtaagaccaagactgtcacttctgaagctcctgaagctaccaccacaactactgtttctccaaagacatacactaccgctactgttactcagtgcgatgacaatggatgtagcaccaagactgtcacttctgaagctcctaaagaaacttcagaaacttcagaaaccagtgctgcccctaagacatacactactgccactgttactcaatgtgatgacaatggttgtaacgtcaagataatcacctctcaaatacctgaagctacttcaaccgtcaccgcaactagtgcttctccaaagtcatacactactgtcacttctgagggttctaaagcaacctcattgactactgccatttccaaggcttctagtgcaatttccacatactccaaatctgcagctccaataaagacctctactggtatcattgtccagtccgagggtattgccgcaggtttgaatgccaatactttgaatgcattggtcggtattttcgttcttgctttctttaactaa

SEQ ID NO: 82171 - DNA, 1704 bp, Saccharomyces pastorianus
atggcaggagcaacatcaagtataattcgggaaaatgattttgaggacgagcttgcggagagtatgcagtcatataatagagaaactgcagacaaattggctttgactaggaccgagagtgtaaagccagaaccggagataaccgctccgcctcactcacgcttttcccgttctttcaagacagtgttaatagctcagtgcgctttcactgggtttttctccacaatagcaggtgccatctactatccagttctgagcgttatagaaagaaaattcgatattgacgaggaattggtgaacgtcactgttgtagtatattttgtatttcagggtcttgcccccacattcatgggcgggtttgccgattcactaggcaggagaccggtggtgcttgtcgcaatcgtcatttattttggtgcctgcatcggtcttgcttgtgctcaaacgtatgctcagatcattgtgctaagatgtctacaagccgccggtatttcacccgtgattgcgattaacagcggaataatgggagatgttactactagagccgagcgcggcgggtacgttggatatgttgctggatttcaagttctaggttctgcgttcggagcccttatcggtgccggattatcatctagatggggatggagagccatcttttggttcttagcaattggatctggcatttgcttcctagcctcgtttttaattttgccagaaacaaagaggaacatatcggggaatggttctgtcaccccaaaatcatacttaaatagagctcccattcttgttttgccaacagtaagaaaatcattgcatttggataatccagattacgaaacattggaactgcccacgcaactaaatttactggcgcccttcaagattttgaaagcttatgaaatttgtatacttatgctagtcgctggattacaatttgccatgtatactacgcaccttacggcgttatccacagctttgagtaaacaatatcacttgactgttgcaaaggtaggattatgctaccttccctccggtatctgcacattatgtagtattgtcattgctggaagatatttgaattggaattacaggcgcagattaaaatattatcaaaattggttgggtaagaagagatcaaagcttttagaagaacacgacaacgaccttaatttggtgcaacgtatcatagaaaatgatcccaaatacacctttaatatcttcaaggcgaggttgcaacccgcatttgttaccttgcttttaagcagtagcggattttgtgcgtacggatggtgcattactgtcaaagcccctttagcggccgttctttgcatgagtggatttgcgtcgctgttttccaattgcattttgactttttcaacaactctaatagttgatctttttcccacgaagacatctacggctacaggatgtttaaaccttttcagatgcattctgtctgctgtgtttatagctgcattgagtaaaatggtagaaaaaatgaaattcggaggtgtttttacatttttgggggctttaacctcctcgtcatcgatcctcttatttattctcttgagaaaaggtaaagaattagcctttaagaggaaaaagcaagaactgggagtaaaccaagaagtaaagcttcttgaatcaaaggaaaatgttccttttgatcgctccactaccgagaaagaggaattggtgtga

SEQ ID NO: 82172 - DNA, 240 bp, Saccharomyces pastorianus
atgccttctaacttgatatcactgctggtcaagcctatttttattctggtttctcaggcaaacccaaatgatattgtcaaatttttcactgagtttgccaagcatatttccatggacttttgtatggaaaccgtgatgagaaatccgggatttctcatcgaggaaagaagtgactcgagcctcttaaggcttagattaaacttttttctttttatcgctgcgtataagcaatacacctaa

SEQ ID NO: 82173 - DNA, 96 bp, Saccharomyces pastorianus
atgaacaaaattataaaagagtctaccaacttcgccagatatctacgaactagcggtgtactcaacagtcttcggaccacatctaagtttgtttaa

SEQ ID NO: 82174 - DNA, 417 bp, Saccharomyces pastorianus
atgaccaaagtagatttttggccaactcttaaggacgcatacgaaccactctatccgcagcagctggagattctgcgccagcaagtcgtctccgagggggggcccaccgctaccatacagtcaaggtttaactacgcatgggggctgatcaaatccactgacgtgaatgacgaaaggcttggtgtgaaaatcctcacagacatttacaaagaggccgagtcccgtagacgagaatgcctatattatctgaccataggttgctacaaactcggtgaatactctatggcgaagagatatgtagacactttatttgagcatgagcgtaataacaagcaggtgggcgctttgaagagtatggtagaggataagatccagaaggaacactcaagggtgttgtcgtcgctggaggcgtactag

SEQ ID NO: 82175 - DNA, 1356 bp, Saccharomyces pastorianus
atgcctaaccctccttcatttaagtcacataagcagaatttattcaactccaacaataatcagcacgcaaacagtgtagattcctttgacttacatctcgacgattcatttgacgctgctttagacagtttacaaattaataataacccagaactacttagtaagcataacactgttggagatagggaaagttttgaaatgagaacagtagatgatttagacaatttttctaaccattcttcggattcgcatcgtaagtcttcaaacacagatacccatcctttgatgtatgataatcgcctctcgcaggatgataatttcaaatttactaatattgcttcgtcaccaccgtcgtcttcaaacaatatcttttcaaaagccctctcatatttaaaagtatctaacacaaaaaactggtccaagtttggttcacccatagaactcagtgatcaacacatcgaaagagaaatacatccagacacgactcctgtgtacgataggaatagatacgtttcgaatgaactatctaatgccaaatataatgccgttacttttgtgccaaccctattatatgaacagttcaaattcttttacaatttatactttttagtagttgcattatcgcaggccgttcctgcactaagaatagggtatttatcatcgtatattgtacctttagcatttgtgctgacagtaaccatggcaaaggaagctatagatgatattcagagaaggagacgtgatagagagtcaaacaatgaactgtatcatgtaataacgagaaatcgttccataccaagcaaagacttaaaagttggagatctcataaaagtccataaaggtgatcgtattcccgctgatttggttcttttacaatcaagtgaaccatcaggggagtcatttatcaaaactgaccaactagatggggagactgactggaaactacgtgttgcctgtcccttgacccaaaatctatcggaaaatgacttaattaacagaattagtataacagcctctgctcctgagaaatctattcataaatttctaggtaaagttacctataaggattccacttcaaaccctttgtctgtagataatactctatgggcgaatactgttctagcttccagtggattttgtattgcttgtgtcgtctacactggcagagatactaggcaagctatgaatacaactacagctaaggttaaaactggcttattagagctagaaattaacagtatttccaagattctttgtgcatgtgtttttgccctgtcaattcttttagttgcatttgccggtttccacaatgacgactggtacattgacattttaaggtatctgatatgtttctac

SEQ ID NO: 82176 - DNA, 363 bp, Saccharomyces pastorianus
  modified_base (337)..(337): a, c, g, t, unknown, or other
atgaacatgttgccaatgttcacctattcagggttaccggtgacgctcctctgccttatccaattgcgcaggtcggtgatgattctatggatagtagtgatttgggttcaaaagccttttcatcacttaacgacatacctatcacgccttcacatgacaataatcctcacagttttgccgaacctatgcccgcttaccgtgggactttcagaagaaggtcctccgtgtttgagaacatttcgagatccattccttgggcacatgcaactgatttccaaagaccaactgtcaataccgtggatgataggttctcccgagaacagtatagtgaaagtgncaatgtggaaagatattaatgtgtaa

SEQ ID NO: 82177 - DNA, 2712 bp, Saccharomyces pastorianus
  modified_base (2693)..(2693): a, c, g, t, unknown, or other
atgaagtttgctgaccatctaaccgagtctgccatcccggaatggagggacaaatatatcgattataaggtcggcaagaagaagcttcgccgctacaaggagaagctggatgccgaagaagagcaatccagctcctaccggagctggatgccctctgtgtcggtataccagactgcatttcagcagagagagcccggcaaaagtcgcagcgacggagactatcgctccggacctgcgttcaagaaggactattctgctttgcagagggagttcgttgctgacttcattgaagactggttgatctcgttccagttgagtaagtgtaacgagttttacctttggttgctaaaggagtgcgacaagaagtttgaggttttacagtcgcaactgcactattactcgctgcagaagaattatgaacgcgacaacttgaaccggtctagttcgaatgttgacatgtccacgagtctatatgcggcagggcttgctggtcgttctgactccagggtcaatagcatcgacagcgataaccggtccgttatgtatgggtcaatgccctgcaccaaagaggccaagaagccgcgtttgtcgctgctagcgtactgtcagaaagttcttaaggacaataggctgctgccatcgtggcccaaacgtggattttctctgctacaggacttgagacaggatgcgtcctcaagaggccgcgagacgtttgcttttggcgcttcttttctggagactatgacgacaacccaggctagaaacttgttaagcaacgctataatcgagtactatctgtacttgcaattggtcaaatcgttccgggatatcaacgtcaccgggttccgtaaaatggtcaagaaattcgacaaaacgtgtcacacaagagaactgaccacgttcatgtcgtacgccaggacccactacacccttttcaagcacgcggatgccaacgtgcagttggtggcacagaagatgcaacaaataaccagttcgcaaccaacacccacttcggagctctcttccgcccaaagagacaaagagcccatcacttggttggaaacgcagatcaccgagtggttcaccactgcgttgaccaattcacccaaggacaggaagcacaatactcataagttgaagaaattgaccattcagtactctatctccgaacaaatggttcatagaaacaacagatcgattgtgcagatgctggttgtcgggctgggcataggtgtgtcaatgactttgatcacttacactttgtatttgggcattagctctgaagaaacgtcatttacgcacaagattctgttcccactgtggggtggttggtacatggttttgttgatcgcgtttctctttcttgttaattgttttatctggcatagaaccgggattaattatagatttattatgctgggtgagattcaatccaagaatggtacgcaatttttcaacaatgattttgccacgagtaaaattccgctcaagttgtatttcttgacattcttcatagtaccttgtgcggtctgttccatgttaagtttcgctttggagaagctcacacccttaggctttttatatattggtattgtgtctttcttatttttatgtccctctggtctaattccatattgggacaaagttgtacacactagaaaatggctggtggttactcttattagactgatgatgtctggttttttccctgttgagtttggtgatttctttttgggagatattatttgttcgttgacgtattctattgccgatattgccatgttcttctgtgtttactctcatacgcccaacaatctatgtggctcttcacattccagagcaatgggtgttttatcatgtttaccaagttattggagattcatgcaatgtttacgaagatttgctgattccggtgattggttccctcatcttttgaacgcggcgaaatacactttgggtatagcgtataatgccacactttgtgcttacagattgtcaggccgttctgaacaaaggagaaccccttttatagtgtgcgctacgttgaattcgatccttacttccgcctgggatttagttatggattggtccgttgctcacaatactacttcttacaattggttgctaagagacgacttgtatttagctggtaaaaaaaattgggaaaacggcagttattcattcagtaggaagttagtttattactttgctatgatttgggatatcctcattagatttgagtggattgtatacgcaattgctcctcaaacaattcagcagagtgctgtgacgtcgtttatattggcccttttggaagttttaagaagattcgtttggatcatcttcagagtcgaaaatgaacatgttgccaatgttcacctattcagggttaccggtgacgctcctctgccttatccaattgcgcaggtcggtgatgattctatggatagtagtgatttgggttcaaaagccttttcatcacttaacgacatacctatcacgccttcacatgacaataatcctcacagttttgccgaacctatgcccgcttaccgtgggactttcagaagaaggtcctccgtgtttgagaacatttcgagatccattccttgggcacatgcaactgatttccaaagaccaactgtcaataccgtggatgataggttctcccgagaacagtatagtgaaagtgncaatgtggaaagatattaa

SEQ ID NO: 82178 - DNA, 234 bp, Saccharomyces pastorianus
atgatgtggcatttagtagtccaactaggggtattccaagaaccagcgcgacaagcaagggatcaaatgcacaacttctctctaattatggagatgaaaataaccagtctcaagattctgtttgggatgagggcagagataatcctatactcttggaagatgaagacccttgaaagcactcgcacgcatagttttatattttttattcttttcctctttatttttattttttaa

SEQ ID NO: 82179 - DNA, 141 bp, Saccharomyces pastorianus
atggatgttgattctgacgttaatgtctccaggttaagagatgaactgcataaggtggcaaacgaggaaacagataccgccactttcaatgatgatgcgccatccggcgctacgtccgtattttcgtggagaagctactga

SEQ ID NO: 82180 - DNA, 558 bp, Saccharomyces pastorianus
atgcatgaatcctgtctgttggaatgggtagcttcaaaaaatatagacatttcaaaaccaggcgcggatgttaaatgtgacatctgtcactatcccattcaattcaaaacgatatatgcggaaaacatgcccgaaaagatacctttttctttactactatccaagagcatcttgacatttttcgaaaaagctcgtttggctttaacgattggtttggccgctgtactatatattatcggtgttcctttggtatggaacatgtttggaaaattatacaccatgatgctagatggatcatccccttatcctggtgatttcctaaagagtttgatttatggttatgatcagtcagcaactccagaattaaccacgagagcaattttttaccaacttttacaaaaccattcgtttacgtctttacaatttattatgatagtgatactacatatagcattgtactttcaatacgatatgatagtaagagaggatgttttcagtaaaatggttttccacaagatgtccaagattatctcccaaggacttgaatcgggatcctct

SEQ ID NO: 82181 - DNA, 519 bp, Saccharomyces pastorianus
atgagtgaagaaggtcctcaagttaaaataagagaagctagtaaagataacgtcgactttatactatctaatgtggatttggctatggccaattctctccgtagagtcatgatagcagagattcccactttagccattgattcagtcgaagtcgaaacaaatactacggttttggccgatgaatttattgcacacagattaggtttaatacctctacaaagtatggatatcgaacaactagaatacagtcgtgattgtttttgtgaggaccactgtgataagtgttcagtggtgttaacattgcaagcgttcggcgaaagcgaaagtactacaaacgtctacagcaaggacttggtaattgtgtctaatctcatgggccgtaatattgggcatcctattatacaagataaagaaggtaacggtgttcttatttgtaaattgagaaaaggtcaagaattgaaactgacatgcattgcgataaagggtatagccataagagcacagccaagtgggtccagc

SEQ ID NO: 82182 - DNA, 357 bp, Saccharomyces pastorianus
atgtttgagcttattccaaggatcatactcgaactctatggctgctgctggaccccacttggcgtgctctttggctataccctttttcgcaacgcatgtcagtttcaattcttgaccttttctcaatttacaaataagaacaccgttaccttctttatcttgtataataggatgcccaatattacggcccatgagattagacacaattaccaagtccttgctgtagacgttgtagtatttcactttcgcgctttcagccgaacgcttgcaaatgggttaacaaccaacttggaacactttattcacaagtgggtccctcaacaaaaaaacaaatccaacgaactgggtatttcctaa

SEQ ID NO: 82183 - DNA, 876 bp, Saccharomyces pastorianus
  modified_base (862)..(862): a, c, g, t, unknown, or other
atgacccttgatgatgacgactatataaaacaaatggagcttcaaagaaaagcttttgaaagtcagttcggatctttagagtccatggggttcgaagataaaacaaaaaatatacgaactgaagtagataccagagacagttcaggtgatgaaattgacaattccgatcatggtagtgatttcaaggatggtactatagaaagttctaattcttctgatgaagatagcggtaacgaaaccgcggaagaaaataatcaagattccaaaccgaaaactcgaccaaaggtcattagattcaacgggcctagtgacgtttatgttcctccaagtaagaagacacagaaacttttgagaagcggcaaaactttaactcaaataaacaaaaaattggagagtactgaagccaaggaagaaaaagaagatgagactttggaggcggaaaatttacaaaacgacctggagttgcagcaatttctgagagagtctcacttattgagcgctttcaataacggtggaagtggttctacaaacagtggtgtatcgttgactctacagagtatgggtggtggaaatgatgatggcatagtataccaggatgatcaagttattgggaaggccagatcgcgtacactcgaaatgagactgaatagactctcaagggtgaatggtcatcaggacaaaataaataagctggaaaaagtacccatgcatattagaagaggaatgatcgacaagcacgtcaagagaatcaaaaaatacgaacaagaagctgcagaaggtggaattgttctatccaaagtgaaaaagggacaattcagaaaaattgaatctacatacaagaaagatatcgagaggcgtatcngggggaagcattaa

SEQ ID NO: 82184 - DNA, 156 bp, Saccharomyces pastorianus
atgcataaaggggcgtcacagtggaaaataacgacaggagaatctcggtgtgtaagttggaatgtgtattgcaccacttccatgattgggctttttcctggcgcaaaatgttgcttttcaacattttcttattacgcaagagagaatcgccaatag

SEQ ID NO: 82185 - DNA, 297 bp, Saccharomyces pastorianus
atgcataaaggggcgtcacagtggaaaataacgacaggagaatctcggtgtgtaagttggaatgtgtattgcaccacttccatgattgggcttttttcctggcgcaaaatgttgctttttcaacatttttcttatacgcagagagagaatcgtcagataggtggtaaaacttggagcctaattagctcattatttcatttgaacgagacattggcttctgccctacatcacccatacgagacattggccttatacgaggcgtacttcgccttgcgggaaaaaaaatttcctttgtaa

SEQ ID NO: 82186 - DNA, 2229 bp, Saccharomyces pastorianus
atgaaaatgaatctgaaaaggctcgtagttaccttcttctcatgcatcaccttcctgctgaaattcactatagccgccgctgaaccaccagagggctttccagagcccttaaatccaacaaacttcaaagaagagctatctaaggggctgcatattattgacttctatagtccatactgcccgcactgcaaacatttagcatctgtttggatggaaacatgggaggagtttaaagaggagagcaaaacactgaacataacattttcacaggttaactgcatcgagagcgccgatttgtgtagagatgaaaatattgaatacttccctgaaattagactttataacccctcaggatacatcaaatcgttcactgaaacaccgaggaccaaagaatcattaattgcatttgcacgcagggagtctatggacccaaataacctcgatactgatctggattctgctataagtgagagccagtatctcgaaggctttgattttctcgagctgatcgctggtaaggcgactaggccacatttggtttccttctggccaacaaaagatatgaaaaatagcgatgattcactagaattcaaaaactgtgacaaatgccatgaattccaaaggacttggaagatcatttcaagacagttagccgtggatgatatcaacacgggccacgttaattgcgaatctaatccaacaatctgtgaagaactgggctttggcgacttggtgaaaataaccaaccacagagccgatagagaacccaaggtagcattagtcctacccaataaaacctcaaataatttgttcgactatcccaatggctactcagcgaagtcagatggctatgtagattttgccaggaggacttttacaaacagtaaatttcccaatataacagaaggggagctcgaaaaaaaagcaaacagagacattgattttctgcaagaaaggggacgagtaactaataatgatatccatttagttttttcatatgaccccgaaactgttgttattgaagattttgacattttggagtatttaatcgagcctttgtcaaaaattccaaacatatatttgcaccaaattgacaagaatctaataaatttgtcacgtaatctttttggaagaatgtatgaaaagatcaactacgacgccagccaaactcaaaaggtttttaacaaagaatactttactatgaatacggttacgcaactcccaacttttttcatgtttaaagatggtgatcccatatcctatgttttccccggatactccacaacagaaatgagaaatattgatgccattatggattgggtaaaaaagtattctaatcccttagttaccgaagttgactcttctaatttgaaaaaattaatttccttccaaaccaagagctacagtgatttagcaattcagttaataagtagcactgaccacaaacatatcaaaggaagcaacaagcttattaaaaacttgctcctcgcaagttgggagtatgaacatattcggatggaaaataacttcgaagaaattaatgagagaagggcaaggaaagcagacgggatcaagaaattaaaggaaaaaaaggctccggctaacaaaattgttgataaaatgcgtgaagagattccccatatggatcaaaaaaaattgttattaggatatttagatatttcaaaggagaagaatttttttagaaaatatggtattactggagaatataaaattggtgatgtgattatcattgataaatcaaataattactactacaataaagataattttggcaactccttgacttctaacaaccctcaattgctgagagaagcattcgtgtccttaaatattccatcaaaagctctatacagctctaagttgaaggggagattgataaattctccattccataatgtcctcagtttcctagacataatccacgggaacggcatgcccggttacttaattgttattgttttgtttatcgcaatactcaaaggtccatctatttacaaaagatacaaagtaaggaaacactatagggcgaaaaggaacgctgtcggtatcctaggaaatatggagaaaaaaaaaatcaagattaaacgcttaagtagttataaaaataaaagaatgctgatatcttatgatgctatcataactatcctttatttcacgtatcaatatctacaatcatctaacaaacgtcgctcttattttgtcacttag

SEQ ID NO: 82187 - DNA, 726 bp, Saccharomyces pastorianus
atgtctccgaagaatataacaaggtcggtgatcccggctatagatttgtattgccgcaaagcaaattttaaaactctaaaatcattgtcgatgatcctaggtagtaaaaaagaatggtatgacactaaaaagacgccattgagaaactttttggtctctcgatgtggcattttcgagcagttgaggggtcgtctcgttgaagatggcaaagtcaacttgtttagtgttttcctgacaaacgactcattttcttattgcaagatgaccgttgatgataagtttaacactagcttggtcgattggcaaaaaataccctttgacagtacatttgcaactgaaagaagacagaatattagtttactacctgttgatacactttttgcaactgaaaagatcatatcgattcttggtgtatctcctaatatgacgaatcttgtttctatagaaagagagcgatcagatctggtggattttaattgtaaactgcaatcaaacatcctagaacacctactatacgcgaaatgccaaggagtgtacgtaacttctaccaatgaaaaagctcgtttgcttgcagctgtctgcaatcctgaattcattgacaccttctggtgcgaattgactcccataagagtctcattaaaggaaaacccttccatttctgtacctcgagaatatcagatgtacgatccggtggtacgtgccactataaaggaggttgtcacaagc

SEQ ID NO: 82188 - DNA, 258 bp, Saccharomyces pastorianus
atgaatctaagatttgaattgcagaaactattgaacgtttgctttttgtttgcatctgcttacatgttctggcaaggcttagccattgctactaatagcgcttctccgatcgtggtggtgctttcaggctccatggaaccagctttccaaaggggtgatatccttttcctatggaatagaaatactttcaaccaagtaggtgatgtcgtggtgtatgaggtcgaagggaaacaaatccccattgtgcatagagtttga

SEQ ID NO: 82189 - DNA, 777 bp, Saccharomyces pastorianus
atgggatcttgcaatcaatgtagattaaagaaaacaaagtgcaactattttcccgacctaggcaactgcctcgaatgtgaaacgtcaagaactaaatgcaccttcagtattgctccaaattatttgaaaagaacgtcctctggggcaaacaataacatgccaacctcttcaaactccaaacgaatgaaaaattttgaagactattcgaatcgcttacccagtagcatgctctatagacatcaacagcagcagcagcagcaacagcaacaacagcgtatacaataccccagatcttcttttttcgtcggtccggcctcagttttcgatttgaacttgaccaagcatgtaagactagataatgttgaccaaatacagctatcaaaaactttatcattaagaaaggtgtctcctaccgcacagtttattcttcaggacgattttgacacgacccttcatagtaagcaagaatacgaagttgatttggtcgaaaatctggtacatccgcacggtcaccttttagtagagattttcttcaaattgattcatccttttcttccaattttacacgaacgtgtatttttggaaaaatattctagatcttatagagaactcactgcgcctttactcgcatccatttactcactggcatcacaatattgggattttcatcctgcactttgggggttcctaagaccgatgcactgcccactaaacaataccgatgggaccatttatgctcgattggaaggcaaattgagcttatacaacaggccttga

SEQ ID NO: 82190 - DNA, 390 bp, Saccharomyces pastorianus
atgactatttcttctgcacatccagaaacagaacccaagtggtggaaagaggccacaatctctcaaatttatcccgcaagtttcaaagactccaacaacgatggttggagtgatatgaagggtatcgcctccaagttggagtacatcaaggagcttggcgccgatgccatttggatctcgccattttacgactcgccacaagatgatatgggttacgatattgccaactacgaaaaggtctggccaacctacggtacgaacgaggactgctttgccttgatcgaaaagacacataagctcgatatgaatttatcactgacttggtcatcaatcactgttccagcgaacatgaatgacctgcaggcatgcaagcttgcactgccgtcgttt

SEQ ID NO: 82191 - DNA, 375 bp, Saccharomyces pastorianus
atgcagaaagaactcaccagttttttcgtcatatctccaagcagatccaccaaagaaagatctccaattgttgggaggaattggattacctttctcatcgaaaccctttggaggtctccagaaaaaccagtcacgctttggattggtcttggaagatttactctccttgaaccattcatgctcttcagaacagtggttgataaccaggtcaacaataaccttgatacctctcttatgagcttcttctatcatttggaaacaatcctcattggtaccgtaacgtggccaaaccttctcatagttggcaatatcgtaacccatatcttcttgaggagagtcataaaatgggcacacccatatcgcatcgacacctaa

SEQ ID NO: 82192 - DNA, 261 bp, Saccharomyces pastorianus
atggttagcgatgatattccgtcgtccaaaagattacgaccatgccagttcatattattttacttaagagttcatgcctttcatgcgaagaagcgttcggaaattacaaaacgtcttagagttcaggaacaggcccggtcacggaattattctcgggataattccagccgcttggcaggtaggctaaattacacatttcaagaaatttctccggctttttctgtgagatacgtttataagttgctgcagcagatgctctag

SEQ ID NO: 82193 - DNA, 324 bp, Saccharomyces pastorianus
atggcaagatacggtgctacttcaaccaacccagctaaatctgcgtcagctcgtggttcttatttgcgtgtttctttcaagaacaccagagaaactgctcaagccattaatggttgggaattgactaaggctcaaaaatacttggaccaagttttggaccaccaaagagccatcccattcagaagatttaactcctctattggtagaactgcccaaggtaaggaatttggtgtcaccaaggctagatggccagctaaatctgttaagttcgttcaaggtttgttgcaaaacgccgctgccaatgctgaagtatgtttaaaatga

SEQ ID NO: 82194 - DNA, 258 bp, Saccharomyces pastorianus
atggagaatacactgggtgaggggtccacggtaaacgcttccgtggacgtggaccaacatggcaatgacaacaatagtgatagcaacgctaatgcagctgtggcaggggttgccaatacagatactgctggtgaagaatcgcagcaacaagatgagtctctgaaggatgaagcaactgttccgaacacacgcgatgcagaaagcgaggcgataacggtaacggcaaagcagcgccgactatgcaagcgaataagctag

SEQ ID NO: 82195 - DNA, 1746 bp, Saccharomyces pastorianus
atgtcacaggtaatagaaccacaattagatagaacaacctattattccatattaggcttgacatcaaatgcgacttcctccgaagtgcataaatcatatctaaaactggccagattacttcacccagataaaacaaaatctgataagtctgaggaattattcaaagctgtggtgcatgcacattcaattttaactgatgaagatcaaaaacttcgatatgatcgagatttgaaaatcaaaggtttacacacttaccagccgaagaaaaactgtcatattttcaagaccaaggcaaaggaatcacaaggggctagtcccacacttggtcaatcagaagcttatcacaggcaaaataaaccttatgagcaacagccctatggtttcggtgtaggcaaaaaaatgacttcaagctctaagagtaaggttccgatattcaagtccttcaatttaaaaagctaccaacgaaaccactattattcatccaaaaaggaaaggaaacatggaagtcctgatattgattctttgttccatgaaaccaatggagcctcaaaagtaagaatgactgatgccggtaaaatggatacgaactctcagttccaagaaatatgggaaatattgggtaaaaatgcgtacacacataaatcttactctgaagatccaaattcatgtttgggatcagcactaagcgatcatgaagaagaagaagaagcaggaaaacaacagcagcaacagcagcaacagcagcagaattatggaatgacgtcgaagtctagcagtcctgatgaagaacaaaaagataataaagaaccgaaaagggaaagcagagtctctccagaggaaaatggtgaagaagaagaaacgggacacaaacaatttaaattgcccaagaccagtactttttctagtggatcccatgattcaaatttgcaatctcctttttacaatcatgagtatcgacattacgcaagaagtaaattcgaatgcaagaatcaatttagaaagtcagtttctcccattaaagagatacctgcaacaactagtaccaatgaaggatggaacattttgagagacattattgaaaaactcaatataagcaatgtagacgatcgaaataaagacttgctgtttcgtcgggatgaaataggtgataaaaatcacagcgactcaatcgacatagaaaatttatctatcaaagaacctaaagggatgaaaaggagaaagaaagatgatatatctttagaagaattgttccaatctttaccaagagaaaaagattattttatgatggatgcaattaatgactcgttagaatcaatcaatctttttaaaaagccgaagaccactcagagtcacgaacaaggtggaacttttgcccaagcagaaagtaatcgtgcaaaattcaaaccgttactagaacagtgtggaattacacccgagatcttagatttggaaataccagagattccggaatttgatgcagtggctgaccttgaaacattgaagcttaacgtgcagctgtttaataaccaatgtaacaaacttaaagaaacaatacatcaagtatcattacagcgcctgagagcagatacgcagttcagtgatatgttaacccaaaagcaaagtattatggtttggaaaacatacctagaatttgataaaagtttaatggacaaattgaacatcttacaagaaagacagatgcaggtcattaaaattttttccgaaagatgtgacggtaaagtataa

SEQ ID NO: 82196 - DNA, 645 bp, Saccharomyces pastorianus
atgcaatacaaaaagactttggttgcctctgctttggccgctactacattggccgcctatgctccatctgagccttggtccactttgactccaacagccacttacagcggtggtgttaccgactacgcttccaccttcggtattgccgttcaaccaatctccactacatccagcgcatcatctgcagccaccacagcctcatctaaggccaagagagctgcttcccaaattggtgatggtcaagtccaagctgctaccactactgcttctgtctctaccaagagtaccgctgccgccgtttctcaaatcggtgatggtcaaatccaagctactactaagactaccgctgctgctgtctctcaaattggtgatggtcaaattcaagctaccaccaagactacctctgctaagactaccgctgctgctgtctctcaaatcggtgatggtcaaatccaagctaccaccaagactacctctgctaagactaccgccgctgctgtctctcaaatcggtgatggtcaaatccaagctaccaccactactttagccccaaagagcaccgctgctgccgtttctcaaatcggtgatggtcaagttcaagctactactaagacataccgctgctgctgtctctcaaattggtga

SEQ ID NO: 82197 - DNA, 1542 bp, Saccharomyces pastorianus
atgacagaagataatattgctccaatcacctccgttaaagtagttaccgacaagtgcacgtacaaggacaacgagctgctcaccaagtacagctacgaaaatgctgtagttacgaagacagctagtggccgcttcgatgtcacgcccactgttcaagactacgtgttcaaacttgacttaaaaaagccggaaaaactaggaattatgctcattgggttaggtggcaacaatggctccactttagtggcctcggtattggcgaataagcacaatgtggagtttcaaactaaggaaggcgttaagcaaccaaactacttcggctccatgactcaatgttctaccttgaaactgggtgtcgatgcggaggggaatgacgtttatgctccttttaactctctgttgcccatggttagcccaaacgactttgtcgtctctggttgggacatcaataacgcagatctatacgaagctatgcagagaagtcaggttctcgaatatgatctgcaacaacgcttgaaggcgaagatgtccttggtgaagcctcttccttccatttactaccctgatttcattgcagctaatcaagatgagagagccaataactgcatcaatttggatgaaaaaggcaacgtaaccacgaggggtaagtggacccatctgcaacgcatcagacgcgatatccagaatttcaaagaagaaaacgcccttgataaagtaatcgttctttggactgcaaatactgagaggtacgtagaagtatctcctggcgttaatgacaccatggaaaacctcttgcagtctattaagaatgaccatgaagagattgctccttccacgatctttgcagcagcatctatcttggaaggtgtcccctatattaatggttcaccgcagaacacttttgttcccggcttggttcagctggctgagcatgagggtacattcattgcgggagacgatctcaagtcgggacaaaccaagttgaagtctgttctggcccagttcttagtggatgcaggtattaaaccggtctccattgcatcctataaccatttaggcaataatgacggttataacttatctgctccaaaacaatttaggtctaaggagatttccaaaagttctgtcatagatgacatcatcgcgtctaatgatatcttgtacaatgataaactgggtaaaaaagttgaccactgcattgtcatcaaatatatgaagcccgtcggggactcaaaagtggcaatggacgagtattacagtgagttgatgttaggtggccataaccggatttccattcacaatgtttgcgaagattctttactggctacgcccttgatcatcgatcttttagtcatgactgagttttgtacaagagtgtcctataagaaggtggacccagttaaagaagatgctggcaaatttgagaacttttatccagttttaaccttcttgagttactggttaaaagctccattaacaagaccaggatttcacccggtgaatggcttaaacaagcaaagaaccgccttagaaattttttaa

SEQ ID NO: 82198 - DNA, 567 bp, Saccharomyces pastorianus
atgccgcatttagccgccgaaacgcatacttggcctccgcatatttcacattcaacactttcgattccgcatccaaccccggaacaccggcacgtatttcataaaaaggacgtgaagaacaaaaggaacgaagaaaaaggcaataatttactctatgtgttatttagaactacggtgataaagagctcgttccgatcactaagtacggccggaagagagctgttgtttgttgtccatcaagggcacatcggcaccggcctcatcgtcttcatcatatgctggaggctgtgcttgagattcctctgcagggtgagcttccagtcacggtctacgtcgggcgcagtcgcattgtctgccgtagaaagatccgtacgaaacgttcacctactcggtttcactataccaacggtagcaaagcgtggaatgatttgctgggaaagaataaccagtaggggaagaagaagtacggttccaatagtggtatcccttgttgaaattattacccttaacgcttcccagaacggcccacttggggggaatggaaaaacccgccaaaaaaccatttaa

SEQ ID NO: 82199 - DNA, 261 bp, Saccharomyces pastorianus
atgacgatgcaaaaggccagcaaagtgaatatggaagtgcgaaggactctagtaacaatacaggccacaactatgtctataatcctagctctgccactggtggtgctgatagcgtcgacattggtgctatcagtaaaaggaaggagaatatatctggcgacatctccaataattttgctgttactcattctgttcaagaagggccaacaagcgcgttcaataaacttcacattgtcgaagaataaatcgttatttgtctga

SEQ ID NO: 82200 - DNA, 1059 bp, Saccharomyces pastorianus
atggtagatggactgaatacctcgaacattaggaaaagagccaggactctctctaaccccaatgactttcaagagcctaattacttgctggatcccggtaatcatccctcagatcattttcgaactcgaatgtccaaatttcggtttaatattagagagaagctgttagtgtttaccaacaatcaatcattcacattaagccgctggcaaaagaagtaccgttctgcgtttaatgatctctactttacttatacttccttaatgggatcgcataccttctatgttctgtgtttacctatgcccgtgtggtttggatattttgaaacaacaaaagatatggtttatatcttgggatattctatctacttgagtggtttttttaaagattactggtgcttgcccaggcctagagcacctccattacatcgaattacgttaagtgaatatacaacgaaggaatatggtgctccaagctcccatacagcaaatgcaacaggagtgagtctcttgtttctctacaacatctggaggatgcaagaatcttctgtcatggtccaactattgttgtcatgtgtggttttattttattatatgactttggttttcggtagaatatactgtgggatgcatggcatattagatttagtaagcggtgggctcattggaatagtgtgtttcattgttaggatgtatttcaagtacaggtttccgggtttacgcattgaggagcattggtggtttcctttgtttagtgtgggatggggtcttcttcttttgtttaaacatgttaagcccgtagacgaatgtccttgcttccaagatagtgttgcgttcatgggcgttgtgtcaggtattgaatgctgtgattggttgggcaaagtggttggagtcaccctggtgtacaatttggaacctaactgtggctggcggttaaccttagccaggctgctggtgggcctaccgtgcgttgttatctggaagtacgtgatcagcaaaccgatgatctacacgttattgatcaaagttttccatctgaagatgaggggatcctctagatag

SEQ ID NO: 82201 - DNA, 393 bp, Saccharomyces pastorianus
atggtagaaaactcgtcgagtaataattcaacaaggccaattccagcaatacctatggatctacccgattatgaggcgctccccacccacgcgccattgtaccatcaacttatagcgggtgcatttgctggtataatggaacattcagtgatgttcccgatagatgcccttaagacgcgaatacaatcagccaacgcgaaatcgctgtctgccaagaatatgctttcgcaaatatctcacatctctacttccgaaggaactctagccctatggaagggtgttcagtctgtcatactaggtgcgggacctgcacatgcagtgtattttggtacgtatgagttctgcaaaaaaaaccttatcgattcgagttatgcaaactcaccaaccaattaa

SEQ ID NO: 82202 - DNA, 477 bp, Saccharomyces pastorianus
atgccttctaaaaactccatcaacagacctaagctgacttcaaatttgcaccacaaggtgcactctttaaataagaaaagagctcaaagagaaagagctggtctcttgaagccagctagatccagcgtaaattcgaaatctggggaaataaaatcagtagcgttggacctatacttccaaaacaagaagaacgaaagtcagaattccactgctgtgacattacaaaatgcttcatcttctccggcctccatcaccacgaggacactttccaaaaagagagctaagaaaatcgagagaaacttaaaatatgctacacagagaaaattattggttgacgcaagcgctaagctagaagacgaaatggagattgatctagatggcggtaagaaagtgaaagagaatgaaaagaagagttctttgactttggttaaggaagccttatggagtgtcattgacgatactgcatcccagggatga

SEQ ID NO: 82203 - DNA, 141 bp, Saccharomyces pastorianus
atgaaccacttgacaacggtcttagccgcacgtaaaacctgtgtggtgcgagaagcaacgaatctgtatacagttgatacagaacgtcggatcaacaaaatggggcgtgatgaagaaaaaaagtggcggggatcctctaga

SEQ ID NO: 82204 - DNA, 141 bp, Saccharomyces pastorianus
atggcttcaacgactgctactcgtgccaataatgaaactgaaaagcatgaagccatcactgtttttttcgtggtctttctatatataaacaaagcctctgtaaagttttttttttttcgcataacaaacgcgcttatctga

SEQ ID NO: 82205 - DNA, 99 bp, Saccharomyces pastorianus
atgtcaattgtttcactgttaggcatcaaagtcttaaacaacccggcaaagttcactgatccatatgagtttgaatcacttttgatgcttagatcttaa

SEQ ID NO: 82206 - DNA, 1809 bp, Saccharomyces pastorianus
atgaaggatttaatttcttctggcaatgttggactaggtcccattgagattgttcacatgtcctacttaaacaaacatgaaaaagaagagtttggtgaatatttctacgttacagggatcgaagtttccggtcctgcaatgcccgtagagtttcttgaagtgctaaaatcgagtaagcggatttccaaaaatatatcgaataatatcatattgacttattgctgttttaattttttcagcaatctagacatccgtattagatacgatgctgacgatactttccagacaacggcaattgactgtaacaaggaaaccactgacctgaccatgacagaaaaaatgtgggaagaaacgttcgcaagttctgtcatccgagcgataataacaaatactaatccagagttaaaacctcccggtttagtagagtgtccattctacgttggaaaagatactatctcctcttgcaaaaagatcatagaattactatgccgattcttaccacggtcactgaattgcgggtgggattctaccaagagtatgcaagccaccattgtcaataactatttaatgtatagtttaaaaagttttattgcaatcacgccaagcctagtggattttacaatcgactacctgaaaggacttaccaagaaagatccaatccatgacatatactacaagacggctatgatcacaattctagatcacatagaaacaaaggagttagacatgataactattttaaatgagacgctcgacccccttttatctctgctaaatgatttaccgcctcgcgatgctgattcagcacgattaatgaattgcatgagtgacttgctgaacattcaaacaaattttttgttaaacaggggtgattacgaactagcattaggcgtctctaacacatcaaccgaactagccttagactcttttgaatcttggtacaacctagcgagatgccacatcaaaaaagaggagtatgaaaaggctctcttcgcaataaattcaatgcctcgtttgcgcaaaaataatggacacctggaaacaatgtacagtaggtttcttacctccaattattataaaaagccattgaatggtacctgcgaacactacgacttgactgcaatggaattcacgaatctctcgggaacgttgaggaattggaaagaggatgagttaaaacggcaaatttttggaagaatcgcaatgataaacgaaaaaaaaatcggttatacaaaggaaatctgggatgatattgcgataaagttgggtccgatttgtggtccacaatctgtgaatctgattaattatgtctcccctcaagaggtcaaaaacataaaaaatatcaatttaatagcaaggaatacgatcggcaaacaattgggatggattagtggtaaaatatatgggttattaatggaaattgtgaacaaaattggttggaatggcttattaaacatccgaacagaagctttcatgatggaaactgaattctatcaagcttctaacaacattatcgatgaaaacggtcatataccgatggaatcccgaaagaaaaggttttgtgaagggtggctagatgatttatttttagatttatatcaagacttgaaattgagcaagattagcctaagcaataaagatgaaaaacacagcggattagagtgggaacttttgggtttgatcatgctgcgtacctggcattgggaagatgccgtagcttgtctaagaacaagcatagtagctcgattcgaccccgtaagttgccagcagctgctaaaaatatacctgcaacctccaaaaaatatttaa

SEQ ID NO: 82207 - DNA, 1560 bp, Saccharomyces pastorianus
  modified_base (1510)..(1510): a, c, g, t, unknown, or other
  modified_base (1542)..(1542): a, c, g, t, unknown, or other
atgcatttccccaaaaaaaagcattccggaaatctctccgtggtggaattgccgaaggaagctctccaagattctttaactgctgctcagattactttcaagagatatgcccaccccaatggcaatgccggtagcgcagagaggccgagacatctaaaggtggaatctgcgcctgtcgtgaaatctgagccttctttgccgaggatgagacaaccggaaccgagaaatataaatcatcaatactctagggaaacgcttccaggccattctgaagccttttccgtaccgacgactcctctgcagacaatccattatgatgtaaggaataaagcgtcaaattcgccaagtagtatagcagctgcagagacagctgcatacctagcccacacaaattcatttagtaacagatcatccggtgtcggcagccgggatccagttatggatactgaaacaaaaccgccacgtgctccttcagccttgaaaaatgagctgcaattgaacagaatgaggatacctccgccgtcatatgataataatgttcgttcacgatctatttcgccacaagtatcctactctacctcgctgtcatcatcgtgttccataagttccgatggagaagaaacttcttatagagaaaaaagcaccgatgaggcatttcctcctgaaccttccatgtcttcttatagtcttgcgtccaaagcctcagcaaaggcttctctaacggacccctcacagcggcagcaagagtcagactatacggcaatgaataaactcaatggaggaaatataatatataaaggcactttacccgacctaataccgcgaagccaaaggaagacaagtaaacccaggttcaagcacaagcttttacgatcacctgagcagcagcaagaaaacttatcacatgtgtattcggaccaaacgcagaatggtagggcaatcataaacacgcagcaaaatgtaaagttaaagacaactatgaggcgcgggaagtacgcaattacagacaatgatgaaacttttccctacgacagaaagtctgtaccatcagactcagacacagatgaagattctaatgtgatggaaatcaaggacaagaagaagaaaagtcgtcgctctaagataaagaaggggttgaaaacaacagcagctgtagttgggagtagtacctctgtccttccgttccctcatcaccatcatcatcaccatcagctccataacccgaattctcatcacttacacacgcaccatcatacaagttctcacaaattcaatgaagataaaccgtggaaatctcatagagatctcgggtttattaccgaacaagaaagaaaaagatacgagtctatgtgggtatcaaacagatactcgtatttgcgcttgctgccgtggtggccctctctcgcgaatgaagacgacgagtctcacttacagcccttaaatttaccgcaagacggcctgatgcttaacttagtcgtaaaagatatatggtatcgatcaaacctacccnagggatcttctagacctgcaggcatgcaagcntggcactgccgtccgttt

SEQ ID NO: 82208 - DNA, 219 bp, Saccharomyces pastorianus
atgtcggtgcctaataatgggcccaaagacatttctttacattctttgaaaggcagtgttgttccagtgaaagactcaaatataatcaataaagaagttgatgaagaaagaaacgacaaaagagatagtcaaaaaaagtcagccgtgagtgaatcttcagtaacaaatagcaaaataagtgaacaaatggcgaaaagcttttatccgaactcatactag

SEQ ID NO: 82209 - DNA, 207 bp, Saccharomyces pastorianus
atgaagctactaaggtggcaattaatccagctacagcaagcatcgtcttttcctgttgttggtggggctccttctgttgctaatgtagcaactacctctgtcaatgaagaaggaaatcgtaatcaggttaaaacaaaggccaagtatgagtctgcgcagattgataggcagcagaaggagaccacttgtagggttgcagatttgtaa

SEQ ID NO: 82210 - DNA, 261 bp, Saccharomyces pastorianus
atggatgcagaatccaatgaaagcccaaacggtaaagatagtgaaattatgtatacaggtgtttcaatttctgtttccttcaattctaaacaaaacgaacaactgcatgttgaacagctctcaggtggtcagaagactgtatgtgccattgctttgattctggcaatccaaatggttgaccctgcttccttctatctgtttgatgaaattgatgctgcactcgacaagcagtatagaacgtgcagttgctacacttcttaa

SEQ ID NO: 82211 - DNA, 312 bp, Saccharomyces pastorianus
atgtgccataattctgttaggagcggaaataaggctggttttttggggatcaagttcggaagtgctcttctctcaattgccacaggtgccattgctatcgcattgctatgcaagttccacgaccacgaagcggtactgatagttattgtatgctcgacattgttatatggaataccgtcactgatatcgtttatcacagagactgtttttgcgcctagcaagtttcacattggatacttttacaacgttcttaattttgcattgccactgatcaccatgggctgcacagtggactattttcattatactttg

SEQ ID NO: 82212 - DNA, 2949 bp, Saccharomyces pastorianus
  modified_base (2896)..(2897): a, c, g, t, unknown, or other
  modified_base (2899)..(2899): a, c, g, t, unknown, or other
  modified_base (2922)..(2923): a, c, g, t, unknown, or other
  modified_base (2933)..(2934): a, c, g, t, unknown, or other
  modified_base (2943)..(2944): a, c, g, t, unknown, or other
  modified_base (2946)..(2946): a, c, g, t, unknown, or other
atggattctactgatctgttcgatgttttcgaggaagcacctgttgagcttcctacagatagtaatggagaaaaaaatgctgatacaaacgtaggagatactccagatcatacccaggataagaagcatggccttgaagaagaaaaagaagagcatgaggaaaacaacagtgaaaataaaaaaatcaaatccaataagagcaaaacggaagataaaaacaaaaaagttgtagtaccagtgttggcagattcgttcgaacaagaagcctctagagaagtggatgcatcgaaaggactgacaaattcagaaaccttacaagttgagcaagacggtaaagtcagattatcgcatcaggtccgccaccaggttgcactaccaccgaactatgattatacgcctatcgctgagcataagagggtaaatgaggctcgtacatatccattcacattagaccctttccaggacactgcaatctcatgtatagatagaggcgaatctgtgttggtttctgcgcacacatcggctggtaaaacagttgtggctgaatatgccatcgcacaatctttaaaaaataagcaaagagtcatttatacctctccaattaaggctctatcaaaccaaaaatacagagaacttttagcagaatttggagatgtcggtttgatgactggtgatatcacgatcaatccggatgcaggctgtttggtcatgaccactgagattttgagaagtatgttatatagaggcagtgaagttatgagagaagttgcctgggtcatctttgatgaagtgcattacatgagggataaagaaagaggtgttgtgtgggaagaaacgattattttactgccagataaggtccgttacgtgtttttatcggccaccattccgaatgcaatggagtttgctgaatggatatgcaagattcattctcagccatgtcatattgtctacacaaatttccgtccaactcctttacaacattacctgtttccagcccatggagatggtatttatctggtggttgacgaaaaaagtaccttcagagaggaaaatttccaaaaagcaatggcgtccataagtaaccagataggtgatgatccaaattccactggttcaagaggtaaaaagggtcaaacctataaaggtggctccgctaagggtgacgcaaaaggtgacatttataagatagtgaaaatgatttggaagaaaaagtacaatccagtgattgtattttcgttcagtaaacgtgattgtgaagaattagcattgaagatgtctaaattagattttaattctgatgatgaaaaggaggctttgacgaagatttttaacaatgccattgcactattaccagagacagacagagagctaccccaaattaaacacattttaccactattaagaagaggtatcggtattcatcattccggtttactgcccattttgaaggaagtcattgaaattctgtttcaagagggatttttgaaggtgttgtttgcaacagaaacattttcgattggattaaacatgcctgctaaaactgttgtctttacatcggtcagaaagtgggatggtcaacaattccgctgggtttcaggtggagaatatatacaaatgtctggtcgtgcaggtcgtcgtggtttagatgatcgtggtattgttattatgatgattgatgaaaaaatggaacctcaagttgctaaaggaatggttaagggccaagcagataggctagactcggcttttcacttaggatataatatgattttgaacttaatgagagttgaaggtatctctccggagtttatgttggagcattctttcttccaatttcaaaacgttatttcagtaccagttatggaaaagaaacttgctgaactgaaaaaagactttgatggcatcgaagtcgaagatgaagaaaatgttaaagaatactatgagattgagcaggctatcaaaggttaccgtgaagatgttcgtcaagttgtcacccatccggcaaacgccttaagtttcctacaaccaggcagattagttgaaatctctgtcaatggtaaggataactatggctggggtgctgttgtcgattttgctaaaagaattaacaaacgcaacccaagtgctgtctatacagaccatgaatcctatattgtcaatgtggtcgtcaataccatgtatatagactctccagtcaacttgttgaaacccttcaaccctaccttcccagaagggattcgcccagcggaagaaggtgaaaaaagcatatgtgctgttattcccataactttggattcaatcaagtcgattggtaatttgagactatatatgcccaaagatattagagccagcggtcaaaaagaaactgttgggaagtctttaagggaggttaatcggaggttcccggatggtattcccgtgctggatcctgttaaaaacatgaagatcgaagatgaggactttttaaagctaatgaagaagattgacgttttaaacacaaagttatcctccaatcccttaaccaattccatgagactagatgaactatatggtaaatatagtagaaaacacgatttacatgaagatatgaaacaattgaaacgcaaaatttcagaatcacaagccgtaatccaactggacgatcttcgtcgccgtaaaagagttttgcgccgtttaggattttgtactcctaatgacattattgaactgaaaggtagagttgcatgtgaaatatctagtggtgatgaactgttactaacagaattgatcttcaatggtaatttcaatgagttgaaaccggaacaagcagcagcattattatcatgctttgcattccaagaacgctgtaaagaagcgcctagattgaaaccagagcattgccggaaccgtttgaagnngnctatgagaaagaaagttgcagcnnaaagatctgnnctaagatannantga

SEQ ID NO: 82213 - DNA, 969 bp, Saccharomyces pastorianus
  modified_base (875)..(944): a, c, g, t, unknown, or other
atggaggcttcatctattacagatttagtattcacaaggaacgaatttgtgaccacagaaagtttgcagtcgttcttttcaacctatgatgaagaaacgaaaaacgtgttcctgcactttatagagaattataagcacataatagtttcaaaagacaatgttatcaaagtcattgccgctgaagtagaagacattactagcaggttctccaaaggcatcacagaaaatgaccttcgaattgctagtgttaaagtgggtattataaacatcaacaaacaaattacaaggctaagaaaagaaattaatgaatctaacattaaactgagaggaccagagtttaatgagctgccgaagagaataaggattgaatataaacaggcgagattactatctgaaaaacatctttctaggttactaaagtttcaaaataacctcgctcaagtaagaactcaaatagacaccagtgctactaatgcggttttaattcaaactttaagtgaatccaacgaaataattaagtcaattaatggatatattggttctaccgaaaaagtagaagacttactagatgagattaaagagggtcatgaccgtaccgaagaggtcaatgatttattagctcattataataaaggtcaagacgaagaagcagaagaagaaattgaaagagaattagaacaattagaacttgatgaaaagaataataataaggaagaaaataagaaccaggatttgcacgagccaaaagaaagcagtagcgaggatctattaaagagattgaataatctgaagataaatacaaatgaaggacctgtgcaagataatgaaaaccacgataatgagataagaaaaatcatgatggaagaacaaccacnnnnnnnnnnnnnnnnnnnnnnnnnnnnnnnnnnnnnnnnnnnnnnnnnnnnnnnnnnnnnnnnnnnnnngacggaagaaagaaaatatgtgtga

SEQ ID NO: 82214 - DNA, 255 bp, Saccharomyces pastorianus
tgccaagcttgcattgccttgcaggtctactacttttctacttacttggcacgaggccgcgcaagccagatccaagcacgccagaaagtgcggtgtactggtgcaaccttttatcgatttctcatcatatcactatcgcaacgggcatgggcgacgaaaagccaatctaaagcgttgtctccctcgttcctcgcgcacgcgattttgcgttctgcacaggaagccgaagtcgaacaagaagcaggcaaagtttag

SEQ ID NO: 82215 - DNA, 1686 bp, Saccharomyces pastorianus
  modified_base (1678)..(1678): a, c, g, t, unknown, or other
atgggcattttggactcgctgaaaaaacctgttaatatcaagagttcgctccccaaattctcccgcagtgctaccagcatcaatttaagtagccacccagtaagttcacggtccttcctcgaattaccaccagagcttttcagcatcactaaacctatatttaagcttctgcaagcacacgcaaataagatttacttccaatcttccgacgctgaggctgtatggaatgttaaggatgcttctggacatgtttttgaagcagagtcaatttctttgctcggctctcatataattattacaaattcctctgtacaagtcgcagacgtggccatcatagattccccttccaacataaaccaatgtgaaatttcaagcgttggagagttcctgcaattcaataatggccagctatctatcacatgtaacgattttggtttactggagaagttcaaaaggttgtgtatgatttctatttttgagttcatttctatatataaggccttgacaggcacagtgatttcctcttatgggctgagaatgtctgatatgcatatcattttgaactcgccgttcaattttaaggattggtgtgaagtttatcttgatggtcaaggttgggtgaaagtgtggtgtcatattgataaagtgtctaaaaccaataattctaaaagtagtagtgacaatgatgctaaaggaaagtatcaaatacggttttatagagatgacaaatccacatctagcaagaactgcgttttttttattcctgacaatgagtacgttcaagatattttcttttataacatcaatgcggcagaaccttctaaaaatatgaacgacttttttcaagggttgcaaatgataaagctcgttggtaatgtacgcttttgcagtgatacggactttaatgatgtggtggatagtggatccatctatagtagtgcaaacaacggcagtggtgacagcagctcgacagcattgaataatgaaagtcctaacactacaccaaaaagtagaactttcttttcacctaaagggcacagaagaaatagctcccatgtaagttcgttaacttctagatcaacaaaaaagcctataactaacttcactacacgtacaaatgggcttttgattaggccattgccccatcatggcgtacatcacctggaagcaatgatcaggttcattattcctttgatggattgtgcaagactttatgggcgtccagttcaattcaagacagaaagaaccgatataaattcgttaatgtttggattacctaaattgccctcagtggattattttgctgaagaggagattgcccatttgatgacccaggaatttaatcctttgaaagaaaaagatactgacgatactatggctttaactatgtcaagattttctagctacctgcaagaaagaatgacaaaagtctccaagagaaacacagaactcaacttcaggacctttagtgatgtaatgggcatgtataatactacgagggatcactctaaacttaattgcatgagtgacaaggataattctgtgaaggaattttcattgagtgataaaagcaatgttagttctgaaacgactaatatgatgaatcaattgcaagtaaacgcccatgaatacaaagttctatgtgcgaacgtcctatcgtcgcaagtacttcgcccanttgcatag

SEQ ID NO: 82216 - DNA, 267 bp, Saccharomyces pastorianus
atgatacagcctagcaagtttgaaaacttgattgcaatttatgacattatattctgctgtttgcaggtatatctactttgtaagtttaaagatgcaaacaaatcagtcttcttggtcccagttacctggccttgggccttgaggtgctcttggaccacccgccttctttgccatgataatttggtcaatggaaagcacagtagttgcagcttctgtagcgacgttaatagcaaactttttcggggatcctctagagtcgacctgcag

SEQ ID NO: 82217 - DNA, 990 bp, Saccharomyces pastorianus
atgatgctgctaaatatgtatacgaaggcaaatcaccttatgcaagggatacatatcgttacacaccggctactaggttggctgctagtgcctaatcattattttggatggtttcatttggggaaggtcatatttgttattttcgatttggttactgggctcattataatgaagcttttgaaccaggccatctccagaaaaagagctttaatattagaaagcatttggctattgaatccgatggttatcaccatcagtacaaggggaaacgctgaaagcgtgctttgctgtttaatcatgttcacgcttttttttctacaaaagagtagatacaccctagctggaatcttatatggtctttctatccatttcaaaatatatccaatcatatattgtatcccaatagcaatttttatatactacaataaaagaaaccagggtccacgaacacaacttacatcgctactcaatatcggtttgggtactctaacaactttgcttggatgtggttgggcaatgtacaagatatacggatacgagtttctggatcaggcatacttgtaccacttatacagaacggatcacagacacaatttttcagtgtggaacatgctattgtatttagattctgcaaataaggaaaatggtgagtccaatctctcaaggtacgcatttgtgcctcaattgctgcttgttttagtaactggatgtcttgaatggtggaatcccacattcgataacctattgagggttttatttgtgcagacgttcgcatttgtgacatataataaagtgtgcacatcgcaatattttgtttggtacctgatctttctaccattttacctctcaagaacgcacattggttggaagaaggggcttttaatggccacgctttgggtaggaacgcagggaattcggttaagccaaggttactatttggaattcgaaggacagaatgtattctatcctggactatttattgcaagcgta

SEQ ID NO: 82218 - DNA, 606 bp, Saccharomyces pastorianus
atgacttcatctctagatgatatagaaccaacagcatataataatatggaagcggacgaggaatattgcagacgcaacgatatacatgacctttccagcgtggtcggtgatgctgtctcacaaggtgtgccagacatggatggtcaaacaacggattcttcgaaggaccctgagccaaattccgaggataagaaagcgtttcctccttcgagtggctcatttttttctcctaatctacagggtcaaaggaagaaagttcttttaaagtttgttttcacaaattgcttactggccataatttgctttacaatgtttgtgttgttctggggggctctttacgacaccagtaagtatctacacaaagtcaagcttctggttgttatccaggaaccccctgtggtaattttggataataacagttccatggtagtgccctccatatcgtatgccttgcctacttttatcaataaaataccatgtgattgggatatttataacagttctaccttccaggccaagttcgacgtaaatacgccgcagcaagtcaatgacaaggttgtcgatttggttacgacgaaaaatactacctgcagcatgcaagctgcc

SEQ ID NO: 82219 - DNA, 225 bp, Saccharomyces pastorianus
atgtttaatactacaccaattaatatcgacaaatggttgaaggagaacgaaggccttttgaaaccaccggtgaataattattgcttacataaagggggattcactgtgatgattgtcggtgggcctaatgaaagaaccgattatcacaatcaatccaactcccgaatggttctatcaaaaaaaaaggatctatgcttttaccggttgtggatgagacagacgctg

SEQ ID NO: 82220 - DNA, 2523 bp, Saccharomyces pastorianus
atggaattatttaacaaggaagaagcgagcttcgagactctgttaaaacgattactcgttgtcagtgagtcccatagcaggtaccatggttcgagcttggacccaatggttaaagttggtcatgaaatgagaaaaattagcggttacttgagatgcattttgagaaagcatgctgcaaatcatgatggcatgtctctaacacaatccatagtgaattcttacaagagtttattcaaagatgcgcaaatactcgatttgtatcataatcttttatttggatgtatgcatttgcttctcgatgcgaacatgtcatactttaggatggattcacaaaagctttttgcggtattactattcaaggtttattataagttgagggacattttctatgtcacaaatgaagtacgactaggctccctaatcagtgcgtttgtatacaaatttaaaagttgctatgactttataagctgtaactcactgaaatacggaagcgttcgtgacgttatatcaggcgaagtttccctgattaatcttccgccaatcgattccaataaggttataaatagagcatattacagactagatgtaaagaagttggcgatcaataataaactagttgaaatccttgaattagataatggggagatagctatatttgaggttctttctgaaaaaatgccatacacattacaaaccattgataacttgttccaatcccttgcgttaggaaaccatgacttaatgaatgttgggaggtcgctgctatttcgaccatttaggtccggcgatcttgatctcatcagacttgatgatagtggagcaaaactaaaggtaccgataaataatagcattgtattgaggttaacttgcaaagatcctattcaatggcaagagtattggaaacatgttattagaaagcttttcgactcaacagctacaaaagaatacaagcgatctggaagtaaaatttctcaacaggtttatgttaggagtaacaaacctgattatacttctcctaaaagaaatgacgatatgcctattagctctgtaaagatatcagatacaatacacaatggtcgcacactgcatagatcaattcctttgccgggaagtctgtcttccttaatagagacctctaatgaataccctgacgaggagtcactgtcaatcatgagtgagagggcaacagttagcgaagactcagatcttgacacctctctgaaagatattgaatccctaagttgtgaaaagctaattgaattggataagagcattcaagtacctctctcgcctaaatatatggacacacctaccttaaaaaacattagaacagcttctcaaactttcagcctggagagtgtctctcccgaactaatagagagtgttgcgtctgaaattgacgattctgagagtataatttctgaagatggaaaggataaacgagataaagatttattcgatccagatatcgatttctataagccaacgctttatcggcgtaaatcttcatctttactaagcatcttctcaaaaaacaaaaagaatctaactatcgatattcccaaaaatcattcaagatcattgtttagtttgccaggcaatcaacaatcagttaccccgatatcagcaagcccccatgacgataacgttgatgaaacgtatgtatcgtttccgttaagcataaacacatctggaggagcagtatatttcgaaaacgattcggtaaaagtttccctttggaacggcaagtcatgggtgcctttgagtaaggacatgctgtgtttgtctttaattttatccggagacaacgagaccttactaattatatataaagacttcgaaagggagaagtgtaaattggttgtgaaattggaacccacctggaagtacaatagatcaacggcacaagatgttcaacttcggattccttcctctgatttcaaagctagtgtatttggaacactccacgatctcacgctgtctatacgctgtgcgcaagctgctaagttggtgaatgtgttacaatatcagttacaaagtagccaggcatcatccctttcaccctcaaccaccacaggaactttatcaacggtatcttcgtcttcatgcttcagtcgtaatgtaactagatcatctactgaaaattcagaattggctaatatgaaagactcatcagaatatataagttcttcacttctgttatcttctgttaaagtaaggcaacatgttaaaacgaaagctgatgtttggaagccgtctcgagtaggctataccgacatattttcccaggaatataaaggaattgttgttgcgataaagtttgtgatctgttctgatgctgaaggaaccttgtacccgagagagtataactcccgtctccatgatataaaaagacttgggagaacaggactgtcattcacagataaaaaggaggcgtatttactcgaatttaaaaaccaggacgttgtagatcatgttcataagttaatcttgccttttaacacatcttggcaatctagctag

SEQ ID NO: 82221 - DNA, 1098 bp, Saccharomyces pastorianus
atggctattggtcatcctgagcagcaaaagatggttagatttatcagtaatgatttcactgtaccgaggtggagaacggcagcactcaaaaatgcttttgttctgctaagtaagcatagatatatggatgcagcagttttctttctcttaactgactctctaaaagattgtgtcaacgttctttgcaagcaagtgcatgatatggatttggcaatcggtgtatgtcgtgtttatgaaggtgataatggacccgtgttgggagagctattgacagcgcaaatgctacctgaaacaataaaggagaatgatagatggaaagcaagtttcatttactggaaattgagaaagcaggaagtggctattaaagctttgctgactgctccgattgatttagaaaacaactcaagcattgttgataaggaagtctgtgttaacagatcattccttgttgaagaccctgctttgctctatctatacaatcacctgagaaacagaaacttgacgtatttcattggatctctaaatgttgaagcaaaaatcgagtgtactctgatcttaagagttactgatattctttgccgaatgggttgcaattacctggcggtttcacttgtgaagaattggaagttcatcgaaagaaattccataccaattcagaagctattaaagagccccaccaaggatagagcatattctgctattggcgccatggcgtctgaaccaatttctactgctaggatgaggcccagtctttttgataagtttggctcgccaagtgcttcagatatagagtcacctaatccaaagttaccgaatagcttattagacgacttcttgcaaccaccaccaaatagcacttcttcaaattccctcgctcaaagttcttcttctgcacctagaagtatactggatgagttcgtctctccttcatattctcagcataaagagaatttaactccaaaagcgccaaacgactctgtgggtgaaacagacaactcagaaaagaggaaagataaactctctaaggacatattagatgatctttcatcacaaaagccacagaagccaaaaaaatctgctattaccaagacttactag

SEQ ID NO: 82222 - DNA, 135 bp, Saccharomyces pastorianus
atgagggatgtgtcttgggcattgcactcagacaataaagaaatattattatcttctattgaccgccacataacctcatggaatcgcgctcgagaatatagaataacctattggattaaggagcagacttggtga

SEQ ID NO: 82223 - DNA, 195 bp, Saccharomyces pastorianus
atggatccattaaagtactttattgctaaagatagagactatccggtcgaatctttccctgatccatacccctgtttcaataagacagtgtctctagcacttactgagcaactaacgaaaacaactttgccttatctaacccgccaccagcagatcacgcttatcacagtcattcaagcagtggatgaatcacca

SEQ ID NO: 82224 - DNA, 2181 bp, Saccharomyces pastorianus
atgtcattgaactttcttccaggacgccccaatgctacccctcagacagcttgtcaagcaacatggcaaaatcataccatctttgcatattgttcagggaataatttaatcatacttaccaacaaattcactaggttacagaccatatatacacaatcagactgtactgcggtcgatattaacagccagaatggattcattgccctttccttccacaatagggtgctcatctacaagcccattcatcaaattatgcagaatcccaagtggacccaatgttgccagttgttccatgatgacacgccagtaaactgcctaagatggtcttctgataatgagttagccattggatctgattttctttctttttggaaaattaaggataattttggtgtgtatcaacctattttgcagtggaaccagaaacagcctaaacctgtttataatgtgattatatcacaagattcgcagctgatagtcagtattgggaagtacgactgtaatgctaaactatggaagcgtgtttcaatagtcggagaacaagccatctttaaccttactatgttgcctcatccgaaacctataactgcaatgcggtggaaaaaagagccagaccaggtgagtaaaaacaacactgcctctcatgctctttatacgctgtgtgaagataaagttctgagaatgtggtcttgttttgaaatggagaaaaaccatactgtgcaaatatggggtgaagtgcctctttcccccacgcagaagttctgcgtgataatagacaattggatcattaggcaaactctcagtgtgaaagacccggaaatctttgatatatctgactcagacattgttattctgggttcaatgactggggaaatggaagttttggctttgaataatctttcccaagatcccccaaaaccaatgactaaaaagaccatttcccataaaaaagtcaagaaagcaactatgctaaacgatacaagatatttgtacttccccgaaatacaaccctatgacaatgtgaagggcaaactttcttttctcgtccacgatttacaaggtgtaatcagacatttactaatcgacattctgcagcttataaacaataaaaccgacgatctgagtgccgctttagagcacaaatttacgggacataacaaatctgtgcagaagttggtaagaagcagcgacggcgaagctttattaaccacttcgagattctcagaaaatggcgtttggtacccacaaaagttaaaccatggggtttcactgcggttacaaaatacaatacaaacagaatctcccataaaatttgcagttgtacatgagttgggtaaacaggtcatctgtcttctcgaaaatggggctttacaagcctgggaatgtccaacgaatcgtaaggaggacagtgaacagaagcaatcatatttacgtgtggaaacgagactgaaagaggagaaaaaaatccatccaatagttatgttaaatacacctgagccaaagcatggtcatgagcgtcatttcaccgcgttaatattctctgatggttcaatcaaagcttttgaagtctctttaacacgtggtatttttgaagtaaagtctgattcattagatatcgatggtgacgacatatacaagatctccattattgaccctgtacatcaaacttttgtgagtaacaggcctttgatttctttgattactaaaaaaggtcttaccagaacgtataaagccatcgttaattataatgataggcatgtccaatggatcaaggcatgtgaaattaacagcggaataatgaattgtacatgtattagaggatcatctacagataagttatgtattgttaattctactggtaaagtaatgtcactatgggacctgaacaggggagttcttgaatacgaagaaacatttcataatcctatcgaggatatagattggacaagcacggaatatggccaaagcattgtctctatcggatttacaggatacgctttactttatactcaattaaggtatgattacacgaacaacacacctagttacctacctattgaaaaaattgatatcacagcacatacagctcataatataggcgactccgtatggatgaaaaatggcacgtttgttgttgcttccggaaatcaattttacatcaaggataaatctctggattga

SEQ ID NO: 82225 - DNA, 945 bp, Saccharomyces pastorianus
atggaagataaagagcagcaagacaatgcgaaacttgaaaacaatgagtcactaaaagatctgggagttaacgtgctttcccaaagcagtttggaggaaaaaatagctaatgatgtaactaactttagcaacctacaatcgctgcagcaagaagagactcgtctagaacggagtaagaccgctctgcaacgttatgtcaataagaagaatcatctcacaaggaagttgaacaataccactaggatatctgttaagcagaatctccgagaccagatcaagaacttacaatcagacgatattgaacgagttctgaaggacatagacgatatccaatcaaggattaaagagttgaaagagcaggtagatcaaggtgctgaaaataaaggttccaaagaggggctgcagagacccggtgaaactgagaaggagtttttaatcaggactggtaagatcactgcatttggacacaaggctggtttcagcttggacactgcaaacagagagtatgccaagaatgacgaacaaaaagatgaggattttgaaatggcaacagaacaaatggtagaaaatttaacggatgaggatgacaatctcagcgatcaagactatcaaatgagtggtaaagagagtgaagatgacgaagaagaagaaaatgacgataaaattctcaaagaactggaagacctgcggttcagaggccaacctggtgaggcgaaggatgatggggacgagttgtattatcaagaaaggttaaaaaaatgggtgaaacaacgttcttgcggtagtcaaaggtcatcggacttgccagaatggcgaagacctcatccgaatattcccgacgcaaaacttaatagccagttcaaaatacccggtgaaatatactcgctgttatttaattaccaaaagacgtgcgttcagtggctctatgagctttaccagcagaac

SEQ ID NO: 82226 - DNA, 1425 bp, Saccharomyces pastorianus
atggtcatctattatgtagccaatattagaagaaatggccgtggagcgttgtcaattcaaagcttttacaatataacgctagacttcatagattataaacaagatttcgatcattggagaggagtagctcaaaagacaaaaatgaatcaactgattgaagagtggggaaattcgacgacaaaaaaatgtttttcattctgtaagtatccatttatattgtcactcggcatcaaaatctctattatggagtatgaaattcgcagaatcatggaacatgaagctgaacaggcttttttaatttcactggataaaggcaaatccgtagacgtttatttcaaaatcaaagtacggcgtgacgttatttctcatgattcattgagatgtatcaaggaacatcaaggcgatttattaaaatcgctgagaatagagtttgttaatgaacctggaattgatgcgggagggttgagaaaagaatggtttttcttattaacaaaatcgctgtttaatccgatgaatggcttatttatttacataaaagaaagctcacgttcatggtttgccattgaccctccaaattttgacaaatcaaaaggaaaaaactcacaactggaattatattacttgtttggagttgtcatggggttggcgattttcaacagtaccatattagatttacaatttccaaaggcgctttataaaaaactatgctcagagcctctgagttttgaagattactcggaattgtttccggagacaagtaggaacttaataaaaatgctcaattacacagaggataatttcgaagacgtcttttctttaacatttgagactacgtatcgaaataacaactggattttaaatgacagtaaatcgagcaaagagtatgtaacggtagaattatgtgaaaatggcagaaatgtgccaataacccaaagtaacaagcatgagtttgtcatgaaatgggtagaattttatctggaaaagtccattgagccacaatacaataaatttgtttcaggttttaaaagggtcttcgcagaatgcaattctataaaattatttaattctgaagagctggagagattagtgtgtggtgatgaggaacaaactaaatttgatttcaaatcgttaagatccgtgacaaagtatgtaggtggcttctccgatgattccagagcggtttgctggttttgggaaattattgaaagttgggactatccattgcagaagaaattattacaattcgtaacggcatctgatcgtatacctgcaacgggtatctctactatcccattcaaaattagcttgctagggtcgcatgatagtgatgatttgccattggctcatacatgttttaatgaaatatgtttatggaattattcctcgaaaaagacctgcagcagcaagctgcatgccgtcgtttac

SEQ ID NO: 82227 - DNA, 1227 bp, Saccharomyces pastorianus
atggtttctttatttgataagcttaatgcaaaaaaagacggtagagatggatctgtgtcgaaggagttgctatcacattctgtagcccatactaagaacaggttacccaaatcaggaaggcgcacgtcggaacggtccttagccgctagtgtaaaggacggaagttgctcaaatagcaaaagcaataagcggaactcttcggcatccgtgtcaggggaagaagataaatcctgtctaatttcacttaattgcctatgttgtggtgtcccactacggtttccagcctccataacgaaatttcgatgcagcgcatgccaagtaacagttattgtaaaggagccggaaattaacagtaatttggaatctagtacgcatatttcgtgcacattagagggtttgcagatggtagtaaggcggtgccatgatgatttgcagcggcttaagaagactgggattctggataaagaaagaaaggggttgatattccaaccggtaataacgtatttactggacagatttcatgatgttagcattttaaacaggtcgttcttggtacatgatggtggaaagaatataaagatgctgaattatgaagttttacaaagattttacagtatattatcaaatcttcctacaaggaaaccgtattatagtatgctgtgttgctgtaacgatctactgaagagaataacaatcaataaaggggaaaatttgcaaatattacagtatcgttggttgctgattatattaaatatacctacaatacgaacctgccttattagagatcggaagagcaaaaatgtgtttgagacccaacaaataagggcggtgtcttatgagttggccaaacgatgtattggctacttgtctaacctatcaacaaaaacatctcaacaattgattcaatcattacggcgaacgcctacggataatttttcataccaggtagagattttaaatttatacatcaatttccaattttccagattactgtcgaacgaattatcaaatagaaccgcaaaaaataacgtgaagcctgaagatgagatgcgatctcgtcttcgtcggcatcacactactggccatgaattcctgagtactagaccaataagtgcacaatcaaatgataaacagggaagtggtttcacgcatcccgtcaataataagatgaaatttaaattttttcaatatgaggaagactggcatattcactctgcagcaaattga

SEQ ID NO: 82228 - DNA, 342 bp, Saccharomyces pastorianus
atggaggctggaaaccgtagtgggacaccacaacataggcaattaagtgaaattagacaggatttatcttcttcccctgacacggatgccgaagagttccgcttattgcttttgctatttgagcaacttccgtcctttacactagcggctaaggaccgttccgacgtgcgccttcctgatttgggtaacctgttcttagtatgggctacagaatgtgatagcaactccttcgacacagatccatctctaccgtctttttttgcattaagcttatcaaataaagaaaccatttcctattttactttacctatcagccgcagtattcgagagatatacctgtaa

SEQ ID NO: 82229 - DNA, 468 bp, Saccharomyces pastorianus
atgaaggagaatgacatgaataatggcgtagataaatgggtaaatgaggaagatggtcgaaatgatcatcataacaacaataataacttgatgaagaaggccatgatgaacaatgagcaaattgatagaactcaggatatcgacaacgccaaagaaatgttgaggaaaatatcaagtgaaagcagctcgcgcagaagctccctgttgaataaagattcatctctcgtgaacggcaatgcaaacagtggcggtggtacgagcattaacggaacaagaggaagttctaagagtagtaatacacactttcagtatgcctccacggcgtatggtgtaagaatgttgagtaaagatatatctaataccaaagtggaattggatgtggaaaatttgatgattgttacgaaactcaacgatgtctcactgtatttcttaacaagagagttggtagaatggttttggtacatttga

SEQ ID NO: 82230 - DNA, 624 bp, Saccharomyces pastorianus
atggagcaaatgcattcattggaatcaagtttacctccagagcaacctcctacaaagcaagcgattgagagtcttaatttggaactttctcaagagttcaagctagccgccaatgcggtgacaagactttaccgggtggctaatgagaaaaactctttaaccaaacatcagggctacctcacctgtttggatgacatactatgtgcattagactcaaatgtgactgctgacgagttaagggcttggtgctataaacgaagaaatgatatcctttcaaactcgcaggataaatctttaaatccggtgaaagaaagggaaagaaagcttaataagttcagtgaaaaccaacaccgcgaaaatgaagctcataaagaaccttttgaaaaagatagcgcagtcaagtataatttcagtttcaacgaatcaaatggggacctctcaaatattaatgaaaatatagcacctaaatttagactttctatgccgcctttaagtgtcgaacatcctcctaggaatggtagtcgtataaaatcctggaaagcacgaacaatcaatcacggaagaggggacacgagaaaactaaatgacataacgggacttggacatgagcgtgagcgtgatcgt

SEQ ID NO: 82231 - DNA, 216 bp, Saccharomyces pastorianus
atgtattcgatggccttcttggcttcctctggcttagtggcaaattcttcagcaacagtctttaagttgaacagagctctaaatctgttggccaaaactgttttgccagacttgttgactaagatgtcccttagttgctctagagtgcattcatcgacgttttcttggaaatgtttttcaaagttagtagacatgttttattttattacttcctag

SEQ ID NO: 82232 - DNA, 927 bp, Saccharomyces pastorianus
atgagtcccagcacaatcatatgtattggtatggccggatccggtaaaacaactttcatgcaaaggttaaactcccacttgcgagcagagaaaacgccaccatacgtaatcaatcttgatcctgcagtattgagagtcccctatggtgcaaacatcgatatcagagactcaatcaaatacaagaaagtgatggagaattaccagctaggtccgaatggtgccattgtcaccagtttgaatttgttcagcaccaagattgatcaagttattgggttggtggaacagaagaaggacaagttccaaaactgcatcatcgacactccaggccaaatcgaatgttttgtgtggagtgcgtcgggtgccattatcacggaatcttttgcctccagctttcccacagtgattgcatatatcgtggatacgcctagaaactcatccccaactacattcatgagtaacatgctgtacgcctgttccattctgtataagaccaaacttcccatgattgtcgttttcaacaagaccgacgtgtgcaaggcagattttgctaaggaatggatgacggattttgagagtttccaagcagcaatcaaggaagatcaagacttgaatggtgacaatgggctgggctccgggtacatgagctcattggtcaattctatgtcactgatgcttgaagaattctattcccagctagacgtcgtgggcgtttccagttttaccggagacggattcgacgaatttatgcaatgcgtagacaagaaagttgatgaatacgaccaatactataagcaagaacgtgaaaaagcattgaacctaaaaaagaaaaaggaagagatgagaaagcagaaatcattgaatggcctgatgaaggatctagggttaaacgagaagagcagcgctgcagccagcgacacgacagcatag

SEQ ID NO: 82233 - DNA, 162 bp, Saccharomyces pastorianus
atggccaaaacaacaaaaagagcctccagtttcaggaggttgatgatattcgcgataatagccctcatctcattagcatttggagttagatatctatttcacaattctaatgctactgatttacaaaaaattctgcagaacttgcccaaagagattcccaaa

SEQ ID NO: 82234 - DNA, 660 bp, Saccharomyces pastorianus
atgtccggaataattgacgcatcttctgcattaagaaaaagaaagcatttaaaaagaggtataaccttcactgtgatgatcgtgggccagtccggatctggtagatcgacttttataaatactttgtgcggtcagcaggttgtagacacttcgacgacaatcttgttacccacagatacgtccacagaaatagacttacaattgagagaggagacggtcgaattagaagatgatgaaggtgtcaagattcaacttaatatcatcgatactccgggattcggtgattctctcgacaattctccatctttcgaaatcatttccgactacattcgccaccaatatgatgaaatcttattggaagaaagtcgtgtgagaagaaatccaagatttaaggacggcagagttcattgttgtctttatttaatcaacccaactggccacggtttaaaagagattgatgtggaattcatcagacagttgggatccttagttaacatcattcctgtgatcagcaaatcagattccttgacaagagatgaactgaaactgaataaaaaatgtggatcatggaggatgatcgacagatggaactggccaagtgttgataatttccctttcgatgaagatgaaaatcagtcgaagattacgaaaccagggatc

SEQ ID NO: 82235 - DNA, 1305 bp, Saccharomyces pastorianus
atgaacaacacttccataaccggaccacaagtactacatagaacaaaaatgagaccactaccagtgctagaaaaatactgtatctcgccacatcatgggtttttggacgaccggttacccttgaccagactgagcagcaagaaatatatgaaatgggaagaaatcgttgctgacctgccctctcttttgcaagaggataacaaggtgcggagcgtcatcgatgggctggatgtcttggacttggatgagacgatcttgggcgacgtcagggagctcagaagagcatattccattttggggtttatggcgcacgcttatatttgggccagcggaactccccgggatgtattaccggagtgtattgcaaggccactgttggagacagcacatattttgggtgtgccaccgttagctacgtactcctcgttggtgttatggaacttcaaagtgaccgacgagtgcaagaaaacggaaaccgggtgtttggacttggaaaatattacaacgataaacacatttacgggaaccgttgacgaaagttggttttatctggtcagcgtgcggtttgaaaaaatcggcagcgcttgtttaaaccatgggttgcagatattgagagccattagaagcggtgataaaggagacgctaacgtgatagacgggttggagggcttggctgcaacgatcgaaaggttatcgaaagccttgatggaaatggagcttaagtgtgaacccaatgtattttatttcaagataagaccatttttggccgggtggacgaatatgtcgcatatggggttaccacagggtgttaggtatggagcggaaggacagtatcggatcttttctggcgggtccaatgcgcaaagctcgttgatacagacactggacatccttttgggcgtgaaacacactgcgaatgctgcgcattcttcccaaggagacagcaagatcaattatctggacgaaatgaaaaaatacatgccaagagaacatcgtgaatttctttaccatttggaatcggtatgtaatattcgcgaatacgtttctcgtaacgcttctaaccgtgcattgcaagaggcctatggacgttgcatttccatgctgaaaatatttagagataaccacattcaaattgttaccaagtacattattttgccctccaattcaaagcaacacggctccaataagccgaacgtactaagtccaatcgagcccaataccaaagcaagtggttgtttagggcataaagttgcctcatctaagactatcggaaccggtggtacaagattaatgcccttcttaaag

SEQ ID NO: 82236 - DNA, 195 bp, Saccharomyces pastorianus
atggttgatgcagaagcctcgcaacttaaagcttttcagttgtttcttctcggtcatattttttatacatatatacatacatatatgcatgtgctgtgtactacatgctgcctttcttcaatttttatgtatagacaaggaggccagaaagatattataaacaatgttttttatgtgaacttcgaagtactttga

SEQ ID NO: 82237 - DNA, 516 bp, Saccharomyces pastorianus
  modified_base (513)..(513): a, c, g, t, unknown, or other
atgcaagcggatatgcatggaaaacttcacgctgccttagaagatggtttcttcctctttccttttgaacagcaacaacaacctaacatttattatgacacaaccaccgatcaagaagaccgtccttgtttttcttttggatctacaatttcccctagaagttggcattttgaaaagtctgacaaaattgcctcatctcagctgcagaacttggttcatacacaaccaattcatttaattaatcctcaaatattgttcaatgaagagtttctgaatttggaaaatattgattctcagcctgattctcagcctatttccaaggaaacgaaaactacgaaggactgcacaatggcaactggtcctgaaagaggaaaaaagagctctgaaagtaccagatcctcttcattatcatctcttttttctaatgatgaatccgcatctacgttccactcatcattcaataaccatgataactttcaaaagagcaacagaaatggagatgatatcgatatntag

SEQ ID NO: 82238 - DNA, 1737 bp, Saccharomyces pastorianus
atgaaatacgttgttgtttctggtggtgttatctcaggtattggtaagggtgttttagcgtcctctacagggatgctactgaaaaccctcggcctaaaggtcacttccatcaagattgacccatatatgaatattgacgccgggacgatgtctcccttggaacatggtgagtgttttgtacttgatgatggtggggaaacggacttggatctcggtaattacgagcggtacctcggtattaccttaagcagggaccacaacatcaccaccggtaagatatactcccacgtaatttccagagaaaggagaggtgattatttaggtaagacagttcaaattgttcctcatttgactaacgcaattcaggattggattcaacgtgtttcaaaaattccagtggatgacacaggattagaaccagacgtctgtatcatcgagttaggtggtacggtcggtgacattgagagtgcgcccttcgtggaagcattacgacaatttcagttcgaagttggaagagagaatttcgccctgatccatgtttcacttgtgcccgtcattcatggtgaacagaagacgaaacccacccaagcagcaatcaaagatttaaggtcattagggcttattcccgatatgattgcctgcagatgcagcgaagaacttaacaggagcactattgacaagattgccatgttttgccatgtggggccggagcaagtggtcaacgttcatgatgttaactccacgtaccacgttcccttattgctgctaaagcaacatatgatcgactacctccattcaaggttgaaattaggtgaagtgcctctaaccttggaagacaaggaaagagggtctcaattattgactaactgggaaaacatgaccaaaaacctagatgattctgatgatgttgtcaagattgctcttgtgggaaaatacactaatttgaaggattcctacctatctgtgaccaaatccttagaacacgcaagcatgaagtgccgtcgtcagctagaaatcctctgggtagaggcaagtaacctagagcccgaaactcaagaggtggacaagaacaagttccacgattcatggaataagctcagttccgccgacggaattttggttcctggtggatttggcacgagaggtattgaaggtatgattcttgctgccaaatgggcccgtgaatccggtgttccctttcttggtgtctgtcttggattacaagttgccgctatcgagttcgcccgcaatgtgataggccgcccaaacagcagttctacagaatttttggacgagacactactagctcctgaagaccaagtagtcatatacatgcccgagatcgacaaggaacacatgggtggcacgatgagattgggtttgaggcctaccattttccaaccgaactcggaatggagcaacataaggaagctttatggtgaagttaatgaggtgcatgagagacatcgtcatcgctatgagataaacccgaaaatagtgaatgatatggagtctcgtggctttatttttgttggtaaggacgagacgggccagcgttgcgaaatattcgaattgaaaggccatccatactacgtgggcactcaataccatccagagtatacatcgaaggtgttggaaccatcaagaccgttttgggggcttgtggccgcagcctccggcacacttggtgaagtgatcaaggacataaacctaagcgagggaaatgaaaatgaatga

SEQ ID NO: 82239 - DNA, 303 bp, Saccharomyces pastorianus
atgctgcattgtgcgaggaggtatatgttagtcaggccacgtctcctgtggcaaagtgggacatgtgttgctcgcttccagtcgtcagtacgaacaccagctagcgaaccatcggcagagaaaggggtcgacgagtggcttgaagcgatcaacgagctaagggaagagttctctgcaaaagaatacctgccagagacctcgctggctccaccgggccagtccaaagtagacctcttacagggttcgcaggcgggctccaagataaccaactgcagagcagttggcacaatgggaggcactgaa

SEQ ID NO: 82240 - DNA, 447 bp, Saccharomyces pastorianus
atgggttatacagacattagtattgctaacgttctactgtatttcaataaaaatacagccgtgatcaaggggatgcatggtcagttgacgactattattcgtctcttgaaggcctctcgtttaaatttgcccctagagtccctatgccagccgcctattgagagtgatcatattatggaatatgaaaacagtcctcatatgttttcaaaaataagagagcaatacaacgcgccgaatcaaatgaacaaaaactaccaatattttgtattggcgcagtcacgtatcaggacttgccatgcggtattacttatatctaacttattttcttcactggtaggtgctgattgctgttttcattcagtcgatttaaaatgtggtgttccatgctataaagaagaattatatcagtgccgaaatccgatgaatggtcggacctattatgtcaat

SEQ ID NO: 82241 - DNA, 738 bp, Saccharomyces pastorianus
atgaaaagcttctttatcacctcgcttaaacttgagtttgaatggaagcacagatttaccaagtacaccacaaaacaactaaaggagccttcctattctgaccctatttcccatagttctcataagaggcgtcgtgatagcgtcatgatggactacgatctatccaattttttcagctcaaggcaattggatatttccaaggtattaaacgggacagagcaaaataattctcatgtgaacgacgatgttctcactttgtctttccccggcgaaactgattctaatgcaacacagaaacagctgcctgttcttactccttcggatttgttatctccgttttctgtcccttcagtatctcaagtgctttttaccaatgagctaaggagtatgatgctagccgacaataatatcgattcaggagccttccccacaactagtcaattgaacgattatgtgacttactataaggaagaattccatccatttttttcatttattcatcttccttctatcatacctaatatggacagttatcccttgttattatctatctccatggtcggagcattgtatgggtttcattcgacgcatgcaaaagtgttagctaatgcagctagcacccaaattaggaaaagcttgaaagttagtgagaaaaacccggagacgacagagttatgggttatacagacattagtattgctaacgttctactgtatttcaataaaaatacagccgtga

SEQ ID NO: 82242 - DNA, 1962 bp, Saccharomyces pastorianus
atggaaccgttcgcatttggacgaggggcgcctgcattatgcatacgaaccgcggccgctcgaataaatctggacaattttgttccgtgttgctgggcacttttccgtctgtctttctttttcccgcttgaccctgcatatattagaaacgaaaacaaagaaacaaggacttcttggatttccatagagttttttttcttcgttaaacattgcctctctcaacacacgtttttctcgaagactcttgcaccaaaaagaaactttagggcgaagaagctaaaagacattggcgatactagaatagatagggcagataaagattttttattagtgccggagccaagtatgtttgtgaacggtaatcaatctaatttcgctaagcccgctggtcaaggtattctgcccattcctaaaaaatctcgaattattaagactgataagccaagaccgttcttgtgtcccacatgcactaggggttttgtcaggcaggagcatttgaagagacatcagcattcgcatacccgtgagaaaccgtatctttgtatcttttgcggtaggtgttttgctcgtagagatttagcgctcaggcatcagcaaaaacttcatgctgctcttgtaggtacgggggatccacggcgaatgacgccagcaccaaattcgacttcttcttttgcctccaagcggcgccattccgtggcggcggatgatccaaccgaccttcatatcattaaaatagccggaaataaagagactattctacccaccctgaagaatcttgctggtaagacatctgaagagttgaaagaggccgtggttgccttggccaaatcaaataatgtagaacttcccgtctcggccccagtaatgaacgataagcgagagaaaactcctcctagtaaggcaggctccctaggatttcgagagttcaagttcagcacgaaaggcgtgccagttcactctgcatcaagcgatgctgttatcgacagggcgaacactccctcttccatgcataagacgaaaagacatgcgtctttctctgcatccagtgcaatgacttacatgtctagtagcaatagcccccaccattcaattaccaatttcgagctcgttgaagacgctccgcatcaagtcggcttttctactccacaaatgaccgcgaagcagctcatggaaagcgtgtcagaattggatttacctccgttaaccctggacgaaccaccgcaagctatcaagtttaacttaaatctatttaacaatgacccctccggacagcaacaacaacaacaacaacaacaacaacagcaaaattccacctctagtaccatagtgaacagcaacaatggaagtacagttgctacacctggagtgtatctcttaagtagcggtccatctttaaccgatcttttgacaatgaactctgcacatgcaggtgcgggagggtacatgtctagccaccattcgccatttgatttgggctgcttcagtcatgataaaccgacagtttctgaatttaaccttccgtcaagcttcccgaatactataccgtctaattctactacggcttctaatagttacagtaatttggcaaatcaaacttataggcaaatgagcaatgagcagccgcttatgtcactatctcctaaaaacccaccaacaactgtttcagattcctcttccacgatcaatttcaatccaggcacaaataatttactggaaccatcaatggagcccaatgataaggatagtaatatcgatcctgctgccatagatgacaagtggttatcagagtttattaacaactctgatccaaaatctaccttcaagatcaacttcaatcatttcaatgacattgggtttatttattctccaccttcatcaaggtcatctataccaagcaagtcacctccaaaccattctgctacctcattaaatcatgaaaagcttctttatcacctcgcttaa

SEQ ID NO: 82243 - DNA, 354 bp, Saccharomyces pastorianus
atgcagggtcaagcgggaaaaagaaagacagacggaaaagtgcccagcaacacggaacaaaattgtccagatttattcgagcggccgcggttcgtatgcataatgcaggcgcccctcgtccaaatgcgaacggttccatccgaaacaggccatttcccaaaggttatttctcttaatggaagttgctcgcgtagttacctattgtcgatgccgcatatacgcagttaccttatccgttgccctacggagaatttccgcgatgcagcaccgtgcggcgagatcacaattttccttgtacactctactctgcccctggagtggttcacccccgtctgtgcgtatgttcgtgtatga

SEQ ID NO: 82244 - DNA, 105 bp, Saccharomyces pastorianus
atgatatctaggaccattggtgaatctattccgcccaacacaaaacatgctgtttccgtgtgtttgcccacatgggaagctacagtaggctatgaagagggtgaa

SEQ ID NO: 82245 - DNA, 2568 bp, Saccharomyces pastorianus
atggatattacagaattgttacagtgctttgcctgtactttggaccataacgctgccgtaagaactaatgcagaaacacatcttaaaaatgcaagtaaagtaccgggattcttaggcgcatgcctggatatcattgctgctgatgaagtaccagaaaacatcaaattatcagcttccttatatttcaagaataagattacatacggatggtctgctggtgccagacagggttcaaatgagttattagattcacatgttgatccggatgaaaaaccagtagtaaaagatatgttaattaaaacaatggtcagtgtgtccaagacctccccgcgttgtatcagagtgctaaaatctgcccttactgtaattatttcagaagattaccctagcaaaaaatggggcaatttgttaccaaattccttagaattactcgcaaacgaagacatcacagtaacatatgtcggacttctgtgtcttgctgagatttttaggacctataggtggaagaataatgatgaaagacaggacttagaagagttgattttaaattatttccctgctttattaaactatggcgcaaatgtccttttccaagatggtaaatatatgaataacgagcaaattggcgaattggtaaaattaatcattaaaatttataagttcgtttcataccatgacctaccatttacattacaacgctcagaatcgtttaccccatgggcatgtttttttgtcagcatcattcagcagccattgcctcaggaagttttggctatatcagatattgaggtcagaagtaaaaatccatgggtcaaatgtaagaaatgggctcttgcaaacctttatagacttttccagagatacgcatcaacgtcattaacaaggaagtttcagtacgatgagtttaaacagatgtactgtgaagagtttttgactcagtttttgcaagtcgtcttcgatcaaatcgagaaatggggaactggacagttgtggttaagtgacgaatgcttatactacatattgaactttgttgagcagtgtgttgtgcagaaaacaacttggaaacttgttgggccccactacaatgtaatacttcaacatgtcattttcccactactaaagcccactgcagagactttggaggcctttgacaatgaccctcaagaatatatcaaccggaatatggacttttgggatgtcggctattccccagatcttgccgcactggctttgctaacgacatgcgtgacgaaacgcggtaaaacgaccttacaaccgaccttagaatttatggtctcaaccttacaaaatgccgttggtgattacaacaatattatgttggataatgccttgcaaattgagtcctgtttgagaatattctccagcattattgaccgtttgataactaaagactctccatttgccagtgagatggaaaagtttatattgacatacgttttacctttttttaagtctcagtatgggtttctgcaaagtcgtgtttgcgatatttgttcgaagttgggttctatggatttcaaagacccgataataacctctactatctacgaaggtgttatgaattgtctgaataactcttctaattcattacctgtagaattgacagctgcattggcattgcaaacttttatcagtgatgagcagtttaatatgaagttatccgaacacgttgttcctactatgcagaaattactaagtttgtctaatgattttgaatctgatgtcatttcaggcgttatgcaagattttgtggagcagtttgctgagcaattacaaccttttggtgttgaattaatgaacactttggtccaacagtttttgaaattagctattgatctgcatgaaacatccaatttggatccagattccttcacgaacgttgatagcatacccgatgaatctgacaagcaaatggcggcgctaggtattttgtcgactacgatatctattctgttgtcttttgagaattcacctgaaattttgaaaaacttggaacagtcattttatccagctgcagagtttattttgaaaaacgacatcgaagatttctatcgcgaatgttgcgaatttgtagagaactctacattcctactgagagatatcacacccatcagctggaaaattttagagctgattggagaatgtaatagaaaaccagatagtatggtatcttattatttaagtgatttcatgctagccttaaataatatcctcatttatggaaggaacgaattaaagaagaacgagttttacacaaaaatcatattcgaaatatatcaaaaggctgttactgcagaagataattcgttagacgatcttagagtggtttttgatttatcccaagggttggttcttgcattggatgacagtttacctcaacaatacagagagcgcctactggcggatgttgtcggctctattctaacgcaaaagaatgaattgaaaactaatgttgtatttagtgtgactgcttttaatgtcgtaatctcaaatatgataacagagcctttgatcacgcttcagtacctgaaacagcaggttgtctga

SEQ ID NO: 82246 - DNA, 870 bp, Saccharomyces pastorianus
atgacggccgtaactgatatcatcgatgaattgaatgattcgagtctttcttctacaaggcttcgagagttgtgtctccagttacgaaagaagacagatactggatgtgcaattacggtgtccgatgaggtcaaccttattgaatctctctcatatcactccatatctccaggagtagacatacaaatcaacacagatgttttgcagactatagattactactttcagcgtaacaaaagtgaacatgacgaaattatgtgcgtccttatttctaagttacagccactacttttaaaacgcaaaagcaacttcgaactcaaagagcaacgtaatcttggtctcaaacccacgcttggaatgtctttgaaagaagataacctaatgcaggcgtgggtaagtcagggtggcttgaaaggcattccgttattctacgtaattctgttacatttgaaaaggagagacatatctacgaatctttcttggattattccaggaattctaaacatactagatgataccactgatataagaagaattaaacttcgtggtgttctgctcctacagacgctattaaatcatacctttatgaacgaaaccaatgactcaaaatggatacagttctctagtactggtttatttccactgttcgaaaagacgctaatcaatatgtgctattttctccctccctcatacaatgctgatgaaacaatagccatatggcgggtcgttttcccaacgatacagtcgttatataaagtagaatttttggacaattacacaaagtatcaatatcacctggaaaagttcatgtcagagataatcgtgcaaaacataattcctagggctacgacttgcatacagaaaatatga

SEQ ID NO: 82247 - DNA, 522 bp, Saccharomyces pastorianus
atgtctgtgcccaaaaaacgtaaccatgggaagttaccaccttccactaaggacgtagacgatccttcgttgaagtacacgaaggccgcgcctaaatgtgaacaagttgctgaacattggctcttgcagccactaccggaaccggaatcacgttatagcttttgggtaacaattgttaccttattagcgtttgctgctagattttataaggtctggtatccaaaagaagttgtttttgatgaggtacatttcgggaaatttgcatcgtattacttagaaaggtcttatttctttgacgttcatcccccttttgctaagatgatgattgccttcattggttggttatgtggctatgatggttcctttaagtttgatgagattgggtattcttatgaaactcatccagctccatatatcgcgtaccgttctttcaacgcgatattgggcacattgactgtaccaattatgttcaacactttgaaggaactgaatttcagggctattacaatgtgcgttgcatct

SEQ ID NO: 82248 - DNA, 198 bp, Saccharomyces pastorianus
atggagatgctcttgtttctgaacgaatcatacatctttcataggtttcgtatgtggagtactgttttatggcactcatgtgtattcgtatgcgcagaatgtgggaatgccaattataggggtgccggggtgccttatgaaacccttttccgtgcctgtgatttccgttttcggtcaaaaagaatatccgaattttag

SEQ ID NO: 82249 - DNA, 1779 bp, Saccharomyces pastorianus
atgcattggacgtccatcttgagcgctattttgcttttctgcctgtcaggagcaagagcatcacctgcaaagacagttattcgtaacaaggtgcccttgcttgtcactaatgcctgcacgaggatttttcaaaaagttacttgggagtataccagcaagtctaagcgttcatcaccagtatgttcttacgaaccagcgtttcaatcaatgctgtattgtatctatgaaacgttggatgaaaaaggttattcgaataagaccttagaaaaaacatttagtaccatcaaaaaaaactgtgcaagttatagtgatgctcttcagaacatgactaattctgagttttatgacgttctaaacaacggaacgaggcatatgacaccctatgtcaaaggcagtgcaaacctaacatatccagttgaaatggatacacagttaagaaaagcctactatcatgcattgcatggcttctatgctaacttagatgtcggaaacatatatggtggcattatatgtgcttattttgtcgctatcatggcttttgcaggcgttcttcattgcatgaattacactccctttaaaactgttctattgaagcaaaagcttgtgggatatgtaaggggatacctcactctacctaccattggaagcaaacatgcgtcagatttctcttattttaaaatattcacgggatatttacctacaagattagagggtatcattattcttggatatctcgtgcttcataccgtttttttggcatacggttatgaatacgatcctgaaaatataatattcaagtctcgtagagttcaagttgctcgatatgtggcagatagaagtggtgtactcgcattcgcacactttccattaatagttcttttcgcgggaagaaacaactttctcgagtatatttctggggttaaatatacttccttcattatgtttcacaaatggttgggaagaatgatgtttttggatgctatgattcatggctctgcatatactagttatacggtagcgaataaaacttgggcaacaagtaaaaaccgattatattggcaattcggggtggcagcactttgtttagctggcacaatggttttcttttcctttgcagtattcaggaagtatttttatgaagcctttctttttcttcatatcgtccttggtgcaatgttcttttatgcatgttgggagcatgttgttagtttaagtggcattgagtggatatacactgctattgcgatttggatcgttgaccggattattagaattatcaaagcttcttattttggtttccccaaagcttccttacaactaatcggggatgatctcattcgtttaacagttaaaaaaccggcaaggccatggagggccaaacctgggcaatatgttttcgtttcgtttttacatccactgtacttctggcagtcacatccatttactgttttggattcagtaagcaagaatggtgaactggttattatcctgaaagaaaaaaagggagtaacaagacttgtcaaaaagtatgtgtgtcgcaatggaggtaagacatctatgagactagctatagaaggtccatatggttcttcatctccggtcaataattacaataatgtattgttactcactggaggtaccggtttgcctggacctattgcacatgcaattaaacttggaaagacgtcagcggctgctggaaaacaatctgtaaaattagtgattgcagttagaggattcgacgtactcgaggcttataagccggagttgatgtgttga

SEQ ID NO: 82250 - DNA, 849 bp, Saccharomyces pastorianus
atgacgattaaccagcatttacaacaacttctcttcaacagaatagacaaaacaacaagcagtattcaacaagctagggcgccgcagatgttattagatgaccagctgaagtattgggtcctgttacctatttcgattgtcatggttttgacgggtgtactcaaacagtacatcatgacacttataacgggaagcagtgcaaatgaagcacaaccaagggtaaagttaactgaatggcaatatctacaatgggcacaattattgattggaaacggtgggaacctgtcttccgatgcatttgctgcgaagaaggaatttctagttaaggatctcactgaggaaaggcacctagccaaggccaagcagcaggatggttcgcaagctggagaggttcctaatcccttcaacgatccaagtatgtctaatgctatgatgaacatggctaagggtaatatggccagtttcatccctcaaactattattatgtggtgggtgaaccatttttttgctggatttattcttatgcaactacctttccctttgactgccaaattcaaagagatgttacagaccggtattatctgtcaggacctggatgtgagatgggttagctccatttcatggtattttatttctgtgctcgggctaaatccagtctacaacctgattgggttaaacgatcaagacatgggtattcaggctgggataggtggccctcagggcccccaaggccctccacaatcacaggttgacaaagcaatgcatgcgatggctaacgatttgactatcattcagcatgagacttgtcttgataacgttgagcaaagggttttgaaacagtatatgtaa

SEQ ID NO: 82251 - DNA, 1983 bp, Saccharomyces pastorianus
atgacagtctcacacaatcattctacgaagatatcccaacaaccaatctcctcggtatcagcatttaagttcttcggaaagaagctgttaagttcaagccatgggaacaagttgaagaaaaaggcgtctctacctccagacttccactctacaagtactaatgacagcgaatcctccagcccaaaactgccgaattcgttgaaaacctctcgccgtgcaaactctttcgctcacacaaccaacagcaagagatctttatcttccgcctcaaccaagatcctacctccggccggctccagcacgtccatctcaagaggaaacagacattcgtccacttcgcgtaatctctcaaactccaagttcagtagcgaacgattagtgtacaatccatacggcgtctcaaccccaagcacgtcactctcgtccgtctctacctccatgaagaaagaccctgatctgggcttctaccttcacgatggggattccaaaatccgcatgctgccgatcccaattgtggacccaaacgagtatctgcccgacgagatgaaggaggcaagcgtccagttgagcgataacttcgtctttgatgatgagaataagaccatcggatggggcggttcgtgcgaagtgcgcaagatccgctccaagtaccgcaagaaggacgtatttgctctaaagaagctcaatatgatctataatgaaacgcccgagaaattctacaagcgctgttcaaaggagtttatcatcgcaaagcagctaagtcatcatgttcacatcacaaatactttccttctaatcaaggtacccaccaccgtctacaccactcgcgggtgggggttcgtcatggagctaggtctacgagatttgttcgcgatgatacaaaaatcgggctggcgcagcgtggccctagcagaaaagttttgtatattcaaacaggtggcgtgtggtgtcaagttttgccacgatcagggcatcgcccaccgtgatttgaaaccggaaaatgtactgctatccccggacggcgtgtgcaagctgacagattttggtatctcagactggtaccacacagatccacacgacctgtccagccctgtcaagaagtgcgcagggatgatcggctcgccgccgtatgcgcccccggaggtcatgtactacgactccaagaagcactacgatacggaattgcaacagccgtatgacccacgcgctctagactgttatggcctcggtattatcctcatgaccctcgtcgacaacgtcattccatttttggaatcctgcagctttgacactggtttccgcgattactgtgacgcttatgaaaactttatccgtcttcacgatcgcgcattccgcaatcgtggcaattaccgcccggggccgggaatggagtatcgcttggctagaaatttcaagaatggacatgcatctcgcgtggcatggcggctcgctgacccagaagccgccacccgctacaccatcgacgacctcttcgaagacccatggttccaaggaattgagacttgtgtggatgccaacgacaaatatgtgtgtaagaaacctattatcaaaaccactacgtacgagaatccgcggggtttccatatcgctacagatgttgctgcaaccacacccacctcgaacccattccttaagagccgagtccccatcaggtcaatggtagatatagccgcccatccttccccaacggccacggttttagcgtcgtcgcctccgccgcctcctccggcgcactcatgtgccagcggcgaggccctatttacacttagggaaaccccgccgccccagctagcaaccctcacgcttagcgaagaacctcccgcaattcccgcaacacccgcaccttccgctcgcgttcgtggccactccccgcacagggtagtgcatcaccatctaaacattgtcaacagcttggtccatagttctagcgcggcgtcttctcaggttccggcttcgacctag

SEQ ID NO: 82252 - DNA, 345 bp, Saccharomyces pastorianus
atggctagatacggtgctacttccactaaccctgctaaatccgcttctgctcgtggttcctacttgcgtgtttctttcaagaacaccagagaaactgctcaagctattaacggttgggaattgaccaaggctcaaaaatacttggaacaagttttggaccaccaaagagctattcctttcagaagatttaactcttccatcggtagaactgctcaaggtaaggaatttggtgtcaccaaggctagatggccagctaagtctgttaagttcgttcaaggtttgttgcaaaacgccgctgccaacgctgaagtatgtcaagaatattatatgtttagtaccagatga

SEQ ID NO: 82253 - DNA, 387 bp, Saccharomyces pastorianus
atgatatttctaaaatctgtcatcaaggtaatcgacaattcaggtgcacaattagcagaatgtattaaagtaataaggaaagggtcccccaagagtcctgcaatggttggagacagaatagtctgtgttatacagaaagcaaagcccttgactcaaaacattacgggaacagccaacaccaaccgtgtcaaaaaaggtgatatttgtcacgcaattgtcgtaaggtctaaacagcgtaacatgtgcagaaaggatggctccaccgttgcattcggagatactgcttgcgttttgattaataaaaataccggtgaacctctggggacaagaattatggctaatgatggttgtgtagatagaacacttgaaagacaagggatacaataa

SEQ ID NO: 82254 - DNA, 2151 bp, Saccharomyces pastorianus
atgatggactcaaaaacatttacagcatcaatggtaatgcaggaggagaagaagcggcaacaacctgtgacaagaagagtaaggtcattttctgagtcctttaaaaaccttttcaggccgcctcgttcaagagattcaagtcctattaatgtcacccgaattccttatcgatcgtcttctacctcacccaagagaagctctgagccaccaagacgatcaaccgtatccgcacaaattttaggtccaaaaaattctccaatacgccggcgtagttatacattgaagtgttgcaccccgggcctgtcacatccatttagacagacaggaagtggtgctagtaatagtcctaccagacatcgctctatatctggggaagaacaggaaattgttaacagtttaccagaatacaaaagatctgcttctcatagttttcatggcatacggcgtccacgttcaagaagttcatctgtttcgtcatgtgacagttcaaatggaacgacaagttcatcagacagtcaatgggctatggattctttactagatgattcagacaatgacctcacaccttatcgtggctcgaacaaagatatactgaaaagtaaagaccgggcgccgtataattacatagatgactacaataagaaggctttacgcagagcaacatcatatccaaatcctctcccctccaagcaattctataatgaaaggttatacaccaggaggtcacatccagatgaagaaagtttggagagcttgcctcggtttgcaggagcagatgtgcaatgtataattgagcaaaatggcttcaaagtttacgaagacggaagtcatgaacataatataaagttatcaggggtaattgcgaaattagagaaaggtaactccttaccggcacatcgacagggatcattatctagaccaagattaggtattactctttctggtctattcaaacatcataaaaatgaatgcgatattgaaaacgctttatctcttctgccaaacgtagaaaaatctcagacaaaccatgagaaaagaaccggtcaaagtcctaacgatagcaaccgcagctcgcccacgcaaggaagggaagattatctaaaaatagtgaatcccgacgcatcattgggcagtgatgagttgaagttgattaattcattatcaagcagaattcataaaagtttacaaaattatttgcaagaaaaaaatctaaaaccggctgagtgtatcggcgagcaagcacctacttttcaagataattatggccatcctgttggtctcgttggcgctggagcttacggtgaagttaagctgtgtgccaggctacggaatgaaaaggactcccccccatttgaaacatatcatgatagcaaatacatatactatgctgtgaaagaattgaaacccaaaccagacagtgatttagagaagttctgtacaaagatcacctctgagtttattattgggcattccttgagccactaccacaaaaatggtaaaaaaccagcccccaatattctaaacgtatttgatattctagaagacagttcttcgtttattgaagtaatggaattttgccctgctggtgacctttatggtatgctggtcggtaagtcgaaattaaagggccgattacatccgttagaagccgattgtttcatgaagcaactgcttcatggtgttaagttcatgcatgatcatggtatcgctcattgtgatttaaaacctgaaaatattctcttttatccgcatggtctattgaaaatatgtgacttcggtacaagttctgtatttcaaaccgcttgggaaaggagggttcatgctcaaaagggtataattggatcagagccttacgtagctccagaagagtttgttgatggggagtattacgatccaagactgattgactgttggagttgtggcgttgtttatataacaatgatattggggcattatctttggaaagtagcttcgagagaaaaagatatgtcttatgatgaattttacaaggaaatgcagcgtaaaaaccagtttagggtattcgaagaattaaagcacgtaaactcagagttggccacaaatagaaaaatcgcgttatatcgcatctttcaatgggaaccagaaaaaggatttctgttggcaaacttttag

SEQ ID NO: 82255 - DNA, 1515 bp, Saccharomyces pastorianus
atggcgactgacaccgagaggtgtattttccgtgcattcggtcaagattttatcctaaataaacattttcatttgacaggtaagattggtcggggctcacacagccttatttgttcttcaacttacacagaatcgaacgaggaaactcacgtggctatcagaaaaataccaaacgcgtttggcaataaactatcttgcaagagaactcttcgtgaattgaagctactaagacatttaagagggcacccaaatatagtgtggctcttcgatactgatatagtattttacccaaatggggcactaaatggcgtttatttatatgaagaactaatggaatgtgacctttctcaaattataaggtccgaacaacgcctggaagatgcacactttcaaagcttcatatatcagatactgtgtgctctgaaatacatacattctgcaaatgttttacattgtgacctgaaaccaaaaaacttacttgttaatagtgattgccaactaaaaatttgtaattttgggctatcgtgtagttattcagaaaaccacaaggttaacgacggcttcattaagggttatataacctcgatatggtataaagcaccagaaattttgctgaattatcaagaatgcacaaaagctgtcgatatttggtcaacaggctgtatcttggccgaactacttggtaggaaaccaatgtttgaagggaaggattatgtagatcatttgaatcatattctacaaatacttggaacaccacctgaggaaacattgcaggaaattgcctctcaaaaggtgtataattatatctttcagttcggtaatatcccgggaagatcgtttgaaagcatactacctggtgctaatccagaagcgcttgaattgctaaagaaaatgctagaatttgatcctaaaaaaaggattactgtagaggatgcactagagcatccatatttgtcaatgtggcatgatatagatgaggaattctcatgtcaaaagacctttagattcgaattcgagcatatcgaaagtatggcggaattaggaaacgaagttataaaggaagtatttgatttcaggaaagttgttagaaaacatcctattagcggtgattccccatcatcatcactatctttagaggatgccattcctcaagaagttgtacaggtccatccttctaggaaagttttacccagttatagtcctgaattttcctatgtaagccaacttccatcactaactacaacccagccatatcaaaaccttatgggaataagctctaattcatttcagggtgttaacgaaaaggaaaacaccttcaaacaagatactaagcatgaaaatagcgaactactgaacggacctactgagccaaatataacaaaaatgggcccagtttcatcgtctcccccaggtcacgatataaatgtcaatgatggtacaaaccaaaatacaaatgaggatgacagcgattttttcttcgacctagaaaaagaacttgaattatttagacgataa

SEQ ID NO: 82256 - DNA, 1587 bp, Saccharomyces pastorianus
atgtcatggtattcatgtaatgagtttcaaccagaatggaaagtttgggaacagtatgttactgataccttacaacatgcattaggccttgactctttaaggtcctctcatccgatcgaagtacctgtaataaaagctgacgaaattaatcaaatctttgatgccatctcttactcaaagggtgcttctttattaaggatgatttcgaaatggttaggtgaagaaacctttattaaaggtgtatcccaatacctgaataaatttaaatacggtaatgcgaagactgaagacctatgggatgctttagcggacgcctccggtaaagacgttcgttctgtgatgaacatctggactaaaaaagttggtttcccagtcatttcagttagcgaagatggtaacggtaaaataacatttcgccaaaaccgttacttaagcacagctgatgtcaagcccgacgaggacaaaaccatctatcctgtatttttggctttgaagactaaaaatggagttgacagttccgttgtattgagtgaaagaagcaaaactattgaattagaggatcctacctttttcaaagttaacagcgaacaatccggaatttatataacatcctacaccgatgaaagatgggcaaaactgggtcaacaagctgacttattgtctgttgaggaccgtgtcggtctggttgctgatgtcaagacactatctgcttctggctacacttcaactactaattttttgaacttagtctccaaatggaataatgaaaagtcatttgtcgtctgggaccaaataatcaacagcatatcttcaatgaaatctacttggttattcgaaccaaaggaaacccaggatgcgcttgataacttcacgaagcaactaataagcggtatgacacaccacttgggttgggaattcaaatcttctgattcgttctccactcaacgtttgaaagtgaccatgtttggtgctgcttgtgccgcaagggacgcagacgttgaaaaagctgctctaaaaatgtttactgattattgcagcggtaataaggaagccatcccagcattgattaaaccaattgtatttaacactgtggcaagagttggtggtgcagaaaactacgaaaaagtttacaaaatctacttagatccaatctctaacgatgaaaaattagccgcattaagatctttaggcagatttaaagaacctaaattattagaaagaaccttaggatatttgtttgatggcactgtcttaaaccaagacatttatattccaatgcaaggaatgagagctcatcaagaaggtgtagaggctttgtggaattgggttaaaaagaactgggacgaactcgtaaagagactacctcctggtctttcaatgctaggctccgtcgtcacattaggtacctctggctttacatcaatgcaaaaaatagatgagattaagaaattctttgccactaaatccacgaaaggtttcgatcaaagtttggctcaatcactggacactattacttcgaaagcgcagtgggttaacagagaccgtgatgtcgtcaacaagtatttgaaggaaaatggttacttttaa

SEQ ID NO: 82257 - DNA, 171 bp, Saccharomyces pastorianus
atggaaaattggggtttagtcacttatagagtgcttgatctactactagtcaaagagaactctacagtagatcgtattcaaagagtgactgagattgttctacatgaattagctcaccaatggtttggtaacttagttactatgcgactggtgggaaggcggatcggctaa

SEQ ID NO: 82258 - DNA, 792 bp, Saccharomyces pastorianus
atgaccagtaaaaccccaaaacgtgaaattcttcctgataatgtcgttcctttacactacgatttaaccgtggaacctgatttcaaaacattcaaatttgaaggctcagtcaaaattgagctaaaaattaataatcctgctattgatacggtaacattgaacaccgtcgatatcgacatccattctgcaaaaatcggtgatgtcacatcttccgagattatctctgaagaggagcaacaagtcaccacatttgcgtttcctaaagggaccatgtcttctttcaagggtaatgcatttttggatataaaatttactggtattttaaatgataatatggctggcttttacagagccaaatatgaggacaagttaacaggtgagacaaaatacatggctactactcagatggaacctactgatgctagaagggccttcccatgttttgatgagcctaacttgaaagcctcttttgctattactttagtttcagacccatctttgacacacctatccaatatggacgtcaagaacgaatacgtaaaggatggaaaaaaggtcactttgttcaatacgacccctaaaatgtcaacttaccttgttgcttttattgttgctgaattgaagtacgttgaatccaaaaactttcgtattcctgtcagagtttacgccaccccaggtaacgaaaaacatggtcagtttgccgctgatttgactgccaagactttggcattttttgaaaaaacttttggcatccaatatcctctacctaaaatggacaatgttgctgtacac

SEQ ID NO: 82259 - DNA, 399 bp, Saccharomyces pastorianus
atgtctccgccttgcaattgtaggctgttactcgggtttcttatcaagtggcgtgccacggcatctaccacatgtggctcagggttatttatgctcacttcaagcgtgccattgttacaggaagtgtgcgacgcgtcgggtacgctagcatgcaccgcttcattgttcacaagcagcggcggcttttttagcaaaccacctgtagttccactagattttctacttctgcttctacttctactattaccgttgctattgccaccgttgccgtccgttaaaggtgagccagacgcatgcgagattcctgtactgcctccgttgttattttttttgttgttgttgctctgcgttcttccagagccacttgaaacctcttttccattcatatccgcgatgtaa

SEQ ID NO: 82260 - DNA, 1533 bp, Saccharomyces pastorianus
atgtcctacaataatggcaatacttattcaaagagttatagcagaaataataagagacccttgttcggaaagaggtcgccaaatcctcagtccctagcgagaccaccgccaccaaagagaatacggactgatagtggttaccagtcgaatatggacaatatatcttctcatagggtaaattcaaatgaccaaccaggccacacgaaaagtcgtggtaacaataatttatctcgctataacgatacatcctttcaaacaagttccagatatcaaggttcaagatacaacaataataatacgtcgtatgaaaataggcctaaaagcataaaaagggatgaaacaaaggctgaattcctgtctcatttgccaaaggggcccaaatctgttgagaaatcaagatataataattcatccaatactagtaatgatataaaaaatggctatcatgcttcaaaatactataaccacaaaggccaggaagggcggtctgtcatagctaagaaagttccagtttcggttctaacgcagcaaaggagcacgtcagtttacctaaggataatgcaagtcggagaaggaacatatggtaaagtttacaaggcaaaaaacacgaatacagagaagttagtagcgctgaaaaaattgagattacaaggagagagggaaggctttcccataacctctatacgagagattaaactactacaaagttttgatcatccaaatgtctctactataaaagaaataatggtcgaatctcaaaaaactgtatatatgatatttgaatatgctgacaacgacttaagtggattactattaaataaggaagtccaaatttctcactcacaatgcaaacatctcttcaaacaattgctattaggaatggaatatttacatgataataagattttacaccgtgatgttaaaggctcaaacatcttaatcgataaccaggggaatctaaaaataacagattttggactagcgaggaaaatgaattcgccagctgattacactaaccgtgtcattacgttgtggtacagaccaccagaactattgttgggaactacaaattatggaacagaagttgacatgtggggttgtggctgcctcctggtggaattattcaataagactgcaattttccagggctctaatgaattagagcaaatagaatcaattttcaagattatgggaactcctacaataaatagctggccaacgctttacgatatgccgtggttttttatgattatgccacagcaaactaccaagtatgtcaacaatttttctgagaaatttaaaagcgttttaccatcttcaaaatgtctgcaattggcaattaatttgttatgttatgatcagacgaaaaggtttagtgcaaccgaagctttacaaagcgactatttcaaggaagaaccaaagcctgaacctttagttcttgatggattggtaagttgccacgaatatgaagtcaattggcaagaaaacaaaagcgtcctaacatactatccaccaacacaaaacataacggta

SEQ ID NO: 82261 - DNA, 255 bp, Saccharomyces pastorianus
atggagcaaaacaaagatccgcagatgatctcgaaacatagttctaggctacctatatgggtgctaagtcctcgcgaagaacaacaggctcgcaagaacttgaagacggaaacatacaaaaaatgtgcaaattttgttcaagcaatggcagattgtgctaaggcaaatggaatgaaagtttttcccacttgtgataagcaacgagatgaaatgaaatcgtgcctcctgttttatcaaacagatgagaaatattag

SEQ ID NO: 82262 - DNA, 1410 bp, Saccharomyces pastorianus
atgatggcttttgagaatacaagtaaacgaccaccccaggactttgtagctcctatagatcaaaaaaaaaggaaggtccagttttccgatagtactggcctggtaacccttcaaccagaggagataaaagatgaagtgttttcagcggccatgtatagcaggttcgtgaaatctgccctagatgatctggataagaatgattcaacccagatcggcataattgccaatcaagtagcgcttccgagcaagaatcctgaaagaattaatgataagaatctcaatattcttttggatatcttatctagtaatatcaacaggatagaatcctccaggggaactttcctcatacaatctatcataaactttgagaagtggtgggaattgcctccacaaactctaagtaaatatatatatttcatcaaaatcctttgctcgagtatacccaaatggtggcaagacgtttcgatgatactggtatcttgttttattttaccaatcaaacagacagtgtgtcatcatgatatgcttaaatatttcttaaggatgattccctcctcgatgggattcatagatacatatttggccaaatttttcccaaataaaaatgatactcggagaaagttggttaattacacttcaaatttgctgaaattgagaggctactgctctgagctaggattccaaatttggtccttactgatagaaaagattatttcgattgatgtcgagttacaaaatgaattagatgaattagatgatgatgtagatgacgatgatctagaggaagttgatctagaggatgacgacgatttagatgatgattcaggagacgatgatgatgaaaattgtgggaacagtaatgaagagttaaggtctggagcagccgacggtagtcaaagtgatagtgaagatatggacatcattgaaggtatggacggaactgaagaatataatgtggagttgacgcagggaatcaaagaactttccaccaaattggactctatcttaactttggtaagcacgcatgtggaagagcaagtgacgccggagagtttagaaagcggcgaaggcgtaggagtcttcaacactctaacaacattatttaaaacgcatgttctacccacgtactataccaggtcgattcaatatatcatgttccatgtttcacaacaacaattagaactaatggattcatttttagtaacactgatagatatttcatttgccgtcaacgaagccgcggagaagaaaattaagtcattacaatatttggggtcgtacattgcgagggccaagaaactatccagaactcaaattattttcgttgcaagctatttaacgtcctggttgaatagatacgttatcgaaagagaagacctgcaggcatgcaagcttgcactgccgtcgttt

SEQ ID NO: 82263 - DNA, 753 bp, Saccharomyces pastorianus
atggctaaacttgtacatgatgttcagaaaaagcagcatagagaacgttctcagctaactagccgttccagatatgggtttttagaaaagcataaagactatgtgaaacgtgctcaagacttccacaggaagcagtccactttgaaagtcctcagagaaaaagcaaaagagagaaatccagatgaatactaccatgctatgcattcaaggaagacagatgcaaaaggactgctgatcagctcacgtcacggtgacgaagaagacgaatcgctttccatggatcaagttaaattactcaaaacgcaagatagtaattatgtgaggacgctgaggcaaatagagctgaaaaagctggagaaaggagcgaaacagttgatgttcaaaagcagtgggaatcatacaatattcgtcgattcccgagagaagatgaacgaattcaccccagagaagtttttcaataccacctccgagatggtgaatagatctgaaaatagattaactaaggaccaattagcccaagatatttcaaacaataggaacgcttcatcaataatgccaaaggaatcattagacaaaaagaaattgaaaaagttcaagcaagtcaagcagcacttacagagggaaactcaattgaaacaggtccaacaaagaatggatgctcaaagagaattgttgaagaagggttccaagaaaaaaatcgtagactcttcaggaaaaatttcatttaaatggaagaaacaacggaaacgttag

SEQ ID NO: 82264 - DNA, 1473 bp, Saccharomyces pastorianus
  modified_base (1299)..(1384): a, c, g, t, unknown, or other
atgagtaattcacttgaggagcgccttcgtgctaattcaagcgccttcgatggtttattggctttaattcctgcaaaatactattatgacgaaaaaagtcaagagcaatggaaggccaagaagaaaaccaaagaacagagtaaaaatgataaactgaaaaaattagacccggagcaacgtgatgatgaaacatctagtacattagaagtaatgaagaagaaggagaaagacgcaaagccggtggtcctacctggtgaaaaattcaagcacatgaaaatgcaaaagcaaaaggaagcaacatcaaaagtggaaggagactccgacctgaacgtagaagtaaacgatcctatgataatagcaccagacgaagatgaagaagaggaagaggatattaaggtgatctttgatgatgagggaaatgaaataccattagaatctaaaaaagatactacagagcccgatagatctgtcgaaaagaagtctattacagaggaagagaaactacaaagaaagaaaaacttggaagcactacgttccaagttacaagcgaaaatttcagatatgaagagtaaaaggaaagcacccggttctagagaggctattcttgctcaaaggaaacgcaaggaagagttgaaaaaaagaaagcgtctagaaagtgaacaggaacaggatcaggatgaaattgcgtctgattccgatatggaagacatcgatagtgatttagaaaacaattcgaaaaaaagattcaaaaaaggcaagaaggactcagaaattaacgcagatggtgtaatgtttcaaaatatcatattcgatgatggtgcaagggccacttcagatttacaaaggttaagaaaagctggtagaacgaagggtccggctaagaatgatgtaaaatcacacttaaagttattagaagccaagaagaataagatggagacgaaagacgaactagaacaaatcaagcagaaggaaaaggaaaaatggcaaaaggctatgttacaagcagaaggaattaagattagagatgacgaaaaactacttcgcaaagctataaagagaaaggaagcacaaaagagaaagtctgcgattgaatggagcgaacgtaagagggttgtggaagacacgatatctgaaagacaaaagagaagagaagagaacctgaggattaggaaagacaacaagggtaaaaagagaaataagcaagaaaagatgaaaagaaagtatgtcggtagtgccgtaccaaagaaaagagccggatttgagggtagattaaaaacaggtaaaaagaagggaggaccnnnnnnnnnnnnnnnnnnnnnnnnnnnnnnnnnnnnnnnnnnnnnnnnnnnnnnnnnnnnnnnnnnnnnnnnnnnnnnnnnnnnnntatatataccatcgcattttttccttaacgagaagagcacagcagagcttaagatggcatgcatttatagaacaacactcaacagatag

SEQ ID NO: 82265 - DNA, 1302 bp, Saccharomyces pastorianus
  modified_base (1169)..(1230): a, c, g, t, unknown, or other
atggctactgcgttatatactgcaaacgatttcatattaatctcgttgcctcaaaatgctcaacctgttaccgcccctggctccaaaactgattcatggttcaatgagaccttaatcgggggtagggcatttgtttctgatttcaaaattcccgaattcaaaattggctctttagacacattgatagttgaatcggaagaactgtctaaagtggataaccaaattggggcttctattggcaaaatcattgaaattcttcaaggcctcaacgagaccagcaccaatgcttacaggactttacctatcaataatatgccagttcctgaatacttggaaaattttcaatggcaaactagaaagttcaagttagataagtctatcaaagatttgataacattgatttctaatgaatcttctcaattagacgccgacgtcagagctacttatgcaaattacaacagcgctaaaactaacttggctgctgctgagagaaagaagacgggtgacctttctgtcagatccttgcatgatattgtcaagcccgaagacttcgttcttaattctgaacatttaactactgttctagtagcagttcccaaaagtttaaaatccgatttcgaaaaatcgtacgaaactttatccaagaacgttgtaccagcatctgccagcgtgattgcagaggatgctgagtatgttttgttcaatgttcatttgttcaagaaaaacgttcaagaattcacaacagctgctagagagaagaaattcattcctcgtgaatttaactactcggaggaattaattgaccagttgaaaaaagagcatgactctgctgccagtttagaacaatctttgcgcgtccagttggtaagattggccaagacagcttatgtcgatgtttttataaattggttccacatcaaggccttgagagtttacgtggaatctgttttgcgttacgggttgccacctcactttaacatcaagattatagctgtcccaccaaagaatctctctaaatgcaagtctgaattaattgatgcttttggatttcttggtggcaatgccttcatgaaggataaaaaagggaaaattaacaagcaagatacttctcttcaccaatatgcttctcttgtcgacacagagtatgaaccatttgtgatgtatataannnnnnnnnnnnnnnnnnnnnnnnnnnnnnnnnnnnnnnnnnnnnnnnnnnnnnnnnnnnnngaattttcaacttttttattcatagagataatacactgtgattgtgaatgtttgaatagtaatggaacataa

SEQ ID NO: 82266 - DNA, 1458 bp, Saccharomyces pastorianus
atgcactggaatataatttcgaaagagcaaagtagctcttctgtatcgttaccaactctagacagcagtgaaccctgtcacatcgaagttatcctcagggcgatacccgaaaaaggattacaaaacaatgagtcgaccttcaaaatagacccatatgaaaatactgtgctatttcgcacaaacaatccgttacatgagacaaccaaggagacccattcaacatttcaattcgataaggtattcgatgctaacgccactcaagaagatgttcagaaatttctggtgcatccaataataaatgatgttttgaatggttataacggtactgtcataacatatggaccaagtttcagcggaaagtcctattcccttattggatcaaaagaaagcgaaggaattctaccgaacatatgcaagaccttgtttgatacgctagaaaaaaatgtagaaacaaagggagatagttttagcgtaagtgttttggcattcgaaatatatatggagaaaacgtatgacttattggtacctttacctgaaagaaaaccattaaagcttcaccgttcttcaagcaaaatggacttagaaatcaaagatatttgtccggcacatgtcggatcgtatgaagacttaagaagctacattcaggcagtccaaaacgtcggcaataggatgggaagtggcgacaagacagagagatcaagatcacacctagtttttcaattacacgtagaacaaaggaatagaaaagatgatatattaaaaaatagttctttatatttggttgatttacacggggcagagaagttcgataaaagaactgaaagtacgctatcacaagatgcgttaaaaaaagtaaaccaatctattgaggcgttgaaaaacactgtgcggtccttgtcaatgaaagagcgtgattcagcctacagcgcaataggatcacatagttctgcttaccgtgaatcgcaattaactgaagtgttaaaagattcccttgggggaaataggaaaacaaaggtgatattgacatgtttcttaagtaatgttccaactaccctatcaacactagaatttggtgacagtattagacagatcaataacaaggttacagataataccacaggtttaaatctgaaaaaaaaaatggatctatttattcaggacatgaaaattaaggatgataattatgttgcccaaattaatatactaaaggctgaaatagactctttaaaaagtcttcacaataaatctcttcccgaagacgacgagaaaaaaatgttagaaaatacaaagaaagaaaatatcaaactaaagcttcaattagatagtataacccaattatggagtagttctaccagtgaagatcctaacaatcgtatggacaaagaagtttctgaaatattaccgaagagatgcgaacagatggctcagcttgagttatcttttgatcgacagatgaat

SEQ ID NO: 82267 - DNA, 312 bp, Saccharomyces pastorianus
atgagatttcacgatagtatacttatcttcttttctttggcatcgctttatcaacatgttcatggtgcaagacaagtcgttcgtccaaaggagaaaatgactacttcagaagaagttaaaccttggttacgtacggtttatggaagccaaaaagaattagtcactcctacggtcattgccggtgtcactttttctgaaaaaccagaagaaacaccaaatccattgaaaccttgggtatctttagagcatgatggtaggccaaaaaccattaaaccagaaatcaacaaaggtcgaaccagaagggagacctga

SEQ ID NO: 82268 - DNA, 2883 bp, Saccharomyces pastorianus
atgtcactaatatctgcgttgcaaaccaccgatgtggaatctgtccagacgtcccctgagcaaattactgaaagaaaggcggttagagtatccactttgcaagaatcgctacattcttctgaaatgcatcgcgctgctccagaaacacctcgctcaatttcaaatagcgttcacaaactgaaaactgtatattctacttaccagcagagtggacaaccattgagtaaagaggcgatattccgtgcgaaacagaagtatggcattttgaatactccggctaattacaaaacacttggtttaggagactccaagagtgagtcagttgatcttgcggcccgtttagctagtaagagaacgaaagtctcgcctgatgactgtgtcgaaacagcaatcgagcaaaaggccagaggtgaggctttcaaagtaaccttttccaagattccattgaccccgcctgaagacgtcccaataacggtcaatttaggtctgaagggaaggcgtgattttttaacaagattagctgcacaaaaagcattggctttcagtccttctttagacaattccatgaagggcacctccgacagttccagtgttaaaaaaaagaggttttctggtgcccctattggtaatgagtttgatgcaaacttagttaatccacagcaccctgcaggtttcaaatccctcgatttatctaaggtattggatggagcggaaagaagggcgattagcagagttaatgacaggttgtatccccaaaaggtaaactttaaaaatggattacaaagcagcgatcaaagtggtgtatcaaaagctaacaaagaagtttttaagaaaggaactttggaaaaacttgaacattccgcagagcagttcttagagtctcatgctggtaatgaaagacaaaggctaagtgatcaacaatatatgtgtgcaaagggtgcagctgatgcagttaaagatcttgacccgaagacattggaagacccagattttgctgcaagagaggcacaaaagaaactgtacataaagcaggtagcatctccggtagtgctaaatgaagctcaaaagcttgcgaataggaaattgcaggatattgactcgcgcgatagttacatgcttttatttggtaaccaagcttacaataagcttgctgttaacatagctctacagcactattctgttaaacaagaagaaaaaaagaaaatatatttgggtggtggtttgtggatgactccagaagaggttaacgcagtcgccaaaaagttgatatcaccagtggtgaacgaaattgatgaacgagccagcagacaacgtgatgttgataaagatattgagagaaggtcaagagttcttgatcaggaatatgaggattggaattttatggaacgtgcaaaagagcaaaacgacgggcaattattgttagcgatggcttcaaaacaacaacaggagaaagaagctaaaaaggccgaggagggacaacggtatgatcagttcgtacaaaagatgaatatcaaattacagcagaaggaaaaagaacttgaaaatgctagggaaaatcgtgaaaatctaagaaacgaactacaggaaaggttgtccaagaacctgtcaggagagaatgatgaattggatgattggaacgatgcatgtgaaagagatctcaaaaattcgagcattgaacactattatgccgtcagatcacactttgacaatttgggaaattcggaaagagggtatgatgagcttttggaggagcgcagcaaaatacaggtagaaatcgaaagacttgtcgcttccattgctgaacataaaactgcaatccatggttttagggaaacagcagatgctggtagagctataccagctgtacagaaacagaaaattccaacaaggaaggaccttcttgatgctaccgtgaatgatcctttggttatttctgcagaaatggcaaaagaagaagcagaaatggctacagaagaatatatgttgaaagaattacaggtagatgaaatgattataatcaggaacattatgctgcgggagtgtgaaaagaagctcgaagaggagaaggaaacggctaagaggtctagaaggggcactgaggggtcaaagaataattctaatttttctcgagatgttatcatgaatacacctgataacaatgaaaaagtgactcctatagggaagagtgcatctccaaaagatgttgttaaaagccgtttcctttctacttataatacaggaaaggatattgatagttctgccagtgctaggtcaatcactggtgttagcggcgtgttggatgatgggcctaaaacaccaacctccaataaggagaatgaattaattgacgatgaagtgaagtcatataaagtgcaccaagcagtagatggcaccggtgaagattccattgcaaacaagagggataaatcttcaagaccagcggcgaacagtggaggctccataacgatagaacaatttttatttaataagaatgccgataaacaaggactatccaaaacagagtctgtaactatgaagagggagcctgtggtggatcaaatggactcaaaaaaggggcacgattttacccattgtaacgacaacggccgccggtcttttagtggcttttctcaaggttcgatagaaaacgattatagtaatgaagttacagatgatcaagacgatcaagagggatcggagataagagttcgcgattccaacgattccaatacctctcctaaggaaagttttttcaaagaggttatctcactttctatcaatcgtttgatgataaccggtgccgctactcgctgtaatatataccttaatgttggttttgttatattttttttcattacttttattttttttttatttttctga

SEQ ID NO: 82269 - DNA, 1572 bp, Saccharomyces pastorianus
atgagagtatatcagtttttccgacctttccaattattcacctgcttcttatgctaccttctagtgttcgtaaaagctaacaaggaaaagataagtcaaaagaattatcaagtatgcgcaggtatgtattccaaagaagattggaagggcaaaatagacccgtttatatcattcaatcttaaaaaaataagtggattgagtgatgagtctgatccaggcttagtcgttgcaatctatgatttccaagactttgagcacttaggtgtgcaattgccggatgaagaaatgtattatatttgtgatgattatgcaattgatatcgggatttgtgaagaggagaatcgtgatgagtttattgttcaagatgttgtatatgatccatatacttccacaaatagatctttggccaatccaatcatgacgttttctcaaaatgaggtcggccttcatgatactagatacccaataaaagaaaccggattttattgtgttactgcgttcagatcatcgacgtctaccaagttcaacgctgtggtgaatttcaggaatgcttatggtcagcttgcgggcaccgagatcaacaaattgccactatatggtcttttggcggtcgcatacgttgtggcgatggcgttatattccttcgccttctggaagcacaagcatgaattgttaccattacaaaagtatttgctggccttttttgtatttttaaccgcagaaaccatatttgtatgggcttactatgatttgaaaaatgaaaaaggtgatactgcgggaataaaagtttatatggtgttcttgtcgatattgacggctggtaaagttacattttcatttttcctattattgattatcgctttgggctacggtatcgtgtaccctaagttgaataaaacgttgatgaggcgttgccaaatgtatggtgcgttaacttatgcaatttgcattggatttttgatccaaagttatttgaccgacatggaggcaccatctccactaatcttgatcaccttgattcctatggcgcttgcattaatcatattttactacatgattattagatccatgacaaaaacagttatctatttgaaagagcaaaggcagatcgtaaaattgaacatgtacaagaagctactatacatcatttatgcgtcctttttgagtgtactagctggtagtatagtttcgtcatttatttacgttggcatgaacactattgatatgattgagaagaactggaggtcaaggttcttcgttactgatttctggcctacgttagtgtatttcattgttttcgttaccatcgcgttcttatggagaccaacagatacttcatacatgctagccgcatcccaacaactacccacagacccagaaaatgtcgcggactttgacttgggcgatttgcaatcgtttgacgatcaagatgacgcaagtatcatcactggtgagcgtggcatagacgaggatgacctcaatttgaattttactgatgatgaagaaggacacgataatgtaaataaccatagccaaggccacgggccagtgtctccctctccaacaaaataa

SEQ ID NO: 82270 - DNA, 117 bp, Saccharomyces pastorianus
atgacacatcctgtagcagtgaaggcatgtctatttgacatggatggtcttctcatcaacacagaggatatttatactgaaactttaaatgaaactctcgcagaatttggtcaggga

SEQ ID NO: 82271 - DNA, 1341 bp, Saccharomyces pastorianus
atgaattcagacacgaatgcatttaaggacataagaatttcatgtgttgaactttctaggatcgcttttttacccaccgaatcatttgatccaaattcattaacgctattggcatgtttaaaaaaagttgaagagaagttatcagcatacgaagacgattcactttcgccaaaatttgcagattatgtttttgttcctatcgcgagtttattgaaacagccagctctcggcgagtctcaaacagaatacgtcctactaattatatttcatctcttacggacatgttggtcatctaatggtaaattctccgagcaattgggacaacaactgttccccttgatcacatttttagtcagttctgataaagataatcaaaaattaattactagatcagacgagttcaagtacgctggttgtttagtcttgcatcagtttttcaaatcagtaagatcgcaaaggtaccataaagagttcttttcgaactcaaaacctaatttacttcccgctctaggacattctgttaccattctgttgaaaattctggagcaatcgccccaaaataatgagcttcaattcaaagctttggcatccttagaagtactatttcaggacataatatctgatggtgaaatgctttcctttattcttccggggaacgtttctgttttcgctaagatacttactaaaccaggccgtcaaatacattataaggtgtgtgttcgcacgctagaggttctggcaaaattattggttttggtttacgatgattttagtttggatatcaaagtaaataagttaacagatattcgagagttgagcgatacaaagttaaaacacgagataaatcaatcatttatgtttaatggacctattgttttgttacgcacagatgggaagacgcatagagatacaagttggttgacggcaacttctgggcaaatcaatattgctttggaggcctttatacccaaactattaaaacgtaataatgaatcaattgatgaggcattagcgacatttgtatcaatccttttaactagatgtgaaaattccttaaataattgtgagaaagtgttggtatccactttagtacatttggagcgtgatccgatgtccaaattaccatcgcatttggtaaaattaaaggaagttgtcaatgaagacctgcacaagctaagtgacattattcggtttgaaaatgcagataggttattatctttatcatttgcaatcactattctagagaaaaataacgaaagagatacgatgatcaatgaggtagttagatgtttatttgaatcgcttaaggatctattgagccaccaagttgatcaatcataa

SEQ ID NO: 82272 - DNA, 165 bp, Saccharomyces pastorianus
atgtcagaacaagttgattctccaagtacgcagaagatagttgcgctgtggttaagcaccaatgttataaaggctatggtaaagcaaccgaaggaggaagaagtctatctactatttgaatctgattccaactattcctcttccatggttgaagaagtgtgttag

SEQ ID NO: 82273 - DNA, 1257 bp, Saccharomyces pastorianus
atggagattgaaggtaaaggcataaaaaaaagtgatgagtttgccgtatgtacagttttattctctattgaaacgatttgtgcggtaatgagagaagaatttcaaccagaattgattgactatatatacacagtagttgacgccttggcatcaccgtccgaagccattaggtatgtgggccaatcctgtgcattgaggatagcagataccctatatcatgggtctatcccaaacatgatcttaagcaacgtagattatcttgtagaatctatttcctcaagattgaattctgggatgactgaacgagtgagccaaatattaatggtgatttgccaattggctggctatgaaaccattgaaaattttaaagatgttattgaaacgatatttaaactactggattattatcatggatatagtgacctctgtcttcaatttttccaactatttaaaatcatcattttggagatgaagaaaaaatatatcaatgatgatgagatgattttgaaaatagctaatcaacacatttcacaaagtactttttcgccctggggtatgaccgattttcagcaagtactcaatataatagataaagagacacaggttaaagatgacataacagacgagaacgacgtcgattttttgaaggatgataatgagcccagtaattttcaagaatatttcgactccaaattaagagagccagatagcgacgacgatgaagaagaaagagaagaagaggtggaaggaagttctaacgaatatactgaccagtggacgtcacctataccatcagattcatacaaaatactattgcaaattttgggttatggggaaagattattaacccatccatcaaaacaattaagagtgcaaattcttattgttatgaggcttatatttcccttgctatcaacacagcataatctgttgataagggaggttgctagtacatgggactccatcatacagtgcgtcctatgctctgattattcgatcgttcagcccgcatgttcatgcgtggagcagatgataaaatattctggtgattttgtcgccaagagattcattgaactttggcagaaactgtgtcaggattcttttatattgaaagaactgaggattgatccaacggtgcacaaccatgagaaaaaatcgattagtaagcatgtcaaattcccaccagtaactgaaaaatgcgctagtatccgaatgtacgatggtgcctggaaggggtcaaaaatacagagtatttaa

SEQ ID NO: 82274 - DNA, 186 bp, Saccharomyces pastorianus
atgcagtacgattacggtacagaggataacgaagtaaaccacatttacagcgagaacgagagacagaaggagagagagaacgaatgcgccgggccgtgtctatacttggctccaccagctgatgtgtgcatttttttttggttcccattcgttctctcaccaaggggaggtggaaaagaaacgtag

SEQ ID NO: 82275 - DNA, 846 bp, Saccharomyces pastorianus
atggaccaaattcagccaatcattgattctttgaaaaagatagatgattcaagaatagaggagaatactttcgaaattgcattggctcgcttgataccacctcaaaatcaatcacatgcagcatacacgtacaatccaaagaaaggcagcaccatgttcagaccgggagattctgctccattgccaaatcttatgggtactgctcttggtaacgacagtagtagacgtgccggtgctaactctcaagccacattacacatcaacattaccacggcaagtgatgaagtgtctcaaagggaattgcaagagagacaggctgaagagaaaagaaaactaaacgctgtccctgaatggcataaacagagtaccatcggtaaaactgctcttggtagactggataatgaagaggagttcgatcctgtagttactgcatctgccatggattctataaatcctggtaatgaacctgcacaggaaacatcctatcaaaataacagaactctgaccgagcaagaaatggaagaaagagagaatgaaaagacgttgaatgattactacgctgctttggctaaaaagcaagcaaagctcaataaagaagaagaggaggaggaagaagaagaagaggatgaggaagaagaagaggaagaagagatggaagatgttatggatgataacgatgaaactgctagagaaaatgcattggaagatgaatttgaagacgtaacggatacagctggcaccgcaaagacagaatcaaacgcctccaatggcgtaaaacaagaatcggttaatgataagactgaagaagctgtaaatgctactgccactgcttcacgtccgagtgca

SEQ ID NO: 82276 - DNA, 165 bp, Saccharomyces pastorianus
atgcaagaattttattctttttcaccaatagatgaaaacggaaatccattccccttcaactccctgcgtaacacagtggttttgatagtcaatgtagcatctcattgtgcgttcacactcaatacaggaatagagtacttgtacgaaaattcaatcaatggctag

SEQ ID NO: 82277 - DNA, 744 bp, Saccharomyces pastorianus
  modified_base (609)..(707): a, c, g, t, unknown, or other
atgacagctgctactacatcacagccagctttctcgcctgaccaagtttccgtgatcttcgttctaggaggacccggtgcaggcaagggtactcagtgtgaaaaactagttaaggactattcatttgtccatttgtcagccggagaccttctacgtgctgagcagggcagagcaggttcccaatatggggaattgatcaagaactgcatcaaagagggccagattgtccctcaagagattactttggcgcttttacgcaacgctatttccgataacgtcaaggcgaacaagcataagttcttaattgacggatttcctaggaagatggatcaagccatttcctttgaaagagacatcgttgaaagcaaattcatcctgttctttgactgccctgaagatatcatgttagagagactattggagcgtggcaagaccagtggtagaagcgatgacaacattgagtccattaagaagagatttaacactttcaaggagactagtatgcccgttatcgagtactttgaaaccaaatcgaaagtcgtccgtgttcgttgcgacagatccgtcgaagatgtgtacaaagacgtccaagacgctatccgtgatagnnnnnnnnnnnnnnnnnnnnnnnnnnnnnnnnnnnnnnnnnnnnnnnnnnnnnnnnnnnnnnnnnnnnnnnnnnnnnnnnnnnnnnnnnnnnnnnnnnntatgccctcccctacacatcagaccattacagggtaa

SEQ ID NO: 82278 - DNA, 2079 bp, Saccharomyces pastorianus
atgaagttttgtctttattgctgtcattgttatatcgttatttgtggaaaggctacacattattacaagtcatcaaaagccacatcaaatttgaaatcgtcaaacagggtacttatgagaaaccccatgtcgccttcggagcaacattcacaacataattctacattggccgcctcgccatttgtttctaacgtatctgcagcaagaacacaacagagtttaccaaccgatgctcagaatgatcgtttacagcaaccctggaacagaaccaatacggctacgagtccctaccagtcgttagcaaatagccctttaatacagaagttgcaagcgaatattatgactccgcaccagccatctgctaattctaattctaattctaattctaattccaattccattacgggcaatgttgtgaacgacaataatttgttagcttctatgtctaagaatagtatgttcggttctaccataccgtctacattaaggaaggtgagcttacagcgtgaatataaggattcagttgatggtgtgcttcgtgatgaagataatgatgaggatgttcataacaatggcgatgcagctgcgaatgctaataatgatcgggagagtaaactagggcataatgggccattgacgacaacaacattaacgacaacaactacagcaactcaactagatgtttctgaattgtcagctatagaaagattgagactttggaggttcgacgcattgatgcagcatatgtataggaccgcagaatatattgctgataaagtgtataacatatcaaatgatcctgatgatgccttctggctcggccaagtatattacaataataatcagtacgtaagggctgtagaacttattaccaggaacaacttggatggcgttaatatcctgtgtcgatatctgttgggactctcctttgttaaattacagagatttgatgacgctctagatgttataggcgaatataatccattcagcgaggacccatctacgacggcagcaaacaccatgagcaataatggcaataacagcaatacgtcacagccagttactgacggcggtataaaaatggagtcatcattatgttttctgagagggaaaatatattttgcacaaaataattttaacaaggcaagggatgcatttcgtgaagcgattttggtagatataaaaaattttgaagctttcgaaatgctcctgtccaagaacctgctaactccacaagaggaatgggacctgtttgactctttggatttcaaagaatttggggaagataaagagattatgaagaatctttataagatcaacctatctaaatacatcaacacggaagatataacgaagtccaatgagattttagcgaaagattataaattagctgacaatgtagatgtcgtaagaagtaaggtggatatctgctatacgcaatgcaaattcaacgaatgtttagagttatgcgagaccgttttggaaaacgatgaatttaatacgaatatcttgccagcatacattggatgtctatatgaactatcaaataaaaataagcttttccttctgtcgcatcgattagcggaaactttcccgaagtctgcgataacgtggtttagcgttgcgacctattatatgagcttggacagaattagtgaagcacagaaatactattccaaatcctcaatactggacccaagctttgctgccgcatggctgggatttgcacacacgtataccctagaaggtgaacaagaccaagcattaacagcatactctacagcctccagattctttcctggaatgcacttaccaaaactgtttctcgggatgcagtttatggcgatgaattcattaaatttagcagaatcgtattttgttctggcatatgacatttgtccaaacgatccattagtactcaatgaaatgggtgtaatgtattttaagaagaacgaatttgtcaaagccaagaaatacctgaagaaggcgttggaagtggtgaaagatcttgatccaagttcaagaaacgacaatatcaattcaattaaatctaggacacacttacagaaaggtaaatga

SEQ ID NO: 82279 - DNA, 288 bp, Saccharomyces pastorianus
atgttgggaatgataaggtgggtagtagaggggacgttggtagctatgctcctatcggcaataagaagggagacgggaatgatattcttttacaaccagtatcagttgggcggctggatacatagatatctgtcatggggagagatgtgctacacaaggacgctgaggatggttaaacgttctaaatttttcagaaagcagttgaacgaggacgggtttggacgcatcaatgatagcggtccaaacgaaggggaagagatcaatctcatacagcacgtaggtttgtag

SEQ ID NO: 82280 - DNA, 1356 bp, Saccharomyces pastorianus
atgaacaaagaattggcttctaagtttttatcaagcatcaagcatgaacgtgaacaagacattcaaacaacttctaggctattaacaacgctatctatccaacaattggtgcaaaatggcttggcaataaacaacatccatctagaaaacataagatccggtctcattggcaaactatatatggaactgggacctaacttggcggttaacgacaaaattcaaaggggtgatattaaggttggtgatattgttttggtacgccctgcaaaaaccaaagtaaataccaagactaagcccaaagtcaaaaaggtgtctgaagactccaatggcgagcaagcggaatgttcaggcgttgtctacaaaatgagtgatactcaaatcaccatagctctagaagaatctcaagatgttattgctaccacattttattcttatagcaaactttacattttaaagactaccaatgtcgtcacgtataatagaatggaatcaacaatgagaaaactgtctgaaattagttcacccatacaagacaaaattatacaatacttggtaaacgaacgccccttcatccccaatacaaacagctttcaaaacattaaatcttttttaaacccgaatctgaatgactcccagaaaactgccattaattttgccattaacaatgacttgaccattatacatggtcctcctggtacgggtaaaacattcacattaattgaattgatccagcaattgctaattaaaaatcccgaggagagaatcttaatttgtgggccttccaatatttctgtggatacgattctggagaggctaacgcctcttgtgccgaataatttattattaagaatcggtcatcctgctaggctattagactctaataagagacactctcttgatatacttagtaaaaagaatactattgtgaaggacatttcccaggagattgacaaattaattcaggagaataaaaaactaaaaaactataagcaacgtaaagaaaactggaacgaaattaaactgctgcgcaaagatttaaagaaaagagagttcaaaaccattaaggacttaataatacaatcgagaatagtcgtcaccactttacacggttcatcatcgagagaactatgctccctttatagagatgatccaaatttccagcttttcgatactttgatcattgatgaagtctcacaggccatggaaccacaatgctggatcccactaattgcacatcaaaatcagttccacaaactagtccttgctggtgacaataaacaactgccacccacaatcaaaacagaagacgacaaaaatgtcattcacaatttggaaccacactatttgacagaatga

SEQ ID NO: 82281 - DNA, 1836 bp, Saccharomyces pastorianus
atgaaaaaatcaaggttcatgtgcaatttaatcggtgcagtatgctttgaaacaggccatcaattagtggaattccgagaaataattcaaaaagtggtgtttagtggtgaaaatgtcgaagagtatgccaactataatgagttgtatcggaaagaagacgtaaatgctttcttaacaagtgttagtgagtatttaagtacttcagctttaacttcgctactcatgtgtagcaccaaactagagtccacaagaaacattctccaaaaattattcaacgaaggaaaaactataaaaatatcccttgtacagaatatactgaacaaagctgcaaatgaagatcctgcttcaattaaggaagtaaacatctctttggctaaattttttgaagaaaacaaagtttgtgttgatgcttcatctgatcctatgggtaagctatccctttcagaaactacttctctgataaatagttttgtgtctagtgatttgaattatctagtactgaaagctttttacagatgggaacatttttctttcccatctttcataccaagtatctggaggatcaaggattcacctttactaagtattgtaacaacggctgctttgttcaagcacatgcaggataaagattttagcgcatttgcgcatgaaaccatttccaagtatggtaatgaaattgcgaaaagtacttacactacctcgaaaagtgagatttttgacgaaatattaaatatgattaccacttatattgatttctatgacgaaacgaaacgaaatgaaattttgaaatgtgttttatcacagagcgaccataaatatcatgctgctacagtaagatacatagctgcacacaataattttacttatccaggggtagaaacatggttaaataaaactcttctttaccttacaaagtacctttcagaaagaaaagttatctccaattctttttttgagttactaagagcgatggctgagctcttaaaacttgaagaggtaccaaataagttgaatgtcaaaatcattaattctcaattagaggctattctaggcagtgagtggatcaaacaaattaaggttcttgaatacgttaatgtattaattttttgtgtgagcaaaaagtcaattcaatcgcaaagaatggttcaacttttattaagcaatgacagttactcatcaataatgattaaagacaatgatgaagattcatcgtatcgaaagttcttaagcacaatgatattattctctttattcagcatcgacccggtcgtaaattcgacgccaatagttcaagagaaattattgactttttactccggtactatttccagtaacgacaagttgatactgaaaattctagaaactatcgaatctcacaccgctacttcatggacaaacatgattttttcttgggaatttatcaaagacgaagaggaagaaatcttggaagccattggagacacgaggctgattaccaaagaaagggaggggttgatactaacactacaaaaaaacatgatcaaaaagtccattgacaggtacgtattggaaaggcctcaagtccctgaattatataccgattctaatacaaacaattatgatgctactacaaggtgtgacctagtcaaaaagtactacgatgataccgaacgatctggtgttgatatgtacgatccattatttttactgctattaataatccataacaaagagctggtaaaaatgatcaaagatgacgagggcaatgtaacatacagatatgaatttgaaaatttccttgattgcaaaatatctcagtttattatttgctcattaagcgattgcataccgttccaa

SEQ ID NO: 82282 - DNA, 177 bp, Saccharomyces pastorianus
atgcggcaggaatcctttttagagttcagttcattggtagaagacgattctgttgtatatgacaattggttcgaagcaactgcctgtgagctaactggcaagattgctagctacatggtaacagacacagaattccctattgtcaaagttttggaaaggtatataaatttcgcttta

SEQ ID NO: 82283 - DNA, 2436 bp, Saccharomyces pastorianus
atgagtaatcatagcgaagcctatggatctcgcgaccagagaagggagaagtacacccaagggaaagagttcgaagacggtacattagaaacactagaaagtataatcagtgcagtcgaagatgaaactctctcaaaagattaccaacctctaatagtgttcttccaaagaggatttggtgctcaattggtacagacttggtcatattatgctcaagtaaataaccatgggaaattctcgaaaactacctcattactgactaaaaccttacgagttttgtcatctgatactagtacagtgactattgggagcggtctaattagattgatattgaccgattacacaaaagttctctatagagggttgaacaatatgcgtgcgcaattaactaatccaattcttcgtctactcaaacaaatagtcaatttcaacaatgggcaacttatagaggaattagtttcatatttcgatttttcattacctattttaccaagactgttggtaccaagcaagtccgagttagccaatgggaattcatctgctgattcatccaaacatgactcaataagatttacatttatcaagttttggttgacattgatctcaaatgcttccccattcgtgagaaaagaacttttgacagaaaactttaagattatgagcaacctatttaaattcatgaataaggctgattctgacaagttatctgagcacatactatcggtattcataaacgacattttaaaggagaaatccttcaagagaactactaaaaccaaaattttaaatgaactagcggcttcaaagattcatcacttttattattcatcaaacaagaatttggttaagaaggcaaatgagtttttcttaacttttggagcttcccgtgactttagcgtagcatttcctgataattgcgtttggttcaaaaattcagttgctgatggagcttctcatggagctccgataaccgtcaaccaagtggaatttcaaattcataataaacttttgttcaacaccttacgccttttcaaaccttgggaagataccctgcaattaggtacgttgatcaaaatattggagaacgttcccgaacttgttgctccttacagcgtctttttaacgacgaatggtaactatgaccctaagatgacttcgtattggtttggtataacattactgattaacaagattattaatcttaagataccgcaatttatggagaaagttgatagcaatattccacctgccacttcattagttatagaaaacattctgccatctttgctcaccaaatcctcgttggttaaatccctacaatttgaaacacccatcataagacaattagcctgtcaatcaatagttctagcgctaaaaaaattggaaaaagtttccatattttatgatcaaaaaggctggagaaatgaaaaaactattttactcaacgagtttcataccagaattcctgatttgccaatcttcgtatctactttgagcaattctttgacttccaataaggataatagaattttaccgctgtccatatccatcatattcaactactatagtaaaatgttccccaacctcttctcaattaacctaccatcatcaaatatttatacagatatcatgcaaaaatccaagatttctggcatagaatttgctattctggataactacttacaatttcaagaatttaactctactcaaaccaggtggtggaatccaagttctggtggaaattctttattcaccctactattaaagctagcatcctccaaaaatgcttctaacgtgataactacaagaatatccaacttgctcgatgagctgacgagaacaaacgttatcttcaacatatctttaatttcaccagtgatggctttagtgaatagtcttcaagggctttcccttcaagtttctgaaattgacaacatggaacaagtctggaagtggtttgacgaaactatatctcgtgtcgtaaaaacaccatacaagtacgtcgatatggcaaaagagtataactacatttctcccttcataatgtgcctttcagagcaatggaaatacgttgacaagagtggaaacccagagtttttaattaaatggcttatactttttcttagacacatgattttcattggtgaagaccatataggcatagataaacttgttaaaaatgtctttcctgaggtctctgatcatgatgttaatatatacctgaaacttgactcatttgaagaaaacataaagaaaactaatagctctaattctttaatttcttcaatgaagagctcatcttttttccagtatatttcggcgcttccatctaaaaatctaatgaatatttctagattaccagtgaacaaattagatgcggcaggaatcctttttagagttcagttcattggtagaagacgattctgttgtatatga

SEQ ID NO: 82284 - DNA, 1563 bp, Saccharomyces pastorianus
atgtctatttggaaggaagctaaagatgcaagtggaaggatatattattacaatactttgacaaagaaatctacgtgggagaagcccaaggaactaatttctcaggaggagctacttcttcgagaaaatggctggaaggcggccaagacggcagacggcaaagtatactattataatccaacaacaagagaaaccagctggactattccggccttcgagaagaaagtagaacccatcgcagaacaaaaacatgatacagtatcccatgcacaggttaatggaaatagaatagcccttacggctggagaaaaacaagagccgggacgaactataaacgaggaggaaagccaatatgctaataactctaaactgcttaatgtcaggagaaggactaaagaagaagcagagaaggaatttattaccatgctgaaggaaaatcaagtagactctacttggtcattcagtagaattatttcagaactggggaccagagatccaaggtattggatggtcgatgatgaccccttatggaagaaagaaatgtttgagaaatatctttccaatagatcagccgatcaacttcttaaggaacacaatgaaacaagcaaattcaaagaagcctttcagaaaatgttgcaaaacaattctgatataaaatattacacccgttggcctaccgcaaagagactaattgccgacgaaccaatatacaaacactccgtggtcaatgaaaagacaaagagacagacctttcaagattatatagataccctcatcgacgctcagaaagaatcaaaaaaaaaattgaaaacacaggccctaaaagaactaagagagtatttaaacggtattataacaacatcatcctctgaaactttcatagcctggcagcagcttttaaatcactatgtttttgataagagtaagagatatatggcgaaccggcacttcaaagtcttaacccacgaagatgttttaaacgagtatctgaaaatagtaaatacgattgaaaacgatcttcaaaacaaactaaatgagctccgactgcgcaattataccagagaccgtattgctagagataactttaaaaacttattaagagaggtgccaatcaaaatcaaagcaaatactagatggtcagatatttatcctcatataaagtctgatccgcgctttttacatatgcttggaaggaatggctcgtcctgccttgatttatttttagattttgttgatgaacaaaggatgtacatctttgcacaaagatcaatagcccaacagacgttgatagatcaaaattttgaatggaatgatgccgatagcgacgagatcaccaagcaaaacatagaaaaagttctggaaaatgaccggaaatttgacaaggtggataaagaagacatcagtttgattgttgatggtttgataaagcaaagaaacgaaaagatacacagaaactccaaaatgagcgtaggatattggagcaaaagaagcactatttttggttacttttgcaaaggacatatacaaaaaccggtaagcccaagcctagtacgtgggatttag

SEQ ID NO: 82285 - DNA, 564 bp, Saccharomyces pastorianus
atgtctgaaaataattcgcacaaccttgatgaacatgagtcccatagcgaaaacagtgattatatgatggatacgcaggtagaagatgactatgatgaggatggccatgtacagggtgagtactcttattatcctgatgaagatgaagatgaacatatgctttctagcgtcggaagttttgaggcagatgatggtgaagatgacgataacgattaccatcatgaagatgattctggacttttatatggatatcatagaactcagaatggcagtgacgaagacggaaatgaagaagaagatggacttgaacgttctcacgataataatgaatttggcagcaaccccctacatttacctgacattttggaaacattcgcacaaagactagaacaaagaagacaaacaagtgaaggacttgggcaacatccggttggaagaacactacccgagattttatcgatgattggaggaaggatggagaggagcgcagagagttcggcaaggaatgagcggatttctaaattgatagagaatactgggaatgcctccgaggatccttatatt

SEQ ID NO: 82286 - DNA, 261 bp, Saccharomyces pastorianus
atgtctagtagtaaattcgaagaggtcatcaacaagatcatcaatgacagccctccaggagaattaagggaagtatacgacgatctaatcaagatcacaagtgaaaactccaaaaatactattttggatgctattgagaattacaacgtgcggaattgcatccctatagaagtcaacgggaactctgtaattatttccaaatacaacaaggaaggagcaaagttttttgatcccgtaaattccgtaatatttttcagttaa

SEQ ID NO: 82287 - DNA, 138 bp, Saccharomyces pastorianus
atgtccaccgattctattgtcaaggcttctaactggagattagtcgaagttggccgtgtggttttgatcaagaagggtcaatccgcaggtaaattggccgctatcgtcgaaattattgaccaaaagaaggtatgttaa

SEQ ID NO: 82288 - DNA, 441 bp, Saccharomyces pastorianus
atgaaagctcaacttcaggcgatatcattgagaatacaggccgttcgaagtagtgaccaaatgacacgttctatgagcgaggccactggtcttttggctggaatgaacagaacaatgaatctacctcagttgcaaaggatatcgatggagtttgaaaagcagagtgatttgatgggtcaacgacaggaattcatggacgaagctattgataacgtcatgggtgatgaggtggatgaagacgaagaagctgacgaaattgtaaataaagttcttgatgagattggagtggatttgaattcacagttgcaaagcacgcctcaaaatctggtttctaatgcgccgatcgcagaaacagcgatggggattgctgaacctattggcgccggatcagaatttcacggtaatcctgacgatgacttgcaagctcggttgacactttga

SEQ ID NO: 82289 - DNA, 606 bp, Saccharomyces pastorianus
atggatgagcatttaatttctactattaacaagcttcaggacgctttggcgcccttaggaggaggatctcaatctcctattgatttaccacagatcactgttgtcggttcccagtcgtcaggaaagtcgtccgttttggagaacattgttggtagggatttcttgccaagaggtactggtattgtcaccaggagacctttagtgttacaattgattaataggagaccaaaaaagtcagaacatgctaaagtaaaccaaactgctaatgaattgattgacttgaacatcaacgatgatgacaagaaaaaggatgaatcaggaaagcaccagaacgagggacaatctgaagacaataaagaggaatggggtgaatttttgcatttacctggtaagaagttttataattttgacgaaattagacaggaaatcgtcaaagaaactgacaaagtgacaggtgccaattcaggtatttcttctgtgcccattaacttgagaatttattctccgcatgttcttactttgacgttagtggatttgcctgggttgacgaaggttcccgtaggtgaccaacctcctgatattgaaagacaaattaaggacatgtag

SEQ ID NO: 82290 - DNA, 1002 bp, Saccharomyces pastorianus
atggattcagctagttcggttgttttgagcatgattactgatttttccaatgaatatgccggtatcttggacggtgaggcgaaggagctttccagtcaggaactttctggtggtgctagaatttcttacgtattccatgaaactttcaaaaatggtgtagactctttggatccattcgaccagatcaaagattctgatatcagaaccattatgtacaatagttcaggttctgccccatctttgtttgtcggtaccgaagcttttgaagttttagttaaacagcaaattagaagatttgaagaaccatctctacgtttagttactctggtgtttgatgaacttgttcgtatgctaaaacagattatttcacaaccaaagtactcaaggtatcctgctctaagagaagcgatttctaatcagttcattcagttcttaaaggatgctactattcctacgaatgagtttgttgtcgatatcatcaaagctgaacaaacttacatcaatacagcccatcccgacctcttgaagggttctcaagcaatggttatggtggaagaaaaattacatcctcgccaagtcgctgttgacccaaagacgggtaaaccattaccaacccaaccatcgtctagtaaggcgccagttatggaagagaaatcaggattttttggtgggttcttctccactaaaaacaagaagaaattggcagctttggaatcaccacctcctgttttaaaagctactggccaaatgacagagagggaaacaatggaaacagaagtaatcaagttgttgattagtagttatttctctattgtcaaaagaaccattgccgatattataccaaaggctttgatgcttaaattgattgtgaaaagtaaaactgatattcagaaagttttactcgaaaaactttacggaaagcaagatattgaagaattaacgaaagaaaacgacataaccattcaagaagaaaagaatgtaagaagatggtcgagatattga

SEQ ID NO: 82291 - DNA, 1596 bp, Saccharomyces pastorianus
atggtagttaagaagcgtaagttggcaactgaggccggtggcagtgatgaaaggcctaaatacttgccgggaaaacatcctaaaaaccaagagaaaactccgcatgtggattataacgccccattaaaccctaaatctgaactttttctagatgactggcatatacctaaatttaatcgatttattagtttcactttggatgttcttatcgacaaatacaaagatattttcaaagatttcatcaaactaccaagtaggaagtttcatccacagtattattacaagatccagcagccaatgtctattaatgaaatcaagtcaagagattatgaatacgaagatggtccaagtaattttcttttggatgttgagctactgacaaagaattgtcaagcttacaatgaatatgacagtttgattgtaaaaaactccatgcaagtagtaatgttgattgaatttgaagtattgaaggcaaaaaatttgaaaagaaattacttaattaacagcgaggtcaaagccaaattactgcactatcttaataagctagttgacgccacggaaaagaaaatcaaccaggctctgctgggtgcgtcatctcctaaaaacttagacgacaaagtcaagctaagtgaaccgtttatggaattagtcgataaagatgaacttcctgaatattatgaaatagtgcatagccccatggctttatcgatcgtaaagcagaacctcgaaattggtcagtattccaagatatatgatttcatcattgatatgcttttagtttttcagaatgctcatatattcaatgatccaagcgctttgatttacaaagacgcaacaactttaacaaattattttaactacttaatacaaaaggaattcttcccagagttacaggatttaaatgaacgtggcgaaattaatttagaatttgacaaattcgaattcgaaaactacttagctattggtggtggtggtccagccgcagcaggtgcgttagctatatctgctcttgataatgatattgagccagaatctaaccgtgaagatcttattgatcaagcagattatgatttcaatcatttcgaaggtctcggcaatggttataatcgttctctcctaactgaagattatttactgaacccaaacaacttcaaaaagttaatagccaaaccggaaacagcgcaatccgaagtcaaaaatgaaagatcaacgacatctgatattgagaagacaaactccttagagagcgaacatttaaaaatccccaagtacaatgttataaaatccatgcaaaaagaaatgcaatcactctcagagcaacacaccatggagtataagccctataaattaatacaacaaatttacattttttcttctaaaaatttgtattcgcaggcaactaagcctttaccgggttcaaggccatcatgcaatcaaaattgggtagagtatattttcaatggtaatgaattgagtcaaaatgaaaacgctttctccttcatgttacaacaccatgacaaacttattttaacaattacagtcctcatttcgacctcactcattaaacggatacagaagactttatataaccattaa

SEQ ID NO: 82292 - DNA, 405 bp, Saccharomyces pastorianus
atgaaagatgaggaatggtttgctgtcctgaaagtccaccttttttccacattttcattgtcaaaagcagtatggccaatatttaccaaacaaaagtctggatttattatcaatactacttctacctcaggaatttatggtaattttggacaggccaattatgccgctgcaaaagccgccattttaggattcagtaaaactattgcactggaaggtgccaagagaggaattattgttaatgttatcgctcctcatgcagaaacggctatgacaaagactatattctcggagaaggaattatcaaaccactttgatgcatctcaagtctccccacttgttgttttgttggcatctgaagaactacaaaagtattctggaagaagggtattggccaattattcgaag

SEQ ID NO: 82293 - DNA, 96 bp, Saccharomyces pastorianus
atgacagaaaacgttttaccaccacatatcttgaaacagttaggaccggttaatattgttcccttagtactctatttgacacacgtaagtacgtaa

SEQ ID NO: 82294 - DNA, 189 bp, Saccharomyces pastorianus
atgacagaacgtgagtttgcatctgtggtagatgttcatttgacaggtggctataagctatcgcgtgctgcttggccttatatgcgctctcagaaatttggtagaatcattaacaccgcttcccctgccggtctatttggaaattttggtcaagctaattattcagcagctaaaatggggatcctctag

SEQ ID NO: 82295 - DNA, 267 bp, Saccharomyces pastorianus
atgcctggaaatttatccttcaaagataaagttgttgtaatcacgggcgctggagggggcttaggtaaggtgtatgcactagcttacgcaagcagaggtgcaaaagtggtcgtcaatgatctaggtggcactttgggtggttcaggacataactccaaagctgcagacttagtggtggatgagataaaaaaagccggaggtatagctgtggcaaattacgactctgttaatgaaaatggagagaaaataattgaaacggctatataa

SEQ ID NO: 82296 - DNA, 441 bp, Saccharomyces pastorianus
  modified_base (407)..(407): a, c, g, t, unknown, or other
atgctaagaactactgcctcacgaaaaattgtgctaaggaggggtctagccagcataaacacagggactaccgttgcatcaaaaaaggcttcgcacaaatttcgcaataccttttggactattgctttgtcagcgacagctttctacgctggaggtatcatatattcgcaaaaaaatgacaaatttggtgactttttctctaataacgttccttttgccgaggatttactagaaacatatgaacactatcacgataggccaacattgtttttagaagattcttgggacggcttgaaggcaaagagcaatgatttattatctggattaactggtagttcacaaacgcgcagatctaatagggaaaatattgaagtaaaaaaaatcttatcattagaaccactaaatantgaaacgacctgcaggcatgcaagcttgcactgc

SEQ ID NO: 82297 - DNA, 105 bp, Saccharomyces pastorianus
atggcgatcaagaaaagaaataaaattaggttaccaagtggttctcctgaggaggttggaattgatggttctgcgcataagccaatgcagcaattaagcccctag

SEQ ID NO: 82298 - DNA, 1353 bp, Saccharomyces pastorianus
atgacaagaaagcaggctattgactatgcaatcaaacaagttccgcaaatattgcctttggaagagtctgatgtaaaagcgctgtgcgaacaagtactgagtacatcatctgatgatccagaacaaattgcttcaaaatttttggagttcctaggtcatgaagatctatcgtttgaatttgtaatgaagttcaatgaattattgaatcagaatgataaaaaagaggaaaaaaaaacgaaaaatgtgcatcttgaacatactgcccccacttcatggaaaaatgaatcaaaacagcccactaataactatatcaataagaagggagatgaaaaaccaaaaaaattaaaggatgagaagaaaagctcgacaacgaggcctaccgttcaaccatcaaatcaatctacgcaatcaaaccccataaaggagaaaaaagagcacaaatcaaaggggaaattacaatcgttacaagaaatagacgaagcaatcaagatgctagagcttcgagatagcggttcttctaaaaattgtaattgtcaaggtacaaggcatccagttttcgacatcgcgccaaactgtcttcactgtggtaaagtggtttgtgttatagagggattgaataaaggtaaatgcggtcattgccatgaacagttgatttctgataacgaaagaacccaaatggtagaaattttaaatcaggaaaaaaacgaactaaacggttcatcatcgtccttatccaatgcgtcaaatggagctaatgtcccaaagaagaagactaaaacctacaaaataacttccggtatgggtaaaaatttatttgctgaacaggacaaattatttgatttcatcgaaaggaaaagagaaagagaaagaaagcgtaatgaagtgttgaaattgcaggaggaaaaagaagagagcgaagcaaaggaaagacaagcgagcgagcatgaccataaagctgaggaaaacccggagttgttagcagcacaagaacgattagatagacttttatatttccaagacacttcggcagaaagaacaaaaattattgataatgctagcgattttgacatgaatcaggaggtgggtttatggggcagcgcaagagaaagagctcttgcgttgaagaagcaacaacgtaatttgagaaagtgggaaaaagtagaaaaggaacggaatggcaggcgcgagaagtacgttgttagcatgaatataggttcaaacggtaaagttactatgacagaagtccctaaggatacagagaacgtaattgcaggttcagatgatgacatcagtgatataagtgacgaagaagatatcagcgaccttaaacatatacacgctctgaaaaagtga

SEQ ID NO: 82299 - DNA, 1113 bp, Saccharomyces pastorianus
atgagcgatgaagattctatgctgttaaacttcactaccaatgaggacactgcaggaagttcctataagcaagctgccaaggtgacaggcggtagatggaaggatagaagaagaatgaaaatgaagcttgagggaaagacagtctcgaggaaaagaaaggcgaacactacaggggacgaagggataattccgggtagaggcgagaattctattaaaaaattgcataaggagagttcctatagttctgaagagcaggaaaaatataagggtagaaatgctcataacactcaagggagaactctaccagccgattctcagtttgtttcatccctgtttacatctaacagagagattacaactgcggtaaacactaatattcatgatgaaaacgttgccatcaatccgtctaacgcgcccttgaaaggtgatcagtttgcgtctttaggtgtcactagtcttcttgtttctcatctggagcaaaaaatgcgtattaaaaagcctacgagcatccagaagcaggccatacctcaaataataggtaacgcggggaagaacgattttttcattcacgcccaaacaggctcaggtaagactttatcgtatcttttacctataatatctactattttgaacatggatactcatgttgatcgtacttctggtgcattcgcattggttattgctcctacacgagaactagcatcacaaatatatcatgtttgttccacgcttgtgtcatgttgtcactacttggtcccatgtttattgattggtggagaacgtaagaaatcagaaaaagctagattgcgtaagggttgcaatttcataatcggtacaccaggtcgtgttttggatcatttacaaaatacaaaagttatcaaggagcaattgagtcaatctctaaggtatatcgtattggatgaaggagataagttaatggaattgggttttgatgagacgatcagtgaaattattaaaattgttcacgatattcccatcaactccgaaaaatttcccaagctaccgcataagttagtgcacatgttatgtagtgctacacttactgatggtgttaataggttaagaaacgtggcgttgaaagattacaaatag

SEQ ID NO: 82300 - DNA, 726 bp, Saccharomyces pastorianus
  modified_base (690)..(691): a, c, g, t, unknown, or other
  modified_base (701)..(701): a, c, g, t, unknown, or other
  modified_base (715)..(715): a, c, g, t, unknown, or other
atgagtattgacaacaagttgtttgttactgaagaggatgaggaagacaggacgcaggaccgtgctgatgttgaggatgaatctaacgacattgatatgatagcggatgagaacggaacaaacagcgctatagctaatgagcaagaggaaaaatccgaagaagtaaaagctgaagatgatactggtgaagaagaagaggatgacccagtgatcgaagagtttccattgaagatctccggagaagaggagtcactgcacgtgtttcagtatgctaatagaccaaggctagtaggacgcaaacctgctgagcatccgtttatctctgcagcaagatataaacccaagtcgcacctatgggaaatagatattcctttggatgagcaggccttctataacaaggataaggctgagagcgagtggaatggggttaatgtccaaacattaaaaggcgtgggtgtggaaaacaatggccaatatgcagcatttgtcaaagatatgcaggtttatttggtacctattgagagggtagcacaattgaagccatttttcaaatatatcgacgacgcaaatgtaacaagaaagcaagaggacgccagaaggaaccctaatccttcatcacaacgcgctcaagtggttaccatgtctgtaaagagcgtcaacgacccccttcgcacaaacacgactcactgnngctccctcgnctggcacactaaangtcgccgatga

SEQ ID NO: 82301 - DNA, 282 bp, Saccharomyces pastorianus
atgatcgaatggataacgagatatcaagcgatgaagaagactccgaagatgaagatgaagagaatgatatgggccatgaggagggctactcattatataggtcaagaagtaaagaagctttttgaactaaaacattcacattgtcacattttcaccctttattcatcaattttttattgctccacttttttcgcatataggtcatttataattcatcaaatatatacttttttaattgaggcttgtattaatagtaaccgaatatatctgggatcctcgtag

SEQ ID NO: 82302 - DNA, 3102 bp, Saccharomyces pastorianus
atgtcaggttctttctggaagtttggtcaggattactcgatagagtcaccggtttctaagattctaaatagtgcctttattaaaatcaataaggaccaagatgacgacgtacctaccggcacatgtgaagaaaatattgctgatgacgaagataactcttcacatgactacgctgcttctgaagataatgtagttaacgagaacgaagagaaggaagaagaaaatactctgcccactacagaatcggaatatgaaaattatagacctaatttggacgtcttagacgatttgctggatgatgacgaactgtatacggaattaatgtgttcaaatttcaagctactaatattcttgaagtatcctgaagttttatcaaaattgatagaatatgttaccaacgagaagattctcgacgaagaaacagatagcgctaaaaagccagagattattgaaggtgtaaacgatcatcctattttgatagaaagagacagaaaggataaaaaggaggacgctgaagaaggaggcgactcagaagaaactacaaatgatagcgatcatgactctggggacgaaagaagtgttgattctgaagagacaagcattactttgccaccggaatctgaggaacaagtggagactagaagggcaaggatagctgctgaaattttatcggctgatgtatggcctatatccgcagcaataatgcaaaataaggatcttcttggtagattgtggtcgatactagatcacccagctcccttaccgataccagcttccacctacttcatgaaaataaatgaaagacttctcgatatggatataacggggatgttagagtttatattaagccgagacagcttggttgcaaggttcttgacacatgttgacaatccgtctttgatggacttccttttgaaagttatctcgacggataaacctgactctcccacgggtgtcataaagatactaaaatcacaggaattaatacctaaacttttagatcatcttaatccagaatacggtatttccactcagtctgcggcaggcgattttattaaggcattcgtcacgttaagcactaactcaagcaatgaacttgcttcgggaataggtcctaatgaattgacaaggcaattagtatcagaagaaatgatagaaaagttgattaagataatgctaaagggcggtacatccttaagtaatggtgttggaattatcatagagttgatcaggaagaataactcagattatgatttcatccaactagtctacactaccctagaaagtcaccctcccactgatcgagatccaattcacttgatacatttagtcaaactttttgctaagcatatgcctgattttgctgatatgctggataaaaccaagttgccactaatggaaatgccattcggtaatattgaacctctgggatttgagaggtttaaaatctgtgaacttattgcagaactattgcactgttctaatatgacgctgctaaatgagcccaatggtgagatgattgcccaagaacgtgatatagaaagggccaaagaattagaaacttcaaccgaaaaggaaaatataacagctattgtggacaataaatcatcatattatgataaggattgcgtagagaaggatatcacagaaaatttaggcgctcttcaaataaataatcaaggaagtgaagaagatgaattaaatgatactggggtatcaagtgtaaaactggatgtgaaatcagacgcaaaggtagttgaggggctagaaaatgatgcttctggagtagagttgtatgatgaaaccttgtctgacacagaatccgtgagagaatgcctaagggaaaaaccgctagttggagacaggctgaagattgctctagaagacactaagatactgattagtatccttgatatgttcactgagttcccttggaataattttttgcataatgtaatttttgatattgcccagcaaatattcaatggtcccctcaaaactggttataataggttcctcttgaaagattatttggttgatgcatacctaactaaaaagatagtagatgcggataaggcatgtcaagactatgaaaaaaagaccggtttacgttatggttatatgggtcatttgacattagttgccgaagaaatatcgaagttcaaagagtatattgatgaaatgaagctaactttttgcaataccgctgtttcagatcgacttgaggaaccattttggaaagaatatagtgaaacgatcttggctgatacaagagagaagtataacaccgttttgggagattttggcaatgaccaagaaagcgatgacgatgttattaggaattctgattctgaggatataattggtgatacagagggcaacgaaaactacggaaatggagaaaacgatgaacttcttagtaacgggcatgattctgggaacatggatttatattataacttcaataataacgagaatgaagaaaatgaagaagattacgcagagtatagtgatgtggataataaaaattactataataacgtcgagactaacgacgatgattatgatagtgatgatggtaaatccaaaagtgccgaatcagagtttaccgataaaatatctgaacatagggatggcaatagtctctataatgaggacaatgatgaaaacgggagtgacaaatggacatcgggtacttcattgttccctccagaccattttcctagtaggtcacaaccttcagatcctaaactgcaagaccagaatatttttcaccatcagtttgactttgaaggtgttggcgatgacgatgactatatggatcctaatgatgatggccagtcatatgccagacctggtaatccattgtatactaccccgaaaacaccaccaagaccgaagactattcttttcaattctttatccgcattggataataatggcgaagacgaagaagtggcactaggcaccagtgttgatgatcgaatggataacgagatatcaagcgatgaagaagactccgaagatgaagatgaagagaatgatatgggccatgaggagggctactcattatataggtcaagaagtaaagaagctttttga

SEQ ID NO: 82303 - DNA, 1653 bp, Saccharomyces pastorianus
atgtcagtacctaattccaaagagcagtcgctcctagatgatgcatccacattgttattgttttcaaaagggaaaaaaagagctgaagaagcttcaaaaataggctctaaaacagatactattgagcatgatgagtctcatgagagagaaaaaaaaggagcaatagaaatggcagcagcagcactggctacagcatccacagtttctttacctttaaagaaagctactgagcaatcggcggcagaagcagcaacatccacggcagcaaaagaagagaccgaaaatcaacctcaaaagcaacctcaatggccggtacctgattcgtatatagtcgatcctgacgcgggtataattacatgtatatgtgatttaaatgatgatgatggattcactatccaatgtgaccactgcaacagatggcagcatgctatttgctatggcatcaaagatattgggatggcacctgatgattacctttgcaactcatgtgatccaagagaggtagacattaacttggctaggaaaatacagcaggaacgcataaacgtaaaaacagtagaaccttcttcatcaaacaatagtgctagtaataagaataacggtcgggacagagcatcgagtacaactattagtgacgttggcgatagcttttcaacggatcaggacaatactaaccacagggacaaaagaaggaaaagaaacccatcaaataatagtatagactccaaaaacgaaagcgcttctgtcaattcttccgatggattgacttctatgcccaagaaaaaagagcatttcctgagtgcaaaagacgcatatggtgcaatatacttgcccttgaaagacaatgtgtttaaaagtgatctgatcgaaccgttcttaaataaacatatggatgataattgggtcatacaatatcctcataagacctttaaatctgtgtcaattgaagtcaaaccgtatgctgacattgcatattccaggacttacccaggcttcacgaaattaggagtttatctcaaaaaggactgcataaaaggtgatttcattcaagaaattttaggcgaattggacttctataaaaattatctcactgacccacgaaaccattacaggatatggggtacagctaaaagaagggtcattttccattcccattggccgatatatatagatgcacgcttatcaggcaattcaactaggtatttgagaagaagttgccagccgaatgttgaattagtaactataaaactgcaagatacagacaataggaatgacaaaagcagtggaagaaaatcaagtagaataaaatttgttttaagagctttgagagatatttcagaggatgaggagttatacatcaaatggcagtgggattcaaaacatcctatattaaaattaataaagggcatgacaatagactctttagatgaccttgaaaggtatgggctgataaattcggtagaaacaattttgagtaacggcgaatgcggctgtggaaataattctaaagattgttatttattgaaagtgaagagatacgcgcaaagtctttataaatctgtgaaatccagaggaaaaatgaacaacagatataaattaaatgaaattctcaaccaatataattgcaaaaagagacgtgagccaccaatttag

SEQ ID NO: 82304 - DNA, 180 bp, Saccharomyces pastorianus
atggacccgctcaccataaacttttccagaatagaaaccttcggattattcgtaggtaatgaaccaccaccagttgtaagcagtctcttctttctcttgaatattttatttgggtcgttagaatgggtattggcattagtgttcacattggttgttattcagctttttcctatttcttga

SEQ ID NO: 82305 - DNA, 108 bp, Saccharomyces pastorianus
atgtcacgtaattctgcagcaggtttggaaaacactcttttccaactaaagtttacatcaaaacaattacaaaagcagccaataaagcctcaaaggaagaaaaacagg

SEQ ID NO: 82306 - DNA, 1347 bp, Saccharomyces pastorianus
atgagtaatacttcttcgtacgagaagaataatccggataatctgaaacacaatggtattaccatagattctgagtttctaactcaggagccaataaccattccctcaaatggctccgctgtttctattgacgaaacaggttcagggtccaaatggcaagactttaaagattctttcaaaagggtaaaacctattgaagttgatcctaatctttcagaagctgaaaaagtggctatcatcactgcccaaactccattgaagcaccacttgaagaatagacatttgcaaatgattgccatcggtggtgccatcggtactggtctgttcgttgggtcaggtactgcactaagaacaggtggtcccgcttcgctactgattggatgggggtctacaggtaccatgatttacgctatggttatggctctgggtgagttggctgttatcttccctatttcgggtgggttcaccacgtacgctaccagatttattgatgagtcctttggttacgctaataatttcaattatatgttactatggttggttgtgctaccattggaaattgtcgctgcatctattactgtaaatttctggggtacagatccaaagtatagagatgggtttgttgcgttgttttggcttgcaattgttatcatcaatatgtttggtgtcaaaggttatggtgaagcagaattcgtcttttcatttatcaaggtcatcactgttgttgggttcatcatcttaggtatcattctaaactgtggtggtggtccaacaggtggttacattgggggcaagtactggcatgatcctggtgcctttgctggtgacactccaggtgctaaattcaaaggtgtttgttctgtcttcgtcaccgctgccttttcttttaacggttcagaattggttggtcttgctgccagtgaatccgtagagcctagaaagtccgttcctaaggctgctaaacaagttttctggagaatcaccctattttatattctgtcgctattaatgattggtcttttagtcccatacaacgataaaagtttgattggtgcctcctctgtggatgctgctgcttcgcccttcgtcattgccattaagactcacggtatcaagggtttgccaagtgttgtcaacgtcgttatcttgattgccgtgttatctgtcggtaactctgccatttatgcatgttccagaacaatggttgccctagctgaacagagatttctgccagaaatcttttcctacgttgaccgtaagggtagaccattggtgggaattgctgtcacatctgcattcggtcttattgcgtttgttgccgcctccaaaaaggaaggtggaagtttt

SEQ ID NO: 82307 - DNA, 174 bp, Saccharomyces pastorianus
  modified_base (167)..(167): a, c, g, t, unknown, or other
atggtgccaagggaaagtcctagcatgtcaaacagtcatcatacatcccagggaagaagaaacaaactttcagtgtgggttaaaaaaataataaacaccactaccacaactaacgcatcggtctcgagcagtaaaccaagacgcggcactagggctggccccacaangagttaa

SEQ ID NO: 82308 - DNA, 372 bp, Saccharomyces pastorianus
atgtcgttttggaaaacattgcagagacagccacgtaccatctcgttgtttaccaatgacatcgcgtccaatatcaagtcgcagaaatgcctgcagttactgaagggagacgtctctcatcgattcgacgtggaaatcgccaaccgctttcccacgtgggaccagctgcaatacatgagaacttcgtgcccgcaaggcccagtttcgttgcaaaggcagattccaaagctggattcagtgctcaaatacaagcacacagacccgacgttcgggatggacctgcagaagtgtgtccagaggggactttggaatcacaaaggaggcgctttgggtccgactgggaaaactagattggtgggaaatgagcccgca

SEQ ID NO: 82309 - DNA, 993 bp, Saccharomyces pastorianus
atgccaacagctaagaggacgtcatccagggcttcgttggcactgcccttccagttacggttggtgcacaaaaaatcatggggccatcggctaagagacttcatttccgggttcttaaaatcatgcagacccattgctaaatacgttttccccaacttcatcgtggtgcactatatctacctgatcacgctgtcgattatcgggtccattctgttatatcggtgcaagaacacggcgttcatcgatgtgctatttctggctgctggagcgtctacacagggcgggctggccaccaagagcactaacgatttcaacctgtaccagcagatagtggtgtacgtcattacattgctgtccacgcctatacttattcatgggtttttggcctttgtcaggctgtattggtttgaaaggtacttcgacaacattagggatatctccaaacagaattttaaactaagacggaccatgacgttgcaacaaagggaactatcgggcagcagtggcaatgccgctcgaagtaggagtttcaaggacaacctgttccgtgggaagtttgtttccagagaagacccacgacaatccgcttcagatgtgccgatggactctcctgacacgtccgcattgtcctcaatctcaccgttgaatgtttcctcctctaaggaggaatccagtgacacgcaaagctcgcctccaaacttctcaagtaagcgccaaccctcagacgttgacccaagagacatttacaaatcgataatgatgctacaaaaacaacaagagaagagcaacgcaaactccacggattctttttcgagcgagaccaatggacccgctttcattgtgcaggaacgtcatgagagaagagccccccactgctcactgaaacgccattctgtcctgccatcttctcaggaattgaacaagctagcccagacgaaaagtttccggaaattgcttggcttgcggagagatgaaggtgaccatgactactga

SEQ ID NO: 82310 - DNA, 834 bp, Saccharomyces pastorianus
atgtctgaaggtattactgatattgaagaatcccaaattcaaaccaactatgacaaggtcgtctacaagttcgatgatatggaattggacgaaaacttgttaagaggtgttttcggttacggtttcgaagaaccatctgccattcaacaacgtgccatcatgcctattattgaaggtcacgatgtcttggctcaagctcaatctggtactggtaagaccggtactttctccattgctgctttgcaaagaattgacacctctgtcaaggctcctcaagctttgatgttggctccaactagagaattggctttgcaaatccaaaaggttgtcatggctttggctttccacatggacatcaaggtccacgcttgtatcggtggtacttcctttgttgaagacgctgaaggtttgagagatgctcaaatcgtcgttggtactccaggtcgtgtttttgacaacatccaaagacgtagattcagaactgacaagatcaagatgttcatcttagatgaagctgatgaaatgttgtcttctggtttcaaggaacaaatctaccaaattttcaccttacttccaccaaccactcaagttgttctattgtccgccaccatgccaaatgatgtcttggaagtcaccaccaaatttatgagaaacccagttagaattttggttaagaaggatgaattgactttggaaggtatcaaacaattctacgttaatgttgaagaagaagaatacaaatacgagtgtttgaccgatttatacgactctatctccgttactcaagctgtcatcttctgtaacaccagaagaaggtcgaagaatgaccactaa

SEQ ID NO: 82311 - DNA, 345 bp, Saccharomyces pastorianus
atgataccaccacgaatcgttccatggagggattttgctgaactagaggagctgaaactttggttttacccgaaaagcaaaggaaccattgaagataagcgacagcgtgcagtgcaaagagtacagagctaccgactaaagggttcccaatatttacctcacgtggtggactctacagcacaaataacatgtgcggtattgctagacgaaaaggaaacgtgtttaggagtacatcaggattctattcctatccggttatcgtatgtaatggctttgattcggtttgtcaatggcttattgatccaacgcaacaatctcagttcgctattcccttacatacattag

SEQ ID NO: 82312 - DNA, 1035 bp, Saccharomyces pastorianus
atgtgcggtattgctagacgaaaaggaaacgtgtttaggagtacatcaggattctattcctatccggttatcgtatgtaatggctttgattcggtttgtcaatggcttattgatccaacgcaacaatctcagttcgctattcccttacatacattagctgctaaaattggactgccgtcctggtttgttgatttgagacactggggtacacatgagagagatttacctggattagaaatgctccgttgggccgccaatgaagcgttatcttggctatatgatcactactggaacgatgaggaattagaagatgacaggaatgatgatgacgatgatgatgataccggttacggatacagaagaaatgataaactggagaaatatatggagtcattaactaaaacacttgataaatggaagcgacttagaaacgagtttctggaatacaaatgggtgtgggagaatgcaaacgatagtttaattacaagtagtaacttttctggggataatttggtgaactatgatgccgaaaagaggaaaagttcacacgcaagttcatcagaaactatgatcagggaaaatttgcgtcaatggcaagaactttggaaattatccatttatcacaatgtggttcttgagaaattttttaacaattatgacccacttttactcaaagttttaatgcttaatttgaacaattttgattggaaggtcattgagtgggtagctaggaattacagaacccaacaagatgatagtaatataacgacaattttaaaaaggaaattcaatgcctggaaagaactacaaaaaaggctgttagatgttattataaataaccttaacaataaaaattttaaaaataaatggcaaaattgggagaaacttattgatgaaaatgcgtcatacttgatattgtatttttgccaatctatgctggccaaactagagactgaaaaaattactggtaactcatggagaaacaaaaaacggagaaacaaattgatagcacagtggatatcgaggccaaactga

SEQ ID NO: 82313 - DNA, 282 bp, Saccharomyces pastorianus
  modified_base (184)..(184): a, c, g, t, unknown, or other
atggagaaacaaaaaacggagaaacaaattgatagcacagtggatatcgaggccaaactgaaagaatacatagaccatttatcattgaggtttaatgaaggtgaaataaagctgtatgattttattcctgcggaaaaagattccgttccattgaagaaggaagtgagtcgcggcattaaaggcntgatacgcaatgatatacttaggcgatgttggcgttctttgaaactagagaatgagccagtttgcggaacacgtaaggtaaataaaaataaacaatga

SEQ ID NO: 82314 - DNA, 648 bp, Saccharomyces pastorianus
  modified_base (634)..(634): a, c, g, t, unknown, or other
atgtcacaatacaaaactggtttacttttaatacatccggcggtgactacaacgccagagctagtagagaacactaaggctcaagctgcatcaaagaaagtcaagttcgtggaccagtttttaatcaacaaactaaacgatgggtccataactttggaaaacgcaaaatatgaaacagtacactatttgacgccagaagcccagactgatattaagtttcctaaaaagttaatttctgtcttagctgactcattgaaaccaaatggctcactaattggtttaagtgatatttataaagtagatgcattaatcaatgggtttgaaataattaacgaaccagattattgctggattaaaatggattcctctaaactcaaccaaactgtttctataccactgaaaaaaaagaaaacgaacaatactaagctacagagtggtagtaaactaccaacttttaaaaaagctagttcttcaacctctaatttaccctcattcaaaaaagcagatcacagtaggcaacctatagctaaggaaacagacagcttcaaaccacctagtttcaaaatggccactgaaccaaaagtctaccgagtcgtagacgacctgatgaggatagcgatgatgatgatttctnctagtgactcttcc

SEQ ID NO: 82315 - DNA, 1476 bp, Saccharomyces pastorianus
atgcaaattggatatggactagtcaatgaccacaagaaggtttacatctggaatattcactccactcaaaaggatacgccctatataactgtaccatttcgttctgatgataatgatgaaatagcagtcgcgcccaggtgcatactaactttccctgctacaatggatgagtctccattagcactgaatcctaatgatcaggacgaaaccggagggcttatcattatcaaaggtagcaaagcgatatattatgaggatatcaactccataaataatttgaactttaagttatctgaaaaattctctcacgagttagaattacccatcaactcttcgggcggagagaagtgtgacctaatgttaaactgcgaacctgctggtatagtgctttctacaaatatgggcagaatattttttataaccattagaaattccatgggtaaacctcaactgaagttaggcaaactattaaataaacctttcaaattgggtatctggtccaaaattttcaatacaaacagttcagttgtctcattacgaaatggacctatcctcggtaaggggacaaggttagtatatattactactaacaaaggaatttttcaaacatggcagttgtctgccacgaattcccatccaacaaaattgattgatgtaaacatttacgaagccattttagagtcgctccaggatttgtatccatttgctcatggtacgttgaagatttgggactctcatccattacaagatgaaagttcacaacttttcctgtcatctatttacgacagttcatgcaatgaaacatattatattctttccacgattatcttcgattcttcttctaatagttttactattttttccacttatagattgaacacttttatggagtcaataaccgacacaaagtttaagcctaagatatttatacctcagatggagaatgctaacgataccaatgaggtaacttccattttggtaatgttccccaatgctgttgtcattactcaggtgaactcaaaattggactctagctattcaatgagaagaaagtgggaagatattgttagccttagaaatgacattgagataattggttctggttacgactcaaaatctttgtatgttttaacgaaacaaatgggggtgctacagttttttgtgaaagagaatgaggaaacaaattctaaaccggaagttgggtttgtcaaatctcatgttgatcaagctgtttatttctccaaaataaatgcaaatcccatagatttcaatttacctccagaaatttcactagatcaagaatctatagagcatgatttaaaattaaccagcgaggagatttttcattccaacggcaagtacataccccctatgctaaatacgttggggcaacatctctctgtccgtaaagaattttttcaaaatttcctgacatttgttgctaagaacttcaactataaatatcacccgaactga

SEQ ID NO: 82316 - DNA, 105 bp, Saccharomyces pastorianus
atgagtgaaaaaaaagtacatcttcgtttgcggaaggaacttagcgtacccattgcggtggttgaaaacgaatccctggcgcagttgtcttatgaagaggaaagc

SEQ ID NO: 82317 - DNA, 921 bp, Saccharomyces pastorianus
atggcttccaagaaaattaaagttgacgaagtgccaaaattaagtgttaaggagaaggagattgaagagaaatcttcttcttcttcctcttcctcctcctcctcctcctcctcttcttcttcatcttcctcgtccagttctagcggcgaatcttcaagcagcagcagcagcagcagtgacagcagtgactctgaatctagctcatcttcttcttcttcttcttcttctagctcaagctcaagttctagcgactctgaatcttctagtgaatccgactctagttccagtggatcttcttcttcctctagctctagttctgacgaatcttcctcggaatccgaatcagaagatgaaaccaagaaaagagcaagagaatcagacaacgaagatgctaaggagactaaaaaggctaaaactgaaccagaaagctcttcctcatcggagtcaagctctagcgggtcatcgtcatcttcggaatcagaatcaggttcggaatctgattctgactcaagttctagctcaagcagttcttctgattccgaatcagattctgaatcagattctcaatcaagttctagctccagctctagcgactcttcgtctgactccgactccagctccagcgactcttcatctgactccgactctagctccagctctagctccagctctagcagctcttcctcggattcagattcggattcagattcggattccgactcaagctcgtctgattcaagttccgacgaatctacatcttcttctgattcctccgattcggattccgactcagactctggttctagctctgaattggaaacaaaagaagcaactgcagacgaatccaggccgaagaaacgcctgcctcatctaacgaatcaactccatctgcttccagttcatcagcgggggatcctctag

SEQ ID NO: 82318 - DNA, 1560 bp, Saccharomyces pastorianus
atgtcggatcatgatactccaatggaaagcatacaaaatggtgaaaattcagacgaaagattgaacgccattgcgtcttttttcggttgctctttagagcaggttaaatcatttgacggtgatgtggtaaaacaccttaacgataaacttttacagtttaatgaacttaaatcggagaatctaaaggttaccgtctcattcgatgaattgaaggctagttctttaaagaaaattgatggtttgaagacagaaatggaaaacgttataagagaaaatgataaaatccgaaaagagaggaatgatacttttgttaagttcgaatctgtagaaaatgaaaagatgaaattatcaagtgagctagagtttgtgaaaaggaagctcgatgatttaactgaggagaaaaaggaaacccagagtaatcaacagcgaaccctgaaaatactggatgaaagactaaaagaaatagaattggtcagggttgagaataatcgctccaatagtgaatgtaagaaactacgctctacaataatggatttagaaacaaaacaacagggctatattactaatgacctgaattctagaactgaactggaaagaaaaacacaagaattgactttattgcagtcaaataatgattggctagaaaaggagctacgttcaaaaaatgaacagtatctctcctacagacaaaaaaccgacaaagtaattctagatatcaggaatgaattaaatcgtttaaggaatgattttcaaatggaaagaacgaataatgatgttttgaagcaaaaaaataacgaattgtcaaaatctttacaagaaaaactactggaaatcaagggtctatccgactccctaaattccgaaaagcaagaattttctgcagaaatgtccctaaagcaacgtttagtggaccttttagaatcacaattgaacgctgtaaaagaagaattgaacagtataagagagttgaacactgcaaaggtaatagcagatgattcaaaaaaacaaactcccgaaaatgaagacttacttaaggaattgcagttaacgaaagaaaaattagcacaatgtgaaaaagaatgtctacgtttatcctctataactgacgaagcagatgaagataataaaaatttatctgcaaaatctagttctgattttatattactgaagaaacaattaattaaagaaaggcgtaccaaggaacatcttcaaaatcaaattgaaacattcatcgtagagttagaacataaagtgcccattataaactctttcaaagaaagaactgacatgttggaaaacgaattgaataacgctgcattgttactagagcatacatcgaacgagaagaatgcaaaggttaaggaattaaatgccaaaaaccaaaagctagtggaatgtgaaaatgatcttcaaactttaaccaaacaacgtctcgatctatgccgtcaaatacaataccttttaattaccaattctgtttctaatgactcgaagggacccttacgtaaggaagaaattcaatttattcaaaacattatgcaggagacgatagtactatca

SEQ ID NO: 82319 - DNA, 1194 bp, Saccharomyces pastorianus
atgtccccttctaaaatgaatgctacagtaggatctacttccgaagttgaacaaaaaatcagacaagaattggctcttagtgacgaagtcaccaccatcagacgcaatgctccagctgccgttttgtatgaagatggtctaaaagaaaataaaactgtcatttcatcaagcggtgcattgatcgcttattccggtgttaaaaccggaagatctccaaaggacaaacgtattgttgaagaacctacctcgaaagacgaaatttggtggggcccggtcaataaaccatgttctgaaagaacatggtctatcaaccgtgaaagagctgcagattacttgagaacaagagaccacatttatattgtcgatgcattcgctggatgggatccaaaatacagaatcaaagtccgtgttgtttgtgccagggcttaccacgctttattcatgacaaatatgcttattagacctacagaagaagaattagcccattttggagaacctgattttactgtctggaacgctggtcagttcccagccaatttacacacccaggatatgtcttcaaagagtactatagaaattaacttcaaagcaatggaaatgatcattttaggtaccgaatacgccggtgaaatgaaaaaaggtattttcacagttatgttttacttgatgcctgtgcaccataacgttttaactttgcactcttccgccaaccagggtattcaaaacggtgacgttactttattctttggcctaagtggtaccgggaaaaccactttatccgcagacccacatagattgttgatcggcgatgatgaacattgttggtccgaccatggtgtcttcaatatcgaaggtggttgttacgccaagtgtattaatctatctgctgaaaaggagcctgaaattttcgacgctatcaagtttggttctgtattagaaaacgttatctatgacgagaagtcgcacgtagtcgactatgacgactcttctattactgaaaatactagatgtgcctacccaattgactacattccaagtgccaagattccatgtttggcggactctcatccaaagaacattatcctgctaacttgtgatgcttcgggtgttttaccaccagtatctagattgactcctgaacaagtcatgtaccatttcatctctggttacacttctaaatggacctgcaggcat

SEQ ID NO: 82320 - DNA, 1068 bp, Saccharomyces pastorianus
atgactgccagcacatcagttgcggtgggttgtgcggtgggtatacccgtcggtgtaggtgttataatagcagtatgtttctggtttaacctacaaaaaagatacaagagggaggaacaagacgatagagaattggaaagggctatttatgatgaaagtggtttcgtgtcctttgacaattttggacccttaagagacagtaaagatgaagcagcactagccagctccgagctaaaaaatcctgatcacacttctggttcatcggaaggatctgctcatccagaagaaaaagatggaaaatcgcgagatcaagagaaaccgttagggaaaaagaatagtaaatactatgtgccagcataccgtaggaaaataaatttacttcaagtacgaaataataactacggcaataatgccaggcagaagtccgttgtggatttaccaagtataaataacagctccaatgtttccttatcatcttcccaacggcatataacaaagagacagatcagcgtttatgatcagatggtccctgttatttctgatgaaggaccaaagtttttcgcagatccttccagtgatactaatactagcaatgaccaaaacaaagcttcgatgatagaacttaaacataatactcgccaatctagtaatgaaaatctgataagaaatttgcagaatcaggactttggttcgtattacccaaggagagcttcatcctcgtttttaaatggtaacatttcaaacgcgtccttccatacaaggaattcctctataacatcggtaaataagcgcgatgccctagaggatgtgtttgcaacacccaaaagtgcggctcaatcacagttaccaaacacttttgataaagataatgaaggaatagatgctgaccactcggtaaaggatagcaggtctgcaataacagataaagataaggatatatacaaattacagaataactatgatgtgggcaatatcggggaaattgctgaggaagatcaatacgaaaacgaatttaccaactactcacagagtaagagagagttcatagaaagtctaaggcctaaatag

SEQ ID NO: 82321 - DNA, 1527 bp, Saccharomyces pastorianus
atggatgaatttgaatctaccaaactttcgaaggttcaattttccactagcgtgttaagtacgccttcgaatgaaggaaataatctaatacacagattcaagaactctttcaagcgaaatgattcaccagccatccaagaaggtttgctgtactcggagctttcagaggaagaaaaaatacaatgggacttagctaaccaaccgtataaaaaggtcctagatcaaaggcacctgaccatgatagccattggaggtactctagggacgggtcttttcattggtttaggggaatcgctagcgtccggacctgcttctttactaattggtttcttgttggtcggcgcatctatgctctgtgttgttcagtgtggggctgaactttcatgtcagtaccctgtttccggctcctatgcgctgcacgccagtagatttatagacccatcagtcggcttcagtataggaattaactacttattgatgtggctcatatcttaccctagcgagttggtaggatgttcgcttaccatctcttattgggcaccatcggtcaatcctgctgcctgggttgcaatcgcgttcgttttaagcatgctattgaatctttttggggcaagaggctttgcagaatcagagttttatatgtcaattttcaaaattgtggctctattcatttttataattattggtattgttctcattgcaggtggtgggcctgattctactggatacatcggcacgaagtattggcacgatccaggctccttcgctgttcctgttttcaaaaacctctgcaatacttttgtttcggcagcatactcctttagtggtacagaaatggttgttttaaccagcactgaagcaaggagtgtttcctcagtctctcgggcagcgaaaggtacgttctggagaattatcatcttttatattgttacagtgattataattggttgcctggtcccttataatgatcctcgtctgattagcggttcatccagtgaggatattactgcttccccgtttgttattgccttgagcaatactggtgctatgggaacaagagtgtctcattttatgaatgcggtcatcttgatagccgtattttctgtttgcaattcctgcgtttatgcatcctctagattgattcaaggtttggcgacagcaggccaacttccaaagatctgcgcttacatggacaggaatggtcggcctttagttggcatggctatatgtggcgcatttgggttgttaggctttttggttgtttccaagaaccagggtacggttttcacatggttgtttgcgttgtgttccatttcatttttcacaacttggttctgtatttgcttctgtcaagtcagatttaggatggcaatgaaagctcaaggaaggtcaaaggatgacattatctatagatcgacattagggatatacggaggaattttcggctgtatcttaaatgttctgttggtaattggagaaatatatgtatcggctgcacccgtgggtagtcccagattctgctgctaa

SEQ ID NO: 82322 - DNA, 153 bp, Saccharomyces pastorianus
atgtatcggctgcacccgtgggtagtcccagattctgctgctaatttcttagactattgtatgagtattcccataatgattgctgtatatattggccatagagttaaccgcagagactggagacactggtacatcaaagcggatggatattga

SEQ ID NO: 82323 - DNA, 93 bp, Saccharomyces pastorianus
atggatattgaccttgatagcggacattccttagaggacttcgaagccacaacgcttgagagggatgaggatacgaaaatacgtttcctctaa

SEQ ID NO: 82324 - DNA, 360 bp, Saccharomyces pastorianus
atgtgcatgtgtgtggtgttggtatattttagtatacttcttgataaaggtaccaaagtactgtatacacatgataattactggttagtcatcctggtgttttacttcttggcattcggctcgatcatgaggatttcgggccgaacctgctccgaagaaatctttcggccaggcatcatatcacaatgggttgcagaatttctcgaaggaatcacctgtaggagtgaacctcgaaaaaaagaaaacacatatttcatactgcatcatccttgcaacacaacgcttcctgcagaagttttcgaacaaaaggcttggcaatcctcacttacaccccactcgcgaatccacattttcacgtga

SEQ ID NO: 82325 - DNA, 996 bp, Saccharomyces pastorianus
atgaaagtatttgtaactggagcttctggcttcattggttctgccgtattatccgaactaatatcctcgggtcatgaagttgttggcttggcaaggtcagacgaggctgctgcaaagattaagtcgattgatcctgctgcaaaaatccttcgcggtgatctcaaggatctggaaattttgaaaaaaggtgccactgaatctgatggcgttattcatttaggatttgtgcatgattttaaaaattttgaacagtgctgcgaaattgaccgtcaggccactgtagctatgctagagtcacttaaaggttctaacaagcctttcttatatacgaatggtacactttctttgcgaccaaacaaagttgctaacgaacaggatggtattgatgaagattccaaaattttgcgtgctgtcactgaacaggttgccttgagttacaaagacaaaggtgtttcagcaagaattgtcagactcccattctcggttcatggcaagggggacaaggcttttgtaccaatattaatgaatattgccaaagctgccggaaaatctggctatgtcggacaaggcacaaacgcttgggcggctgtacatcgtttggatacggctcctctgttcagacttgttttagagaaaggaaaaacaggacaagtgtatcattgcgttggtgaacaaggtataccattcaaagatattgcgcgtgtgattggagaaattttgaatgttcccgtggcctctatccctgttgatgacgcggaaagtcattttggcttcctcacttgttttgtcactagagatggcccagtttcaagcgaaggtaccagaaaagagctgggatggcagccacaacaaatcggtcttctgaagatatccgtgcgaactatcgctcaaactgacttgaagcttatattatgcgttttttctaagagcgccatagcatgtaacgttttttacatactagttagctttatctatatagtctactgtgcagcttaa

SEQ ID NO: 82326 - DNA, 2340 bp, Saccharomyces pastorianus
atgagcatcgcatcccagaaaaaggttaagccatcgtttgtttgcttgcggtgtaagcaaaggaaaatcaaatgtgataaactttggcctacttgctccaaatgcaaggcctcatcctcgatttgtagctacgaagtggagccaggacggattaacaaatctcccactatcgaaaatgcctcacatagagacattagaaacattactcctgcatcgatgtccgcaagtggttcctttacttccatacttaatccaagtaccaaagactgggaaatgaaaaattttgccatgaatttatcgaatgcacacgacaagcttgttgtaatgaataacacaaccatcgttgatagtccttttgccttccatagcattcttcaacatgatttgtatgcgaaggccttgaccacctgcatacatgggaggatactgattgatgtcgaacgccatcgtgaaaacgtttctgccaacaataaaaaaagagaacttaacttaacaatcggtgatattggacctttgttttttattgataaagctgcacttaaatttattgaaaatacctcaaaaacaagcaaattgtatcctccaatagattttctgtataacacgtatgattatgaacaagcgcatcctgaagaaaataatgataaaatttccataaacatccttttggaagagttatccaaatatttcctcaataagaatgaggttgatggcttaatcgtggacttttacaaaacaatatatccggtctatccgttactggaaatatcattattcgaagataacataagggagctgttgcaattgaatgaatttaatgggtataacattgtatttgcgggcaaagactctagaagaaaattggagacaataacactgctaactatcatattggctttttcttacagacgtttgagtctaagtactagtcattcatttaaagaatcttttggtgtaaaatcgaataatttaacgctactcgctcataaacttcttgctctcatgaacgtttttcaatatgttgatgaacatacactttgttgtctgctctattttttcatattgcggtatttgaatccagatcaagctgacatgtatcctactcacagtgacatactaaacctaaaatttttggagaatgtagcaataaagctaggactgaatgaagaacccttccaatacactcgatacgtcagcgaatcggacgattatccaagattattcaatttaagaaggaaattatggcttggcgtgcaatttttgaagtttggaatattgattccagaaggagattctgacattctaagtttggaatatttaagatcctttatgaaaactgacgaatctctaccagaactatttgagagaaattacgcttctactaataatctagacttatcgttgatggctacagcagagaatatctatcatttacatttatctttacaggtattactgacttcttgttttccaataaatggcccttcgtacttgaaggaagtattggataacatcgacaagacaaaagattttttaaatcagaaattccctctcattttaagttctcttggagaaccaaggatgaagagcttacatatcaatgttccctcttccttagcaaatgaagaatcttttgactttagcacttttgaggaaaatgaaacattcatagctaatgtgattagctacacttgtacaatgaacatctatgatagcttatctttgcattttgaaaatcaatgtttcaaaaacgctttggagtacaaaacatattatcaccgctttacttttaccgctatacaagattatttaacgttgctaaaattaatctcggaatactttaatggatctcttctgcatttacgggaaccttttgggtttgccactcagaaagttgttcgcttttcgatacatcgattactcatattccaggccaccttgctcgtgagattattttataagaaggatacatgcgacagatcctctgcagccatgggaatgttgaatgatagaaacggaagacttagtcgagtcattgaaaaaatgatcaagttgatgtcacatcatatgaaattacttgtagaaattgttacctcgaaactggaaaagagctatctcggttcgttcatttctgtctctattttcaggtatatcatttatttggtggatactgacgcgctgtctgcgtttatatccgactactggaagagtgacgccgttatggatgaaagatattcaagaatccataggatagtcggtttaaaatggggtatgggaagggataggtccttttcgtacacatcaaacattaaacaatccacaattcttgggaagtcttga

SEQ ID NO: 82327 - DNA, 1080 bp, Saccharomyces pastorianus
atgcatcacgtactcaattcaacgagacctggccatcggttttggttttacgatgacgtaactcagtacggcagaacaaagtacctcaattattatactcccttagtgcttttaatattcacggtgttgttcataacttataacatatggaaacattattactactatgacgttctacacttgaagcaaaaaaatccaattgatgaacttttatactcatctaccgacgaagacgaacagagtccgttgataaataataacaccatcacaactaattacgtggacaataattgtacaaaagacgcactaaaaaatagacacttttctctggaaaagctgaaatcagttaaggtaaatggagaacctcatggtacacctgaaatagttagaagaggcttcattgaaaaatcaagaattatccttgaattttttttggtactttctcaagttataatacattcttttatactattacactatgtcaataaaaacccagagttcacccaacaaggtacgattactggtttggtagaatggtgtgcattgtttatcattgtctctttacgtttagcaaatgtcaaccaaaatttcaaattcataaacaaatatcccggaaatctatggtcggtatcgttcataaactatttggccttgtttatctctatgattttaccctttcgttccattttcattcaccatataaacagtcctatttcgagaaagtattacatttcacaaatatcgattaaccttgcccttttcttgctactcttttttgcgaggataagaaataattttgccatcatctataaaactgacagctggattactccatctccagaaccagtcacttctattgctggattcatatgctgggcttggttagacagttttgtttggaaagcacacaaagttagtatcaaagttaaggatatttggggattgatgatgcaagattattctttctttgtggtgaaaaaattcagatattttgttgaccataaggttaaaaggaagcgtattttttcactaccttttctttttcttttcgaattgggatcctctagagtcgacctgcag

SEQ ID NO: 82328 - DNA, 2016 bp, Saccharomyces pastorianus
atggctattgacgctttcaaggtttctgaaatttgtggttaccttcattcatttttggaggcttttgttatgactgttgtcgcactggcgctgttataccgtctgctgggttttgctgcaattgtgggtgttttaatcatcgtcgctatgcttccactgaattataagcttgccaagtacatcggcgatttgcaaaagaaaaacttggctgtcacagataatcgtattcaaaagttgaatgaagcttttcaagctatcagaatcatcaaatacttttcatgggaggagaattttgaaaaagatatcaatactatcagagaaaatgaattatctctactgctaatgagatctattgtttggtctatcagttcctttctttggtttgttaccccaactattgtaacagccgcctcatttgcttactacatttacgttcaaggcggggtattaaccactccggttgcctttactgcactttctttattcacgttattaagagatcctttggatcgtttgtctgatatgttaagttttgtcgttcaatcaaaggtctcgttagatagagttcaggatttcttaaatgaaaatgatacaaagaaatacgatcaactgaccatagatccaaatggaaacagatttgcctttgagaattccaccatctcttgggataaggacaatcaagatttcaaattgaaagacttgaacattgaattcaaaactggtaaactaaatgtcgttattggccccactggttctggtaagacatccctactaatggcattattaggtgaaatgtatctactcaatggtaaggttgtcgtcccagctctagaaccaaggcaggaactaatagtagatgcgaatggaaccactaactctatcgcttattgttctcaggccgcttggcttctaaatgatactgtaaaaaacaacattttattcaatagtccattcaatgaggcaagatataaagctgttgtcgaagcatgcggattgaaacgtgattttgagatcttgaaagccggtgacctaacagaaatcggtgagaagggtattactttatctggtggtcaaaagcagagagtctcccttgctagagccttgtattccaatgctaggcatgtccttttggatgattgtttaagtgcagttgattcacatactgcatcttggatttacgataattgtattactggaccattaatggaagataggacatgtattttggtttcacacaacatcgccttgaccttgagaaatgctgaattggtagtcttactagaagatggtagggttaaagaccaaggtgatccaatagacatgctacagaagggtttgtttggtgaagacgagttagtgaaaagtagtatcttatcgcgtgcaaactcttctgctaacttagccgcaaaaagtagcacaagcttaagtaacctacccgctgtcaaagaacaacaagttagcatgaacaacaactcctcccaatttgaagccaagaaacttcaaaaaccattgagaacagaagctgaacgcactgaagatggtaaattaataaaagaggaaacaaaagaagaaggtgtggttggtctggatgtctataaatggtatttgaaaatttttggtggttggaagattgtttcatttttagcttccttgttcttgatagcccaacttttgtatatcggacaatcatggtgggttcgtgcctgggcatcacacaatgtcattgctaaaattattcccagagcacaacgcgttattgcatttatctccaagaaggctagtcatctaattgattggaggggctcgtcccaaatcagtatggcgtcagctgaaaaccaaccttccagtggacactctacaatgtattatctggttttgtacctaatcattggttttgctcaggctttattgggaactggtaaaactattttaaatttcgttgctggtatcaacgcgtcaagaaagatatttaatatgattctaaacaaggttttacactccaagataagattttga

SEQ ID NO: 82329 - DNA, 99 bp, Saccharomyces pastorianus
atgctaatagaagagatagagttttataacgtcaacggaaaaaaaacaacaacagttgttcctgaaaatacaaaaataaaaaaaaagagtactaaatga

SEQ ID NO: 82330 - DNA, 501 bp, Saccharomyces pastorianus
atgctaaagaaaaagccactcaagaaaccgttgaaaaggtttgcatttatagaatttcaagagggtgtgaatctgaaaaaagtgaaagagaagatgaacggtaaaatttttatgaatgaaaaaattgttattgaaaacatcttaacaaaagaggaaaaaagttttgaaaaaaaccagaaatcaaacaaaaaaactgctcctgatctcaagccactatccacaaatactctctatgtgaaaaacattcccatgaaatcgacaaatgaagaccttgccaaaatctttggtgttgaccctaaaaatataaactttgtaagaagagaattggtggatttgagaacaaacaaagttttcttttccgacgagtttcacaccggcgaagccttcatcaagtttgacaacctggggactggagatagtattcaaaagaaatgtcgagaatttaaaggtcggaaggcaagtaatggtagagtattgttggttaagatagcctctgcctag

SEQ ID NO: 82331 - DNA, 408 bp, Saccharomyces pastorianus
  modified_base (320)..(320): a, c, g, t, unknown, or other
atggtggaaaccaacttagccaaagcagcttcgtcttcggctctgacttcggtcaaagcggcaacagcagaagtcttttggttaaccaaagtacccaatctagccttacccttgataatggcgtatggaacacccatcttcttacacaaagctggtaggaaaacaaccaattcaattgggtcgacgtcgttagcaatcaaaaccaacttggccttcttgttttcaatcaaagagacaacatggttcaaaccgtacttaacagcgtatggctttggagaagcgtcttgcttagacttaccttcagcgatagcggcagcttnccttggtcaatctttccttcttttcagcagcggtttctggtctgtacttgttgaacaacttgaaggtttcagcagcggtgtttctgtc

SEQ ID NO: 82332 - DNA, 135 bp, Saccharomyces pastorianus
  modified_base (81)..(81): a, c, g, t, unknown, or other
atggttcaaaccgtacttaacagcgtatggctttggagaagcgtcttgcttagacttaccttcagcgatagcggcagcttnccttggtcaatctttccttcttttcagcagcggtttctggtctgtacttgttga

SEQ ID NO: 82333 - DNA, 369 bp, Saccharomyces pastorianus
atggttcaaaccgtacttaacagcgtatggctttggagaagcgtcttgcttagacttaccttcagcgatagcggcagcttccttggtcaatctttccttcttttcagcagcggtttctggtctgtacttgttgaacaacttgaaggtttcagcagcggtgtttctgtccaaagtgtattggaattgagcaatggttggaggaaccttcaatctgatggacaagatcttcttttgtctttgcaatctgacgtattctggccatttgacgtatctggacaagtttctctttggttggacagcttgaccaataccgaagttctttggagtagagtgagtcaatgggtttctagtcttgttagacttggttga

SEQ ID NO: 82334 - DNA, 2448 bp, Saccharomyces pastorianus
atggataacttcaaaatttacagtacagttatcacaactgcttttttacaagttccacacttatacacgacaaatagattatggaagcccatagaagcaccttttttagttgaatttcttcaaaaaagaataagctccaaagaaattaaaaacacaaaaacaatctgtcatatagatccctcatgggtcaatctaaatgcttcattcattagagatgacatgatctcaataaaagctaccacagatgatatggacctcgatgctatttgcaggatttctttgcccttacctatgaacacaaatgatctaacagcagaattggaaaaaatgaaacgtatactattggacttgagtgaaaaattcaatttagaactaatcatcaccaaagaaccagcttacttcacaccagaacagacaggcgagagcaaggaattatgtatttacgtgcatgcattaggattccgatctaatttaatggaatgcgaaccccagttattggcatttgtcgatttaataaagaagaatggtatgactttgcctccacaacactacattatcgaacctatggaactgaactcatactctgtgcttcccttatatatgggtgtagatatggaaaacttcaaacatatatccagagcttttaaaaccagcatttacgcaccttccctcattacgctgtctagggattttaaggcaaatccacaaatcttcttctcaggcgctgtccattcactaagtttactggctaggaaaactctacgtgagtccataagcgtgaattcaaagagttttttttatcgtcgattgactaatattaccccaggaaaactactgtttatccaaaaatactaccaacaaaaggtaaaccagttaattttgaaataccaatcgcttattagagttactaacgaatacattgaatttcaatcgatttccacgaacttattagaaatggttattaagaacttcactattcaagtattacatgaaattgtagaagtacagatttcactcaatgaaaactgcgcaatgtccccggaattaataatcgacagctttttcggacacactggaaaccaaattgtagtaataactcccaaagaggattccttcaaccaattaatagtagttggtaaccaatcttccacagatgaggcgtccgatacttccatattgcattacttatctgattttattatcggctcaaatcaagtgattaatccaaacttaagacagatgaaagccattttcgagatgcatcctgattttgaagacttcatatcaggcaagaaaaatggtaaattaacacgtataatggaactatctgcttgcttaattcaactggaaatggaagaggaagatgataacctttatttaaatttggttagtgactctttccctgatttcaaggaatcatttaagaatgttataaatgaatttcctgccgaagaatctttcttcattcctgaagtttgtcacagaccgattataggtacaggtggttccttaattcaagccacaatgagaaagcataacgtcttcattcagttttccaatagtttcaatcttccacaaaataaaatttctatgatcaggtatgataatgtgataattaggtgccccaggaaaaacaaagctaatatatgcctagccaagaaggatttaaaacaaattgttcaagaatatgatagtttacaatcgaagacgctcattagattttctagtgggcaatatagacatattttgcatgttaacggccaaaagaatattataggacaaatcgaaaagaacgaaaatgtttacataatgataccgttaaaagagcccttggatggaacatctcaattgagtatacaaggaaatgatgagaatacatcaagagccgctaacgaattggtcaatagtgcgtttggttatgaatacgagttcaaaatagatcaagagatagatcccaataaagaatacgaattttgtaacctaattgttgttccatttttgcaaattatgaacataattgtaacttttgagaaggaccttatcacttttacttttgaaaaggatactaatgagaatactctaacaaaagcaatcgaattactatccgattatttggaaacacaaaagacgaaaataatatttaaaaaaataattaaaaaatttgttctagggtctgcctccagcaagagtaacaccagtaatagcaataccaatggcaatttcagatcgatgaataatgccaaaagtcgtacgaccatcgataataccagccaatcaggagcctcaccacaacgccacaaaatgcctgttataacgacggtaggaggagcccaagccatcaaaggatatataccaaacacttattacaacggatatgggtatggatacggatatacatacgagtacgattataattatgccaactctaataagagctcaaaccaataa

SEQ ID NO: 82335 - DNA, 753 bp, Saccharomyces pastorianus
atgataaacacaggaagaagcaggaattcagtactgctggcacacagattcctttcaactggaggattttggcgaggcggtacgaatggcacaatgtctcgcacaatcaacaacgtaaatcctttcaaattaaaattcataccgaagacagtgcccgcagctgcagactctgtctctccagatagtcaacgtccaggtaagaagcccttcaaattcatagtttccaatcagagcaagagtagcaaggcttctaaaagcccgaagtggtcgagctacgcattcccctcgcgtgagaccatcaaatctcatgaggaggccatcaagaagcagaataaagctatagacgagcaaatagctgctgcagtatccaagaatgaccgctcttgcacagaacctcccaagaaaagaaagaggaaattgagaccaagaaaggcgctgatcaccctgagtccgaaggcaatcaagcatttaagggcactgctagctcagccggaacctaaattgattagagttagcgctagaaaccgtggatgttcaggactaacgtacgatctacaatatatcaccgagccggggaaattcgatgaggtagtagaacaagatggcgttaaaattgtcatcgattcaaaggcgttattcagcatcattggtagtgaaatggactgggtcgacgacaagttggcctctaagtttgtcttcaagaatccaaactccaaggcacatgcggttgtggcgagagtttcatggttttaa

SEQ ID NO: 82336 - DNA, 210 bp, Saccharomyces pastorianus
atggtcaaattaacttcaattgctgctggtgtcgccgctattgccgctggtgtcgccgctgcaccagctaccaccactttatctccatctgacgaaagagttaacctggttgaattaggtgtctacgtctctgatatcagagctcatttggctgaatactatatgttccaagccggtcatcaaatgaaacttacccagttgaaattgtga

SEQ ID NO: 82337 - DNA, 588 bp, Saccharomyces pastorianus
atgtctaaagctgtcggtattgatttaggtactacctactcctgtgttgctcacttttctaatgatcgtgttgacattattgccaacgaccaaggtaacagaaccactccatctttcgttggtttcactgatactgaaagattgattggtgacgctgctaagaaccaagctgctatgaacccagctaacactgttttcgacgctaagcgtttgatcggtagaaacttcaatgacccagaggtccaaggtgatatgaagcacttcccattcaagttgatcgatgttgacggtaagccacaaattcaagttgaattcaagggtgaaaccaagaactttaccccagaacaaatctcctctatggtcttgggtaagatgaaagaaactgccgaatcttacttgggtgccaaggtcaatgacgctgtcgtcactgtcccagcttacttcaacgattctcaaagacaagctaccaaggatgctggtaccattgctggtttgaatgtcttgcgtattattaacgaacctaccgccgctgccattgcttacggtttggacaagaagggtaaggaagaacacgtcttgattttcgac

SEQ ID NO: 82338 - DNA, 711 bp, Saccharomyces pastorianus
atgagtcgcactgcgtcatatgccggcatgacaactccggtgaaagataaggaaggccacgggattccatgcttacaacctatcgatgtagtggaatgtacctatcaatattttacaaaatcgcagaataaactgtctttaagggtaggcgatttgatttacgtactcactaaaggttctaatggctggtgggatggtgttcttatcagacacagcgctaataataataataattcgttgatactagacagaggttggttccccccttcttttacacggtccattctaaacgaactacacggggtgcctgaaatcggtaatgaattggaaatatttcaagcgggtcttaatcttaaactggaattatcaagcaacccagtgatcttatcattggaagactttttagactgctgtcgcgatattgaattcaaggaacaactggcttggtcacctattcccgtccacgagaggaaaggctgctgtaagctgctgtactacaaccaggatttagatgtttattgtcgcacgttaccatatttaccacaaaatcaagttgaaaccgtgaacgactattcgtcttttcctgcaatatcgaagatagctggtaaaaagatgcctataacgtcaagccccgatctgttctatctcaatgattgtgatgtcgtctattggtatgacctcactcgcttagtgtgtctttatgttaattaa

SEQ ID NO: 82339 - DNA, 1722 bp, Saccharomyces pastorianus
atgttgaattttgaaatgaacttcaaaacctacgaagaagtaagcggaacaattcctataattgatattctggaaaacctagatttaactatttatctaaacttgagagagttgggagatgagaatagagtttttgacgaagatgtcgctattgatgatgaagataaagagtttttgaaacattctttatcatccctatcgtatatcttatccgactattttaatatgaagcaatattttcatgatgtagtagtgaaatttataattgtcgcccagcatttgacattagaggatcctttcgttttctcgccaatgcaaaacgacttgcctaccggttattacgaaccaatgaaaccttcatccttgaatttagataatgccaaggataagaagaatgggagccaaaatactgatatccaagaggaggaagatgaatatgagccagacccggatagtcttattctcttccacaaccttatcaatcaagattctgatttcaatgatctaaagttttttaatctcacccacgtttgtaaaaaatcctgtgatgactattttgatgtgcttaaactatccattgagttcgtgaatcaattaattctagaaagagagaatttgttaaattatgctgctagaatgatgaaaaacaatatcacggaattgctattgcgcggggaagaaggctatgggtcctatgacggcggtgaaactgccgaaaaaagtgacacgaatgctgtttatgcagattcagatactaaagacaatgacgaatggcgtgacagccaagtcaagttaccgaggtatttgcagcgcgagtatgatagtgaactgatttggagctctaacaataggattaaaggtggttctaaacacgcactgatctcttacttgacagataatgaaaagaaggacttatttttcaatattacttttttaatcactttcagaagcatctttactacaacggagtttttaagctacttgatctcgcaatataatttggatccaccagaggatttgtgctttgaagaatataatgaatgggtgacgaaaaagcttataccggttaaatgtagggtggttgagattatgacaacctttttcaagcaatattggttcccgggctatgatgagcccgatcttgcgaccctaaatctggattattttgcgcaagtagcaatcaaggaaaatataacaggatctgtggaattactaaaggaggtcaatcagaagtttaaacatggtaatatgcaagaagcgactgcaccaatgaaaacgttagatcaacagatctgccaggagcattactggggcactttatactctaccacggaatccattttggccgtcgatccagttttatttgccacccaattaacgatactagagcatgaaatttattgtgagataaccatttttgattgtttacaaaaaatttggaagaacaagtatacaaaatcgtatggggcttcaccgggtttgaacgagtttatcagttttgccaataaactgacaaatttcatatcctactctattgtaaaggaggctgataaaagtaagcgcgccaagctactctctcattttatttttatcgcagaatattgtaggaaattcaataacttttcttccatgactgcaattatttcagcattatattcttcaccaatttatcgttcagagaaaacctggcaggcagttattcctcaaacgagagatctatag

SEQ ID NO: 82340 - DNA, 855 bp, Saccharomyces pastorianus
atgcctataacgtcaagccccgatctgttctatctcaatgattgtgatgtcgtctattggtatgacctcactcgcttagtgtgtcattatgttaatttaacagagcgcgacctattggcaaatgaacgggaaaagtttctaacttccttggatttattaacagctcaaataacctatgtttatatgcttttcaggaatctccgtttagttgaagatagttttaaaaaaaccctcaaaaaactaatttacaccttgtctaggttttcaataaatgcaaatatttggtttcattccacatcgtttgaagaaagagaagccatagcctcccagaaggatccagaaagaagatcccctcttctacagtcaatcctaggaaccttccaaaaatttcattttctactgcgtctactacatttcctctcaaatcctaacgaacttacaatactgcctcaattgactcctcgatttttcaaggattctttcaatacaatttcatggaataacccgtttttgcgtaagcgtctcaaccagcatatgtcccatgacctaccgagacagatgattaaagccgttgctggtgcttcaggaattgttgcggaaaatattgatgaaattccagcttccaaacagggcacttcatgctcgtcagaaacgtctcaccattcaccatcagccccgtttcaaagaaggagaagaggtaccattttctctaatgtgtcaggaagttccgatgagtctgacaccatatggtccaaaaggaaaaaaccatacccgctaaatgaagaaactctaagccttgtaagggccaggaagaagcagcttgatggtaaactaaaacaaatgatcaagtgctaa

SEQ ID NO: 82341 - DNA, 882 bp, Saccharomyces pastorianus
atggaaatgaacatggatatggatatggatatggaactcgcatccatagtttcttctttaagcgccctgtccaatagtaacaacaacggcggtcaggccgccgcggccggcattgtgaacggcggtgctgctggatcacagcaaattggcggcttcagaaggtcgagtttcaccacggcaaatgaagtagattcagagatcttgctgcttcacggttccagtgaatcttcaccgatcttcaagaaaaccgccctatcagttggtactgctccgccattctccacgaactcgaagaagttttttggtaacggcggcaattattaccagtacagatcaaccgacactgcctccctgtcatccgcatcgtacaataactatcatactcatcatactgcggctaatctcgggaaaaacaacaaggtcaaccatcttctgggccagtattcagcttccattgctggtcccgtttactacaatggcaatcacaacaacaactgtggtggggaagggttttttgagaagttcggaaaatctttgattgacggtacaagggaactggaatctcaagatagacccgacgctgtcaatactcagtcccaattcatatcaaaaagcgtctctaacgccagcttagacacacagaataccttcgagcaaaatgtcgagtctgacaaaaacttcaacaaattgaataggaacaccactaacagtggttcgctttaccgctccagttcaaattcaggctcatctgcgtctttagagtccgaaaatgctcattaccccaagagaaatatctggaacgtagccaacacaccagtatttagacctagtaacaatccagccgctgttggggccacaatgtcgcgcttcctaccaacaaga

SEQ ID NO: 82342 - DNA, 1215 bp, Saccharomyces pastorianus
atgaagatcaagaccattaaaagaagtgctgatgactatgtccctgttaaaagtacgcaggaatctcaaatgcccaggaatttgaaccctgaattgcatccttttgaaagggcacgtgaatatactaaagctttgaatgccaccaaattggaaagaatgtttgctaaaccctttgtgggtcagttaggatacggtcatagagatggtgtttatgctattgccaaaaattatggtagtctgaataaattggctactggttctgcagatggtgtgattaaatactggaacatgtctactagagaagaatttgtttcctttaaggcgcattatggactcgttactggtctttgtgtgacacagcctcgttttcatgacaagaagccagatttgaagagccaaaattttatgttatcttgcagtgatgacaaaactgtcaagctatggtcaataaatgttgatgattactccaataaaaactccagtgataacgactccgttactaacgaggaaggtttgattcgtacttttgacggtgaatctgcatttcaaggtatcgattcgcacagagaaaactccacgtttgccacaggtggggccaagatccatctttgggacgttaacagattgaagccagtttccgatctatcatggggagcagacaacattactagtttaaaattcaatcaaaatgaaacagatatcttggccagtactggtagtgataattctattgttctttacgacttgagaaccaactcccccacacaaaagattgttcaaacaatgaggacgaatgctatttgctggaatccaatggaggccttcaactttgtaactgccaatgaagatcataacgcctactattatgatatgaggaatttatcacgttcattgaatgtattcaaagatcacgtcagcgcagtaatggatgttgacttttctcctacgggggatgagattgttactggttcgtacgataagagtatcagaatatataagacgaatcacggacattcgagagaaatttatcatacgaagagaatgcagcatgttttccaggttaaatattccatggattctaaatatattatcagtggatctgatgatgggaatgttaggctatggagaagtaaagcttgggagaggtctaatgtcaaaactactcgtgaaaagaataaattagaatatgacgaaaaaattaaaagaaagatttag

SEQ ID NO: 82343 - DNA, 243 bp, Saccharomyces pastorianus
atgacgaaaaaattaaaagaaagatttagacatatgccggagatcaaaagaatcagtagacatagacacgtgccacaagtcatcaaaaaggctcaggaaattaagaacattgagttgagttctattaagagaagagaagctaatgaaaggcgtactagaaaggatatgccatacatttccgaaaggaagaaacaaatcgttggtaccgtgcacaaatatgaagattcaggaagagggaccgag

SEQ ID NO: 82344 - DNA, 1026 bp, Saccharomyces pastorianus
atgggtttcatatcgtcaatactgtgctgctcttccgagacgacacaatccaattccaattctgcttatcgccaacaacagagcagttctctcaataaaaacagaagcgttaaacattccaacacgaaaagccgaacccgtggcgtacatcagacaaactctcctccttctaagacaaattcagccgctactttcagttccactgaaccatccaccggtaaatctgggataagcacgaacgataatgaaaaaaagaagccatcgtcgccgactgcagccgtcaccgccactactactaataatatgacaaaagtagagaagcgaattagtaaagatgatctttacgaggaaaaatacgaggttgacgaagatgaagagatcgacgatgaagataaccgtcgcagccgtggcattgtacaggaaaaaggagatgctgtgaaagatacttccaggcagaaaaaacaacagcagcaacaacaacaacagtcacagtcacagtcacagtcacagtcacagtcacagtcgcagtcgcagcagcgagggcctactgtacaagtatcgtctgaccatcttatccaagatatgaatttgagtagggtaagtagcagctctcaagccagtgaaacttccaacgatgccgacgacgaagacgatgaagatgaagaatatattgatctaacgcttttgcagcagggccagtatcatgcgccaggttacaacactctgctccccccacaagatgaaagtacaaagggcaagaaatgcctaatactggaccaggatgaaaccttggtacactcttctttcaaatacttacgatctgcggattttgttttgcctgtggaaatagatgaccaagtacacaatgtctatgtcattaaaagacctggtgtggaagaatttttggaaagagtcggaaaattattcgaggttgtagtcttcacggctagtgtctctcgatacggtgatcctttgcttgatatattagacacagataaagtcattcatcacagattattcagaggg

SEQ ID NO: 82345 - DNA, 1449 bp, Saccharomyces pastorianus
atgaacatggcaatccaaacaattaaatacattttttggctactgccgatattagggcttacacaagcacttctacaaaacccaggggacgattttccatttagcacagtaatagatatcctctcagaaaatgttgaattctcaacttttttaaggattattcagaaaactggtcacgtacagtacttaaatgagctgcagaactttacactttttgctccgattaattcagcatttattaagggggaccaaaccacagaccaatttgaggagcatttccatattgaagatttccttattcatgatagggtattgcaagtgagagaccttgaaaacggtacctacctggagaaaagagctgcaaaagcacctttattgctgagaaagcatgagcgccattgctttgtcaatgaaattgctgttgtcgaacccgatttgctgcctagtttccagaatgcttcattacaaggtattaacaatcttttactaattcaacctcaaataaatgagttgctggtacaactagacgaagaaacccaagatttaaagatatttagtgattttatcagcagtttttcaaactataatgcatatacaaactcatccacagttttagtgcccttagatgttaattttcgaaaattcttcaatacaatcgaaataaactatctacttgacaaatataataaattgggtaaatctaatacaatttctcaggccaaatgggccgcagatagaacttcccttcttcaagaactcattattgatgacgtgtatggtggtattttacccaaggaactaattttagaaaataaaaacagtcgaaaactttttatgaagagtaattcagaaggtacatcagtaagtgtaaataattcagattactcacccatatcaaacagaatttttgaaataggcgtcgtgcatggattttctgacttagactttttacgaacgcatatacagtttgatgctgaaaagtacttgcacggtttgaactgctcagaattcgtaaaggagttatacttcagagaccttgaaaaattcattcaaaacggaaggaaaatcaccatatttgtaccacaagcctcttttaatgaggatcgtgggtacacaaaaccatcacttctgtaccattttgtagaaggtaaaattgaccttgaacaggaattttcctcattgcgcccgattcaatacgcacctacccaaatttatgactccgccttttgctcttcagctaaaagactaggtggacactgccaaaagttcaaaatcacaaggtctaataaaggttattacatcaatggtcgcttcaagattttaaacacaaaaccttatgagattggtaatacgtccatttattctatggacgatgatcttcaattaccgggcgacttagtgttgtcgttagcaccagaaaaccactgttctatttccctaatgctctga

SEQ ID NO: 82346 - DNA, 543 bp, Saccharomyces pastorianus
atgtttcacagacgcaaaagaccttataacaccagaaattatggccatgatgacaagaaattcaaatcgcagtacatcgatattatgccagacttcagcccttccggtctgttagagctggagtcgaataacaaagaaggtatagctttaaaacatgtggagccgcaggacgctatttctccagataactacatggatatgctaggactggaggcgcgagataggactatgtatgaactagtgatatacagaaagaatgacaaggataaaggaccgtggaaaagatacgatttgaacggcaggagctgttatttagtcggtcgtgaactggtccacagtctggatacagatctcgacgatagaacggagatcgttgtcgcagacattggtatacccgaagaaacatcctcaaagcagcactgcgtcatccagttcaggaacgttcgtggcattttgaaatgttatgtaatggatttggattcgtccaatgggacatgtttgaacacgttgtattcctggagcgagatatatagagctacgtag

SEQ ID NO: 82347 - DNA, 606 bp, Saccharomyces pastorianus
atggaagattctgacctgtctataaccaatataagagattttcttaccgagctccccaaactcgcgaaatgcgaatatagcgaaaccactagttatttactatggaaaaccttaaatctacgccttaagcatagtgataacgatataaactggcgctctctcgtttcaatactcaattctgaagcctgggaaaacgaaaagtacagagacatactaaatggaagaaagtggaggaccctggagttcgagaatgaccaccactctgtgggtaatatgcatattggaacagcgtgtacgcgtttatgcttcccctctgagacaatttattactgttttacgtgctccacaaatccattgtatgaaatatgtgagctttgtttcgataaagaaaaacatgtaaatcattcttatgttgctaaagtggtaatgcgcccagaaggcagaatatgccattgtggtgacccctttgcctttaatgacccaagcgacgcgttcaagtgcaagaacgaattaaataatattcctatttctaacgacaatagtaacgtaaccgatgatgaaaacgtaatctccctattgaattatgttctggattttttaaattga

SEQ ID NO: 82348 - DNA, 183 bp, Saccharomyces pastorianus
atgcatcctaatcaaaacagcattactgatgatataatggaaaaacacgaatgtgaaccattggtcaatgatggaaatttgttttctttgataacaattggtccaatacgagaaaagaagcacatatggagtgggctattcaaatcgaagaagaagagtgtaacgtacactacatggatttag

SEQ ID NO: 82349 - DNA, 1947 bp, Saccharomyces pastorianus
atggagtgggctattcaaatcgaagaagaagagtgtaacgtacactacatggatttagcatctacaataacaagaattttgaatacaccggttgaatatgcaatctcaataacaaaggctttagaagattcacacgatgtagtgactgtgctacaaagtgagaattttttcgaaatagatcaaatagccaaggagtttcaagaggaaaacatagtagttcatgtaagaaaagcggatgatatattcaagagaaagttaacagatgatttaacagattggttatattctctgtgctttaaggcggccacgtctttgcaaaataaatatgctcttagaatttccatgctagatgtttggtattcccatttttctaaaatgagagtatctcccacaaataccaatcctgacttttctaagattaacttattaggtggattcttaatatctaacgaagatagtgatgaatcatggtttaaaccttggtcattagagaactttgaagacgaaagagtttcaaaaatactcactaattacaatgaaaggttgatcagagcccattcgccgaacacagtaagccatttctacaatttctatggatctagattccaatatattatcatcaattctattaatatcctctcaaaaaaatctaaattcaaaatgttaaagatcatggcgtcattattctcgttaagggatgaaagcagaaagtttcttgccgcacaatatattgatgtttatctatcggtcttgtatgatgcagttgcatcagatgctaaagaatgtcaggtaactcttatgagtatattagggcaatacactttccaagaccccagcatagcaaatatgactataagctcgggattcattgaacgaactattagatttgcttttactctcatggcattcaatccagaagacttgatgtcatatttgcccatctctttatacaatggctttaagttgcccaccgaaacaatacgaaatcgaaggacaattatttgctttaaagacctttgtacgataatgtcagcgaacactgttccggaagaactactttcaaatgaggcaatttttaacgcaataattgagtccttctctgaattcagtaacgtgctgccattgaaaagggaaactaaagaacacgtggaggttgaaaactttgatttttctgcattttatttttttttctcatcaatactaataatgacagatggatacacacgtagtatatctttggtcaaagatgcggctttccgtaagcaaatcgtccttaaactacttgatgttgctcaaaccagggaatttgaatcactaaccaattctagaaaagctatatcacctgataacgcatcaacgaatgaaaatgattcgaacaaagcgactttgtctacagtcagagagacgatatgcaattatgtcgcagagactattaatttccaggtaggtgtaaatacacagtattttttcaatccaatgtcatatttgttcaaatttgttattcaatggagtcaatgtggtagatatgagccaatgcctgcttctttgacaaactacattaatctcttcgaagtttttcaagataagcagaaggctttatatatatcagaatctgctttgtcaaccctagtcctaatcgggcaaataaacgtcggtttctgggtaagaaacggaactccaattactcaccaggcccggatgtatacaaaatacagtatgcgagaatttacttatattagtgacattttcaatgtgcaatttagtatggcaatgtgcaatcctgatgaactgatggttacttacctctcaaggtggggtttgaagcactgggcaaatggtgtacctatgtatgattatcctgatacagaaacaactgtagccgttgttaatgaatgcattctgtcatcgattcaattgcttactgaagtgagatcattggtcatgaaa

SEQ ID NO: 82350 - DNA, 1251 bp, Saccharomyces pastorianus
atgaacaaaagaacacaggaatacaagaacacaagagcgataatgtctgccactctgttcaataacatcgaattgctgccccctgatgccctttttggtattaagcaaaggtacgggcaagatcaacgtgctaccaaggtcgacttgggtatcggggcctacagagacgacaacggtaaaccatgggtcttgccaagtgttaaagccgccgaaaagctaattcataacgacagctcctacaaccatgaatacctcggtattaccggtctgccaagtttgacatctaacgccgccaagatcatcttcggtacgcaatccgatgccttgcaggaagacagagtaatctcagtacaatcactgtctggtacgggtgctcttcatatatttgcgaagtttttttcaaaattcttcccagataaactggtctatttgtctaagcctacttgggccaaccacatggccatttttgagaatcaaggcttgaaaacggcgacttacccttactgggccaacgaaactaagtctttggacctaaacggctttctaaatgctattcaaaaagctccagagggctccattttcgttctgcactcttgcgcccataacccaactggtctggaccctactagtgaacaatgggttcaaatcgttgatgctatcgcctcaaaaaaccacatcgccttatttgacaccgcctaccaagggtttgccactggagatttggacaaggatgcctatgctgtgcgtctaggtgtggagaagctttcgacggtctctcccgtctttgtctgtcagtcctttgccaagaacgccggtatgtacggtgagcgtgtaggttgtttccatctagcacttacaaaacaagctcaaaacaaaactataaagcctgctgttacatctcaattggccaaaatcattcgtagtgaagtgtccaacccaccggcctacggcgctaagattgtcgctaaactgttggaaacgccagaattaacggaacagtggcacaaggatatggttaccatgtcctccagaattacgaaaatgaggcacgcattaagagaccatttagtcaagttgggcactcctggcaactgggatcatatagtaaatcaatgcgggatgttctcctttacaggattgactcctcaaatggttaaacgacttgaagaaacccacgcagtttacttggttgcctcaggtagagcttctattgctggattgaatcaaggaaacgtggaatacgtggcttaa

SEQ ID NO: 82351 - DNA, 207 bp, Saccharomyces pastorianus
atggtcaaactaacttcaattgttgctggtgtcgctgctattgctgctggtgtcgctgctgccccagccaccactactttatctccctctgacgaaagagttaacctggtcgaattaggtgtctacgtctcagatatcagagctcatttggctgaatactatatgttccaagctgctcatccaactgaaacttacccagttgaaatt

SEQ ID NO: 82352 - DNA, 1551 bp, Saccharomyces pastorianus
atggtgatggcacatttttgcattaacctagctgtcctcgttgaacataggaaaaaaaatatatataaacaaggctctttcactctccttgcaatcagatttgggtttgttccctttattttcatatttcttgtcatattcctttctcaattattattttctactcataacctcacgcaaaataacacagtcaaatcaatcaaaatgtctgaaattactttgggtaaatatttgttcgaaagattaaagcaagtcaacgttaacaccgttttcggtttgccaggtgacttcaacttgtccttgttggacaagatctacgaagttgaaggtatgagatgggctggtaacgccaacgaattgaacgctgcttacgccgctgatggttacgctcgtatcaagggtatgtcttgtatcatcaccaccttcggtgtcggtgaattgtctgctttgaacggtattgccggttcttacgctgaacacgtcggtgttttgcacgttgttggtgtcccatccatctctgctcaagctaagcaattgttgttgcaccacaccttgggtaacggtgacttcactgttttccacagaatgtctgccaacatttctgaaaccactgctatgatcactgacattgctaccgccccagctgaaattgacagatgtatcagaaccacttacgtcacccaaagaccagtctacttaggtttgccagctaacttggtcgacttgaacgtcccagctaagttgttgcaaactccaattgacatgtctttgaagccaaacgatgctgaatccgaaaaggaagtcattgacaccatcttggctttggtcaaggatgctaagaacccagttatcttggctgatgcttgttgttccagacacgacgtcaaggctgaaactaagaagttgattgacttgactcaattcccagctttcgtcaccccaatgggtaagggttccattgacgaacaacacccaagatacggtggtgtttacgtcggtaccttgtccaagccagaagttaaggaagccgttgaatctgctgacttgattttgtctgtcggtgctttgttgtctgatttcaacaccggttctttctcttactcttacaagaccaagaacattgtcgaattccactccgaccacatgaagatcagaaacgccactttcccaggtgtccaaatgaaattcgttttgcaaaagttgttgaccactattgctgacgccgctaagggttacaagccagttgctgtcccagctagaactccagctaacgctgctgtcccagcttctaccccattgaagcaagaatggatgtggaaccaattgggtaacttcttgcaagaaggtgatgttgtcattgctgaaaccggtacctccgctttcggtatcaaccaaaccactttcccaaacaacacctacggtatctctcaagtcttatggggttccattggtttcaccactggtgctaccttgggtgctgctttcgctgctgaagaaattgatccaaagaagagagttatcttattcattggtgacggttctttgcattga

SEQ ID NO: 82353 - DNA, 606 bp, Saccharomyces pastorianus
atgtcaggagaagaagaagtagattatacaacgttacccctagaagagcgattaacgtacaagttatggaaggcacgtttagaagcttataaggagttaaaccagctttttagaaactccgttggcgacatcagtagggatgacaacatacaaatttactggagggatcctacattatttgcacaatatataactgattctaatgtggtcgctcaagaacaagccattgttgccttgaatagtttaatagatgcctttgcgtcatcgtctttgaaaaatgcacataatattactttaatatcaacatggacaccattgcttgtggaaaagggcttaacgtcctcaagggctacaacgaagacgcagtcgatgagctgtatactctcactatgtggtcttgatacatctattacgcaatcggtggaattggtaataccctttttcgagaaaaaactgccaaaattaattgctgcggcagtcaattgtgtttatgggttgatggctgcattcgggctcactaatgtgaacgttcaaacgtttctaccagaattattaaagactctagagatccccggtaccgagctcgaattcgtaatcatgtcatag

SEQ ID NO: 82354 - DNA, 114 bp, Saccharomyces pastorianus
atgtcactacattcacaggctgtagacatcgcgtcacagtcacaaagcttgccaaaggatgcttgtagattaaaggacttcaaagccaaggtcgacgaaggctctgatgtttag

SEQ ID NO: 82355 - DNA, 654 bp, Saccharomyces pastorianus
atgccttacactctatccgacgctcatcataagttgatcacctctcatttggtggacaccgaccctgaagtggactccattatcaaggatgaaattgaaagacaaaagcactccatcgatttgattgcttctgaaaatttcacctcaacctccgttttcgatgcccttggaactccattgtccaacaaatattctgaaggttatccaggtgctcgttactacggtggtaatgaacacattgacagaatggaaattctatgtcaacaaagagctttgaaagctttccatgttactccagacaaatggggtgttaacgtccaaactttatctggttctcctgctaacttgcaagtttatcaagctattatgaagcctcatgaaagattgatgggtctatacctaccagatggtggtcatttgtctcacggttacgctactgaaaacagaaaaatttctgctgtttccacatacttcgaatctttcccatacagagttaacccagaaaccggtattatcgactacgatactttagaaaagaacgccatcctatatagaccaaaggttcttgttgctggtacttcagcatactgtcgtttaattgactacaagagaatgagagaaatcgccaacagaatctggtgcttacgtgagtag

SEQ ID NO: 82356 - DNA, 891 bp, Saccharomyces pastorianus
  modified_base (792)..(827): a, c, g, t, unknown, or other
atgaagtggttgttgtttccggcaagaatcgtagctcgcactcgcccaaacttcttctcgctgtacagaagatccgtttcacagtacttacgtcctcgaaccatccaaaacctgcaatcaatggcgcaaacacccgaacttaaaaccaagctgttcaaacccttggtctggatcgactgcgagatgaccggtttagaccacgtgaatgacagaattatcgagatttgctgcatcatcaccgatggacacctggcacccgtcaaagcggccgatggccaaggagactcgcattatgagagcgtcatccattatggtcccgaggtgatgaacaaaatgaacgagtggtgtatcgagcaccacggtaatagcggtctcaccgccaaagttttggcaagtgagaagactttggcccaggtagaagatgagctgctcgagtacatccagcgctacatcccagacaagaacgttggcgtcttggcaggcaatagtgtacatatggaccgcttgttcatggtccgcgagtttcccaaggtcattgatcatctcttttacagaatagttgacgtcagtagcatcatggaagttgcccgcagacacaatcccgctttacaagcacgtaatccaaaaaaagaagctgcccacactgcttatagtgatatcaaagagagcatagctcaattgcaatggtacatggacaactacttgaagccaccacaggaaacagagtcggtcgagtcaatcggatctgaacagccggagtcaccatcttcatctacctcatctttgaaaagnnnnnnnnnnnnnnnnnnnnnnnnnnnnnnnnnnnnagaaaaaagaagtgaaatttttcaaatatttcacacacgaaacatgactcctggtgagaaatga

SEQ ID NO: 82357 - DNA, 81 bp, Saccharomyces pastorianus
atgaaaaggtgtgctcctgccgtattaagaaattataattataagaagggtatatggagtacggcgtacctgatcatataa

SEQ ID NO: 82358 - DNA, 669 bp, Saccharomyces pastorianus
atggagtacggcgtacctgatcatataaggaagctgcttcgagataaatcgacgtcaccattatgctcacaggatgagagaaacctggtctcatattttatggcgcgcggaaatgttcctctaaagtcggttggcagtggattaacaaagaaagcaacaacatcaataacaagtaattcagctaccacaacatttgaacgacagtaccttataaagtatctttatcggcaccaggcctatgggaacgttataaaaattgcacagaagtttctttataccactattggttcacaaagattgttaaaacaggatgcctcattacctgaattgaaaaagttccttctctctttattgattttacaaagaggtattcaattagatcaggcaatctctgatatcatacaacggtttctattaacacaaaagacaatggtgatagacctcattaactcgattttctctaggatggttataatgaatatgcatgaagaagctgtatataaatgggtcaaatggatgaaactagtgaatggacattgtgaatttacgaattatatggagaacaagatagttttgagaaactttttatcattcatgaggcaatcaaatgttcgccccgattatttatcttatttgaaagcaattcagctaacgcagggcccgcaatag

SEQ ID NO: 82359 - DNA, 549 bp, Saccharomyces pastorianus
atgtatactatggccagaattggtgaattggatagtgtcaataaactatatacacagttattgaggagaggtatgataccgacatacgccgttttacaatctttactatatgcacattataaagtcggagatttcgcagcctgttttagccacttcgaactattcaagaaatacgacataacgccttcaacagcaacgcataccataatgcttaaagtgtatcgtggtttaaatgaccttgatggtgcgtttaggatattaaaaagactaagcgaggatcctagcgtggaaatcacggaggggcactttgctttattgatacaaatgtgttgcaaaactacgaaccatttaatcgctcaagaattattcaaccttatgactgaacattataatatccaacacactggaaaaagtatctctgcattgatggatgtatatattgagagtaacaggccaacagaggcaatagcattatttgaaaaacattcaaagaatttatcttggagagatggtctaatttcagtgtataaccaagccatcaaagcttat

SEQ ID NO: 82360 - DNA, 624 bp, Saccharomyces pastorianus
atggcatggccaatgagaatgattgtgaaacatgatagcccacagcgggctttagagttatacaaccggtacaatgagcttttcttcaaaaagcatgattggatatcaaataataataaatttgtgatgatgagatcattgttggtattactagctcaaattgaacaatggaaagatttcgaaacacttttcgctaaatacatggatcgtattgaaaacattgaaaacttgccatcatctacaacgccaaatattaaactaagaagcatattcagcggattgttcccttataaagtaagtcagttgattgcaatgaataaaatcgatgagctgccattactgtggaagaaattgcgagaaaaaggttttattttagataatatatcgtggaacagcgctgtagaagcgttatttaaggatccaagaaccctttcgtatggtatgaaaatcgttgatgacacactaattcatgggtataatttgatccataaatttagactattaacgaaactatccgaggataagacgcagtccagtgataaatcttggccaacattaaaaatgaaggaaaaagagcccaatcaatttcagcccagactatacttcaaaagcgatacatataca

SEQ ID NO: 82361 - DNA, 990 bp, Saccharomyces pastorianus
atgactaccacgataggatccccacaaatgctggctaatgaggagagactttctaacgagatgcacgcactgaagaaccggtccgagcagaatgggcaagagcaacagggtcccgttaagaacactcaactgcatagcccttctgcaaccgtcccggaaactacggccacccaaaaagaatctctagaaatggtaccgaaagatacaagtgcagcgactatgacaagtgcgcctccgccagcgttgccgcatgttgagattaatcaagtcagtctggcattagtaataaggaacttgacggtatttacaatgaaggaacttgctcagtacatgaaaactaatgttcacacccaggcaaatgagcctaactccgcaaagaaaatacgtttcttacagctgattatattcctaaggacacaatttttgaaactttacgtgcttgtgaaatggacccgtactataaaacaaaacaactttcacgtactaatcgatctgttgaactggtttagaacgactaacatgaatgtcaacaattgtatttgggctttgaaaagcagtctaaactctatgaccaatgctaaattgcccaacgtggatttggtcaccgctttggaagttttgagtcttgggaggccaaatctacctacacacaactttaaattaagcggtgtcagtaactctatggatatggtagatggaatggccaaagttcccattggattgattttacagagattaaaagatttgaacttgactgtctcaataaaaattgcattaatgaacattcctaaaccattaaacagctatcatatcaaaaacggtagaatctactttactgtccctaatgaatttgaaatccagttatcgactgttaatagacagtcccctctgttttttgtggatttaaaattgttgtttaacacggaagctgacaaactgtttcagcagttacaggacctgcaggcatgcaagcttgcactgccgtcgttt

SEQ ID NO: 82362 - DNA, 537 bp, Saccharomyces pastorianus
atggctagaagaccagctagatgttacagataccaaaagaacaagccttacccaaagtctagatacaacagagctgttccagactccaagatcagaatctacgatttgggtaagaagaaggctaccgtcgatgaattcccattgtgtgtccatttggtttccaacgaattggaacaattgtcttctgaagctttggaagctgctcgtatctgtgccaacaagtacatgactactgtctccggtagagatgctttccacttaagagtcagagtccatcctttccatgtcttgagaatcaacaagatgttgtcttgtgccggtgcggatagattgcaacaaggtatgagaggtgcttggggtaagccacacggtttggccgctcgtgtcgacattggtcaaattatcttctctgtcagaaccaaggacagcaacaaggatgttgtcgttgaaggtttgagaagagccagatacaagttcccaggtcaacaacagattattttgtctaagaagtggggtttcaccaacttgcacagacca

SEQ ID NO: 82363 - DNA, 177 bp, Saccharomyces pastorianus
atgtttgaaaagaacttaagcttgagcagcaaagtattctgggaattctctgatgttgttttccaaagaacccttcttggacaagaacttaacgaaagcaccgtcgtccttgacttcaccagcttctctcttcttcaagtattctggtctgtccaagttggtgaaccccacttctag

SEQ ID NO: 82364 - DNA, 1122 bp, Saccharomyces pastorianus
atgagtgaaaagtctctagagaagaaccgaacaaataaattattagaggtagcagctttagcaaaggtaaaaactgtcagagtgactgttaaccagaagaaaaatccagacttgtctgaagatcgtccccctgcactgtcgctagggattgagggtttcgaagtatggtcttctacagaagatagacaagttaactcattaaacttaacgtcatcagatattaccatagacgaatctcaaatggaatggctgtttgagtactgtagtgaccagggaaatcttattcaagaggtttgcacttcttttaattctattcagaacactagaagtaattcaaaaacagaactcatttcaaagctcacagccgcaagcgaatattatcaaattagtcatgatccttacgtcataacaaaacctgcctttattatgagactctccaaagggcatgtacgtgagaatcgtagttggaaaattattacgcgtctgagacatattttaacgtaccttcctgatgattggcaaagcaacatcgacgaagtgctaaaagaaaagaaatatacctctgctaaagatgcaaaaaatatcttcatgtctgtgttttcgacttggagaaattgggagttctcagatgttgcaaggtcgtatatatatggcaaattattcacggcagaaaatgagaaacataaacaaaatttgattaaaaaattgttgaagtgtaccatgggatcattttaccttactgtttatggtgagggatatgaggttgagcataattttgttgttgcggatgccaatctggtaatggatttgacgcctccggtgacaagcttaccttcaaatcgagaagagaccattgaaattacgggaagagtaggctcagtaaaaggaaaattcagtgataggttacttaaattgcaagatcttattccactcattgcagcagtgggcgaagatgacaaaagtgatccaaaaaaggagttatcaaagcaattcaaaatgaacaccgttttattagtggataaaagtgaactgcaactggtcatggaccaaacgaagctgatgagtagaacagttgggggtagagttagtttactatgggaaaatctaaaagattcaactagt

SEQ ID NO: 82365 - DNA, 2868 bp, Saccharomyces pastorianus
atgctgctactttctctgaccaatacgaataacggtatgttaccagaagaaaccaaggttacgggacagttttccatcgaaaacatcctatttctaataaaggagcggtcactacccattggtctttccaaattactcgacttttccataaaaatatcaaccctacaaggaacggttgatacggagcagtcattccaagtggaaagttctcatttcagggtctgcttatctcctgattctctattaagattaatgtggggtgcgcataaattgctagacttgagccattactattcaagacgccatgcccctaatatttggaacactaagatgttcaccggtaaaagtgataagtcaaaagaaatgcccataaatttccgttcaatacacatcctgtcctataaattttgtattgggtggatattccagtatggagcaggctccaatcctgggttaatgttaggttataacagattgttttcagcatatgaaaaggattttgggaaattcacagttgtggacgcttttttctctgttgcgaatggtaatacctcaagcacttttttctctgaaggaaacgagaaagacaaatataatagaagtttcttgccaaacatgcaaatatcctactggttcaaaagatgtggtgagttgaaagattggttttttagatttcatggtgaagcactggatgtaaactttgtcccgtcattcatggatgtcattgagtctactttacaatccatgcgagcatttcaagagctgaaaaagaacattctggatgtgtccgagagtttgcgtgcggaaaatgataattcttatgctagtaccagtgtcgaaagtgcttcgagtagtttggctccctttctcgataacattagatcagttaactcaaacttcaagtatgacggtggtgtatttagggtttacacgtacgaagatattgaaaccaagagtgagccatcttttgaaataaaaagtccagtagtcactataaactgtacatataaacatgatgaagataaagttaagccacataaattcagaacattaatcactgtcgacccaacgcataatactttgtatgcaggatgtgctcctttattaatggaattttctgaaagtctgcaaaagatgataaagaaacatagcaccgacgaaaaaccaaactttacaaaaccttcttcgcagaatgttgattataagcgacttttggatcaatttgatgtggctgtaaaactaacatcagccaagcaacagttaagtttgagctgtgaaccaaaagctaaggttcaggcagatgttggatttgaatcgtttttgttcagtatggctaccaatgagttcgactctgaacagcctttggagttttctttaactctagaacgcacaaaagcgtccattaagcacatattttcaagagaagtaagtacgtcctttgaagttggtttcatggacttgacgcttttatttacacatcctgatgtaatcagtatgtatggaacggggttagtttctgatctaagcgtcttcttcaatgtaaagcagatccagaacctgtatttatttttggacatatggaggttcagtagcattttacacacacggccagtgcaaagaactgttaataaggaaattgaaatgagttcattaacatcaaccaactatgccgatgcaggtacggaaataccctggtgctttacattaatttttacaaatgttagcggagacgttgatttgggtccttctctcggtatgatttcattaaggacacaaagaacatggctggccacagatcattataacgagaagcggcagttactgcatgctttcactgacggtattagcttgacatcagaaggtagactgagtggtttatttgaagttgcgaatgcaagttggttatcagaagtaaaatggccacctgaaaaaagcaaaaatactcatccattagtttccacctccctgaatattgatgatatagcggtaaaggctgcttttgattatcatatgttcttaatcggcactataagtaacatacacttccatcttcataatgaaaaggatgccaagggggttctacctgatttgctgcaggtctctttttcatcagatgaaattatcctcagctctactgcattagttgtagcaaatatactggatatctacaacaccattgtacgtatgaggcaggataataaaatatcgtatatggagacgttgagagattccaatcctggtgaatctaggcaaccaatattatacaaagacattttaagatcgctgaaattactcagaactgatctctcagtgaatatctcctcttcaaaggtccagatttcgccaatatctttattcgatgtggaagtgttagtaataagaattgacaaagtctctatacgttccgaaacacattcggggaaaaaattaaagacagatttgcaactacaagttttagatgtttctgcagcgctttctacttccaaagaagaattagatgaggaagttggagcttccattgctattgatgattacatgcattatgcttccaagatcgtcggtggtactatcattgatattccaaaacttgctgttcatatgacaactttacaagaagaaaagacaaataatttagaatatctatttgcttgctctttttcagacaaaatatctgtaaggtggaatctagggcctgtagacttcataaaggaaatgtggactacacatgtcaaagcactggcagttcgtcgatcccaggtagcaaatatttcctttggacaaactgaggaagaacttgaagaatcaattaaaaaggaagaagccgcttcaaagtttaattatattgcactagtaggaccgcaggattga

SEQ ID NO: 82366 - DNA, 2607 bp, Saccharomyces pastorianus
atggaagctatttcacaattacgtggtgttccattgacacaccaaaaggactttagctgggtctttttagtagattggattctcacggtggtagtatgtttgacaatgatattctacatgggaagaatctatgcataccttgtaagttttatattagaatggctactatggaaacgagcgaaaatcaagataaatgttgagacacttcgtatctccttactaggtggtcgaatacattttaaaaacctttccgtaatacacaaagattatacgatttcggtattagagggtagtttaacatggaaatactggcttttaaattgcagaaaagcagaattgatagagaatgacaagtcttcttctggcaaaaaagcaaagcttccgtgtaaaatttccgtagaatgtgaaggtctagaaatttttatttacaacagaacagtggcgtacgataatgttataaacttactatcaaaagatgaacgcgataaatttgaaaaataccttaatgagcattcttttcctgaaccttttagcgatggaagtagtgctgataaattagatgaagatctaagcgaatctgcatacacaacgaactctgatgcatcaattgttaatgacagggactaccaagaaacagatatcggcaaacatccaaagctactgatgtttttaccaattgagcttaaatttagccgcggttccctactgttaggaaacaaattcacgccatctgttatgattctaagttatgaaagtggaaaaggcataatagatgttttacctccaaaagagcgattagatttatacagaaataaaacacagatggaattcaaaaacttcgaaatttctatcaaacaaaatattggttacgatgatgctattggattgaagtttaaaatagatagagggaaagtgtcaaagttatggaaaacgtttgtacgagtctttcagatagtaaccaagcctgttgtaccgaaaaagactaaaaaaagcgcaggcacatcagatgacaatttctatcataaatggaaaggtttatctctttataaggcttctgcgggcgacgctaaagcaagtgatttagatgatgttgagttcgatttgacgaaccatgaatatgctaaatttacatcaattttaaaatgcccaaaggtcacaattgcatatgacgtggatgttccgggcgttgtgccacatggtgcacatccgacaatacctgatattgatggaccagatgtgggcaataacggagcacctccagattttgctttagatgttcaaattcacggaggatccatctgttacggaccttgggctcaaagacaagtcagtcatctccaaagagttctatcaccggtagtttcaaggacagccaaacctataaaaaaactcccgccaggttctagaagaatatatacacttttcaggatgaatatatcaataatggaagatactacttggcgtataccgacgagggaaagtagcaaagaccccgaatttttgaaacactacaaagaaactaatgaagaatataggccatttggatggatggatctccgattttgtaaggacacctatgcaaatttcaatataagtgtttgtcctacagtgcaaggttttcagaataatttccatgttcatttcctggaaaccgaaattaggtcaagtgttaatcacgatattttgttaaaaagcaaggtattcgatattgatggggatattggatatccattgggttggaatagcaaagctatatggataattaacatgaagtcagaacaattagaggcgtttctgctacgtgagcatataactttagttgcagatacgctttcagacttttccgctggcgatcctacgccttacgaactttttagaccattcgtatacaaagtcaattgggaaatggaaggatattccatttacttaaacgtcaatgatcacaatattgttaacaatccgttagattttaacgaaaactgttatttatcccttcatggtgataagctttcaattgatgtcacggtaccccgtgagagtattttggggacatacacagatatgtcctacgagatctcaactccaatgttcagaatgatgttaaatacccccccttggaatacattgaacgaattcatgaaacataaagaagtggggagagcatacgactttacaattaaaggttcttaccttctccattctgagttagatattgataatgtcgatacgctagtcatagagtgtaacagcaagagtacagtacttcactgctatgggtttgtcatgaggtatttaacaaacgtaaagatgaattacttcggtgaattttttaattttgtgacgtcagaagagtacacgggtgtccttggcgctagggaagtcggagatgtcactacgaaaagctcggtggcggatttggcatctactgtagattcagggtaccaaaatagcagtctaaagaacgaatctgaggataaaggtcctatgaaaaggtcagatttgaaaaggactaccaacgaaactgatatttggttcacattttcggtttgggatggtgctctgatattacagaaagattacagtttgatcatgcatgactacatttgc

SEQ ID NO: 82367 - DNA, 1131 bp, Saccharomyces pastorianus
atgctgctggacgtgaacacaaatcacacactaatgcacgatgctcatgtgcatgaacattgcctcatcaaaagcatacgtgatgatggcgcattgcactcatggagcgactcatcaaaggtattttatcccaagtcattttacgctaccgctactaataagaagaataacaagttagccagcgccagcatgaacaagaccgccacaagtaataggacggtgagcgatgagatttatttccactccaccgagccgcagttcgatggtcaaggaagcgctgaacgtactagaacactaaccaagaggaatagcttcaagaggactagaatactgaaggctcgagacgattccgaactgctgaacgaaaatcgctcatctttgatgaccccgtccttaagctcggtcatgtcgcaagttaggaaaacaaattccgccaagacgttatcgggcgaatgccccatacatgagggccacttaacacagagcataaagaggaagttctccgaggaagctcaaagcgactgttcttcattgagctcctctaaacttcatcccttgacagatgatattgctgacgctgtcgatttgcagacccccgcgattagcgatgaggtactggctgagccggtcgtgcccaaaatgaaaataataaacataaatgatctcgatttgttcgacgactgggaggttaaggatttagtcgatatcttccctcccgtatacgaacggcgtccgcgatcgtcctctgccctttcactggtttctgcatcgtccgatgccaaacttcgtccgacctctgtggacttccaaatcatcgacaagaaaggcggcaagacttcaagaaggaagagtaggagcaaatcgactacagaaaacatgatttacgaaaatgacctggtagaattagaacaatggccatctgcatcaccatcgcccgagaccgacggttcgattgcatctagcgagctcttgcccaataaaagaataagacaaaaaagtttgaataccaatttcctaaagttatactctattgaaacatcatgtaaaaggaagagtattttacccgaagttgaagtagatgaccatctgttgaagacctgcaggcatgcaagcttgcactgccgtcgttta

SEQ ID NO: 82368 - DNA, 939 bp, Saccharomyces pastorianus
atgaacaggaaagtagctatcgtaacgggtactaatagtaatcttggtctgaacattgtgttccgtctgattgaaactgaggacaccaatgtcagattgaccattgtggtgacttcgagaacgcttcctcgagtgcaggaggtgattaaccagattaaagatttctacaacaaatcaggccgtgtagaggatttggaaatagactttgattatctgttggtggacttcaccaacatggtgagtgtcttgaacgcatattacgacatcaacaaaaagtacagggcgataaactaccttttcgtgaatgctgcgcaaggtatctttgacggtatagattggatcggagcggtcaaggaggttttcaccaatccattggaggcggtgacaaatccgacatacaagatacaactggtgggcgtcaagtctaaagatgacatggggcttattttccaggccaatgtgtttggtccgtactactttatcagtaaaattctgcctcaattgaccagaggaaaggcttatattgtttggatttcgagtattatgtccgatcctaagtatctttcgttgaacgatattgaactactaaagacaaatgcctcttatgagggctccaagcgtttagttgatttactgcacttggccacctacaaagacttgaaaaagctgggcataaatcagtatgtagttcaaccgggtatatttacaagccattccttctccaaatatttgaattttttcacctatttcggcatgctatgcttgttctatttggccaggctgttggggtctccatggcacaatattgatggttataaagctgccaatgccccagtatacgtaactagattggccaatccaaactttgagaaacaagacgtaaatacggttctgctacctctagggatgtatgccatattatcaagacgcaggaaatag

SEQ ID NO: 82369 - DNA, 141 bp, Saccharomyces pastorianus
atgccttttttgcttcacgtgtatatatatcagttgatatgcgttttctatacagacatacatgtatatacacacatatatatatatacatatgtacgcagagatatattaaatgggggtcctagtttccaaacaatttga

SEQ ID NO: 82370 - DNA, 1557 bp, Saccharomyces pastorianus
atgtattatggaatcagccagtttagcgaagcctacaacaaaatcttaaggaattcatcgtctcattcatcatgtcaattggtcattttcgtttcttgtcttaacatcgatgcgctgtgtgcgacgaagatgttgtcactattattcaaaaaacaattggtacaatctcagatagtaccgatatttgggtactctgaattacgacgccactattctcaattggatgacaatataaatagtctgctattagtagggtttggaggcgttattgatctggaggctttcttagaaatcgatccccaagagtatgttatcgatacagatgaaaagtcgggggaacaaagtttcaggagagacatctacgtgttggatgctcatagaccgtggaatctcgacaatatatttggatcacaaatcatccaatgttttgacgacggtacggtggatgacacattaggcgaacaaaaagaagcatactataaattgcttgaactggacgaggagagtggtgacgatgagctctcgggtgacgagaacgataatagtgggggtgaggatgaggcaactgatgccgatgaagtcacagacgaggacgaagaagacgaagataatgagacaatatctaataaaagaggtaattcttcaatagaatcgaatggtctctcaaaaagaaagcaacgaaagaagcaaatccacgaatatgaaggtgttttggaggaatactattctcaaggcacgacggtggttaactcgatatctgcacaaatctattcattattgtctgctatcggggaaacaaatctttcaaacctgtggttgaatatacttggtacgacctcgttggatatagcatatgctcaagtttacaatcgattataccccttattgcaagatgaagtgaaacgtctcacaccaagcagtagaaactcagtaaagacccctgatacattgacgttaaacatccaaccggattactaccttttcttactgaggcattcttcattgtacgacagtttttattattctaactatgtcaatgccaaactatccttatggaatgaaaatgggaaaaagagattgcataaaatgtttgctaggatgggtataccattaagtactgcacaagaaacatggttatacatggatcattctattaagagagaacttgggataatatttgacaaaaatttggatcgttatgggttgcaagatataattagagatgggtttgttagaactctcggatatcgtgggtccataagtgccagtgaatttgtcgaagcactaacagctcttttggaagtaggtaattcaactgataaggatagtgtgaaaataaataatgacaataatgacgatacagatggagaggaagaagaagataacagcgctcaaaaattgacgaatttgagaaaaagatgggtttcgaatttttggctcagttgggatgctctagatgacagaaaggtagaactattaaaccgtggaattcaactagcacaagacttacagagagcaatttttaataccggggttgctatattggagaagaaataa

SEQ ID NO: 82371 - DNA, 2412 bp, Saccharomyces pastorianus
atgcactacatacgaaatactaagaactacatgataaagatgagagggactgacgagaatgaagatgatgcagttgagatggagggcgatatggctggtgaattggaagatttgtctaatggtgaagaaaatgatgatgaagatactgatagcgaagaagaagaattagatgaagaaattgatgacctgaatgaagatgaccccaacgctattgatgataaaatgtgggatgataaggcaagtgataattcaaaagaaaaagatacagaccagaatttagatggaaaaaatcaagaggaagatgtacaagctgctgaaaatgacgaacaacagcgggataacaaggaaagaggggatgaggacccaaatgcacctgaagatggcgatgaggaaattgaaaacgatgaaaatgcagaagaggaaaacgacgttggtgaacaggaggacgaagttaaagatgaagaaggcgaggatttggaggccaatgttcctgaaatcgaaaccctagaccttcctgaagatatgaatttagattcagagcatgaagaatcagacgaagatgttgatatgtcagatggaatgcctgatgatttaaacaaggaagaggttggaaacgaagacgaagaagtcaaacaagaatccggtatcgaaagtgataatgaaaacgacgaacctggtcctgaggaagatgccggcgagacagaaacagctcttgacgaagaagaaggtgctgaagatgatgtggatatgactaatgatgagggaaaggaagacgaagaaaatggcccagaagagcaagccatgtctgatgaagaagagttaaagcaagatgctgctatggaagaaaacaaagagaaaggaggtgagcagaatacagaaggtcttgatggcgttgaggaaaaggctgatactgaagacatcgatcaagaagctgccgttcaacaagattctggatccaaaggtgctggtgctgatgctacggacacacaagaacaggacgatgttggaggttcaggaacgactcagaatacctatgaagaagatcaagaagatgtgacaaagaataatgaagaatcacgcgaagaggctacggctgctttaaagcaactaggtgatagcatgaaagaatatcatagacgtcgtcaagatataaaagaagcacaaactaatggcgaagaggacgaaaatttggaaaaaaacaatgaacgtcccgatgaatttgaacatgttgagggtgcaaatactgaaacagatacgcaagctttaggttctgcaacacaggatcaattacaaaccattgatgaagacatggccattgatgatgatagggaggagcaagaagtggaccagaaagagttagtagaagacgccgatgatgaaaaaatggatattgatgaagaagagatgctatctgatatcgacgcgcatgacgctaacaatgacgttgacagcaaaaagtcaggattcatcggtgaaagaaagagtgaggaagattttgagaacgaactttcaaatgaacacttctcggctgatcaagaggatgacagtgaaatacaatctttaattgaaaacattgaggataatccacctgatgcaagtgctagtttgacaccggaaagatcgttagaagaatcccgtgaattgtggcataaaagtgaaatttcgaccgccgatttagtatcacgtcttggagaacaattaagactgatcttggaacctaccttggctacaaagctgaagggtgattacaaaacaggtaagagactgaatatgaaacggatcattccatatattgcctcacaattccgtaaagataaaatctggttgagaagaactaaaccaagcaaacgtcagtatcaaataatgattgcgcttgatgattctaagtctatgagcgaatccaaatgcgttaaactcgcttttgatagtttatgcttggtctccaagacgttaactcagctagaggctggagggttatctattgtcaaattcggtgaaaatattaaagaagttcactcatttgaccaacaatttagtaacgaatctggcgcaagagcttttcaatggtttggtttccaagaaactaaaacagacgttaagaaacttgtggctgaatctactaaaatttttgaacgtgctcgcgctatggtacataatgaccaatggcaactagaaattgtaatctctgatggtatttgcgaagaccatgaaacaatacaaaaactggtccgccgtgctagagaaaacaaaattatgctggtttttgtcatcatagatggtattacttctaatgaatccatcttagacatgagccaagtgaactacattccagatcagtatggcaatccacaattaaagattaccaaatacttggacacatttccttttcgaattttatgttgttgtacacga

SEQ ID NO: 82372 - DNA, 198 bp, Saccharomyces pastorianus
atgtctgacttagttaacaagaaattcccagctggcgactacaaattccaatacatgctatcagccaaagtgatgctgacagtgaaatcttgtaagatgccacaaacagttgaatggtccaaattaatttctgaaaacaagaacgttactcattacggtgctccagctgctttactccccaaactgtactgtcagcca

SEQ ID NO: 82373 - DNA, 2268 bp, Saccharomyces pastorianus
atggatgaacacgaggaagcagtcatcttcggtatctgccttgtggactttcatcacaaaagaggccctgaaatagaatactggtatggcttacctgagggcacccaaagtgcagaactatggccaaatttacccttccaggcccttcctgatggttctcactcgtttgaagaaacatttacttatttcacattactatatgatgaaagaagacaaaggagccctcccaacggggcaactgatctcagtgatgatagcatcaatgacaacacgactttgtttgccatatcttgctcgagacagataaagagtgatgaattggtcactaaagataaggacgtaacacgatctactgtacagaaggcaattgtagtcatctcaaggcaaccaatcttcggtcaaatcaaggacaaacttagtattgtgactaatgcttttttcttgcagcatgattttggggacaggaagataatccagtctttatacgaaaacctgaagtcgatttacacgcctgcatcattggtcagaaatgccgaaaatcgtctttatattgggttatgtctgagaaagatactacatgattttaagagaaacgctttagtcttattgaaagcaattatgcttgaaaaaaaaattatagtttacggcaacgatgtggaagctttgtgtaatttacagttcggtctgatcagcttaattccggacttgatgtcaaatttgcaggattctggcagtcctcagttatttcaggatatttcgaaattaaatgttgtggactcgtttaaatcaagcaatcgagaatcagtgttgagattcttaggttttccattaccgattttcgaaaaaggtggactattttcaccctatactccactgcagcaaatgaatgacatacggtcagaacgtactttgttttttatgattggaagttccaatacattgcttgctgaacaaaaggaggaactgtgccacatatttgtcaatacagacaattccactgtagatattctggacaaaactttgaaccccgtcctccaattgtcaagtcatgataaaaaatggattgaatctatatctggaattgtatcagacacatggaacgaaaatgatgatgaaactccaaaaaactctcaatttgaaggcagtgaggatttcattaggtggcaattcgaggactatttaacggggttactttccagtgttaaattaagtgattatttggacctacataaagagaatgatcaagctttgaagactatacctgaagatatgctaaattccaatcccgttcatttattcaatttgaattgggttcagagttggaaagagactcaaaattttctgatattcaactcaagaacagatgatagattgttcgacttgtttcctccgaagcatatatataacggtgccgacactctgtctttattacagcaacgatttttggccacatttcataatttaaaaagaagctctagcaactcttcaagcaataaaaatggtcatcaaagcgaagaggatatcaaagaccaggaaagcattgagtcaaaaaagtctgtttcccaaatttctgtaaatcctggaaagaatacagacaagccagcagccaacttatggaattcatggaaggaatatttcaataaaccaaagaatactgctaatgacgatgttactgaatccacggaagatctcaaaaacagaagtaaaacatcgaacgcgatacagaaagctatgatgggcttgggtttacattataaacctgatgcggagacagatcaacaaagtgaagaggtgggaaatggtgaggacaatgaagatgatgataccgatgaggactctgaggatgatgacggtaacactgaggatgatgatgatgatagtgaggacggtgacgatgacgatgacggtgaggacgatgatagtgaggacgatgatagtgaggacgatgacgatgacgatgacggtgagggcgacgaaaatggcgataaggaagacagtcaagatttagcaatggttttacagacgttacgaacattaacactgatcatgataaagaaaatgaacagaattttgagggtaatgcagaaaactttaatgaggacgaaaccgttgcagatgaagatattgaaggtggtcctgagagcgataaaaattgcgacagtaaaactgatatttatgaaaacgatagaaatgttgaagactcatctaaaacgagaaatacagttaaaaaatccgatgaggagggcggtgcgaatgacgctgctatag

SEQ ID NO: 82374 - DNA, 468 bp, Saccharomyces pastorianus
atgaatggacttagagttgcagcaaaaattcagccagcacgccaaactatcatattcttgcatggattaggtgatacaggttcgggatggggatttttagctcagtatttacaacagagagaccctgccgctttccagcatactaattttgtttttcctaatgctccagagcttcatgtgacagcaaacggcggtgcattgatgcctgcttggtttgacatcttggaatgggatcctagtttttccaaagttgacagtgacggttttatgaattctttgaattccatagaaaagacggttaagcaagaaattgataaaggaattaaaccggagcagattattatcggaggtttctctcagggtgccgcattagctctcgcaacatcagttactttaccatggaaaatcggtggtatagtagctctgtcgggatgtgtgtgccatcccagggattctgtgacgacataa

SEQ ID NO: 82375 - DNA, 114 bp, Saccharomyces pastorianus
atgcttttcctcttgaaatcgcgcaaagaaggaaaggaaaaagtgtctatatatagtgtctattgtttttttttacgaaaagaaaacggagaggatgagttaggaggggactag

SEQ ID NO: 82376 - DNA, 960 bp, Saccharomyces pastorianus
atgaaacttcaattggcggcagtggctacattagcagtcttaactagtccggcattcggtagagtacttcccgatgggaaatacgtcaagattcccttcacaaaaaaaaagaacggcgacaatggtgaactcagcaagagatcgaacggccatgaaaaatttgtactagctaacgagcaaagcttttattctgttgagctagccattggtacaccttcacaaaacctcactgtgctgttagacacaggctcagctgacttatgggttcctggcaagggaaacccctactgcggttctgtgatggactgtgaccagtatggcgtgttcgacaagaccaagtcgtccacgttcaaagccaacaagtcctcgcctttttatgccgcttacggtgacggaacctatgcagaaggtgcatttggtcaagataaattaaagtacaacgaattagacctcagtggtctatcgtttgccgtggccaacgaatctaactcaacctttggtgtgctcgggatcggcctttccacgcttgaagtcacctattctggaaaagtcgctattatggacaagagaagctacgagtatgataactttcccctgttcctaaaacattctggagccatcgatgcaaccgcatactctcttttcctaaatgacgagtcacagtcctccggcagcatcctcttcggcgctgtagatcacagcaagtacgagggccaactgtacactatcccgttggttaatctttataagtcgcagggttatcagcacccggtggcgttcgatgtcactttacagggcttaggactgcaaaccgacaagcgcaacatcacattgaccaccaccaagctcccagccctactcgattcaggcacaacgctaacatatctgccctcccaggcagtggctttgctagcaaagagcttgaatgcctcgtattccaagacattgggttatttatga

SEQ ID NO: 82377 - DNA, 453 bp, Saccharomyces pastorianus
atgcagaccagtgtggggacctgtgtcttggcaataattccacaagcgggcaacgccaccgctatccttggtgattccttcttgagaaacgcctatgtggtctacgatttggataactacgagatttccctagctcaagccaagtatggcacggggaaagagaacgtcgaagtcatcaaatctaccgttcccagtgcaataagggcccccagttacaacaacacttggtctaactacgcctccgccacgtccggtggtaatatttttaccaccgtgcgaactttcaatggcactagtactgccaccactacgaggtcaagtaccaccaagaaaacaagctctaccactactgcaaagtcgactcatgaaagcaagagggcactccagagggctgctaccaactccgcttccagtatacgctccaccttgggtttactgctagtcccctcctaa

SEQ ID NO: 82378 - DNA, 327 bp, Saccharomyces pastorianus
atgaatcatctatatcataactgcatgtttctctacgtctacacagatgtttgcgtccgtttgtgcgcttcgattttttacataatgctggaagcaaagattgctctcagaattcctacccttcggcccaattacacgtggggacaatggcgctctttcatacagtcttcattctatggccgcacttttgtggcattctctggacggtccatgaaaaattatataactatttgctttctattgaagtctattgaagttagcgtggatagaacggcgttacatggcacatcagctgaagctagcgcaagtaattttcaacgcatttaa

SEQ ID NO: 82379 - DNA, 1242 bp, Saccharomyces pastorianus
atggttgatcttatagcgagggatgactccgtagatacttgccaagcttctaacgactacaatgggcacgcaggtcttagaattctggcagtattcattatactgatatcgtcaggattgggagtttatttcccaattttgtcatcacggtattcgtttataagactaccaaattggtgctttttcatagcgaagttcttcggttctggtgtcattgttgccacagcgttcgttcatcttctacagcccgcagccgaagctctgggagatgaatgtcttggtggcacatttgccgaatatccatgggcttttgggatctgtttaatgtcgcttttcttacttttcttcactgaaatcatcacgcattattttgtagcgaaaacgctgggacacaatcatggggaccatggggaagttaccagtattgatgttgatgctcccagttcgggatttgtcatcagaaatatggactcggatcctgtatctttcaataacgaagctgcctactccatccataatgacaaaactccgtacactactagaaatgaagagattgtcgctactcctataaaggaaaaagaacccgactcaaatgttactaattatgatctggaaccaggaaaaacagagtcactagctaatgaactagttccaaccagttcccatgcgacaaatctcgcttctgtacctggaaaagatcattattctcacgaaaatgaccatcaagatgtctcccagttggctacacgtatcgaggaggaagataaagagcagtatctcaatcagatactagctgtttttattctagaatttggcattatctttcactctgtatttgtgggtctttcgctatctgtcgcgggtgaagaattcgaaaccttatttatcgttttaactttccaccaaatgttcgaaggtttgggtctaggcacaagagttgccgaaacgaattggccagaaagtaagaagtacacgccttggttaatgggattagccttcacgttaacgtcacctatagcagtcgcggtaggtattggtgtcagacactcttggatacctggctccagaagagcattaattgctaatggtgtttttgactcgatatcatcaggaattcttatttatactgggctagtcgaattaatggctcatgaattcttatactctaatcaattcaaaggacctgatggcctcaaaaaaatgcttagtgcatatctcatcatgtgttgtggagctgcttaa

SEQ ID NO: 82380 - DNA, 1245 bp, Saccharomyces pastorianus
atgtctgaaataaccttaggtaaatatttatttgaaagattgagccaagtcaactgtaacaccgtcttcggtttgccaggtgactttaacttgtctcttttggataagctttatgaagtcaaaggtatgagatgggctggtaacgctaacgaattgaacgctgcctatgctgctgatggttacgctcgtatcaagggtatgtcctgtattattaccaccttcggtgtcggtgaattgtctgctttgaatggtattgccggttcttacgctgaacatgtcggtgttttgcacgttgttggtgttccatccatctcttctcaagctaagcaattgttgttgcatcataccttgggtaacggtgacttcactgttttccacagaatgtctgccaacatttctgaaaccactgccatgatcactgatattgctaacgctccagctgaaattgacagatgtatcagaaccacctacactacccaaagaccagtctacttgggtttgccagctaacttggttgacttgaacgtcccagccaagttattggaaactccaattgacttgtctttgaagccaaacgacgctgaagctgaagctgaagttgttagaactgttgttgaattgatcaaggatgctaagaacccagttatcttggctgatgcttgtgcttctagacatgatgtcaaggctgaaactaagaagttgatggacttgactcaattcccagtttacgtcaccccaatgggtaagggtgctattgacgaacaacacccaagatacggtggtgtttacgttggtaccttgtctagaccagaagttaagaaggctgtagaatctgctgatttgatattgtctatcggtgctttgttgtctgatttcaacaccggttctttctcttactcctacaagaccaagaacattgtcgaattccactctgaccacatcaagatcagaaacgccaccttcccaggtgttcaaatgaaatttgccttgcaaaaattgttggatgctattccagaagtcgtcaaggactacaaaccagttgctgtcccagctagagttccaattaccaagtctactccagctaacactccaatgaagcaagaatggatgtggaaccaattgggtaacttcttgagagaaggtgatattgttattgctgaaaccggtacttccgccttcggtataaccaaactactttcccaacagatgtatacgctatcgtccaagtcttgtggggtaccatag

SEQ ID NO: 82381 - DNA, 2628 bp, Saccharomyces pastorianus
atggctatctgggagcaactagaagtctcaaaggcgcacgttgcctatgcatgtgttggtgtcttttcatctatcttctctttagtgtcactttatgtcaaggagaagctttatattggtgagtccaccgtagcaggtatatttgggctaattgtgggtcctgtttgcttgaactggtttaatcctctgaaatgggggaattcagacagtataacattagagataacgagaatagtattatgtttgcaaatttttgccgttgccgtggaactgccacggaaatatatgttgaagcattgggtatctgtgacgatgctattattgccagtgatgacagctggatggcttattattggtctcttcgtttggattcttatacctggcttgaatttttctgctagtttgttgatatctgcgtgcattaccgcaacagatcctattctggcgcagtcggtcgtctccggtaagtttgcccaaagagtacctggtcacttaagaaatctactgtctgcagagtcaggctgcaatgatggtatggcctttccttttttatttctttctatgaatttaatcctacatcccggtaatggaagagaaattgtcaaagattggatttgcgttactatcctgtatgagtgtttgtttggatgcttgctaggttgcttcattggttatgtaggcagaatcaccatcaggtttgccgaaaagaaaaacattatcgatcgtgagtcgttcttagcattttacgttgtcctggcgttcatgtgtgctgggttcggctccattttgggtgtggatgacctattggtatcatttgcagccggtgcgactttcgcttgggatgggtggttttctcaaaagacacaagaaagtaatgtttctaccgtgattgatttgctactaaactatgcgtattttatctattttggtgccattataccttggagtcaattcaacaacggtgaaattggcacaaacgtctggcgtttaattatactttcgatagtggtcatctttttacgtaggatccctgcagtcatgatattaagacctcttatacctgatataaaatcgtggcgtgaggcactttttgtgggccattttggtcctattggtgtaggtgcaatttttgccgctatactagctcgtggagaattagagtctacctttagtgacgaacccactcctttaaatgttgtaccatcaaaagaggaaagtaaacattggcagctgatagcctgtatatggccaataacttgttttttcattgttacttctatcatagttcatggttcttcagttgcaatcataactctaggtcgtcatttgaacacgataacgttaaccaaaacattcactacacacaccaccaatggtgataatgggaaaagttcatggatgcaaaggttgccatcgttggataaagctggacgatcattttcattgcatcgtatggatactcaaatgactttatcaggggatgaaggtgaagcagaagaaggaggaggtcgtaagggactagcaggaggtgaagatgaagaaggattaaacaatgatcaaattggtagcgtcgcaacgagcggaattcctgcaagacccgctggtggtatgccaaggaggaggaaattgtcaagaaaagagaaaagattgaacagaagacagaaactgagaaacaaaggtagagaaatattttcatcaagatctaaaaatgaaatgtatgatgacgatgagttgaatgatctgggacgagaaaggttgcaaaaagaaaaggaagcacgcgccgccacatttgcattgagcacagccgtcaatacacaacgtaatgaggagattggaatgggtggagatgaagaagaagatgagtacacaccggaaaaggaatatagcgataattacaataacacaccaagttttgagtcgtctgaaagatcttcatctctccgaggaagaacttacgtaccaagaaaccgttacgatggagaagagacagaaagcgagattgaaagcgaagacgagatggaaaatgaaagtgaaagatcaatggccagtagtgaagagaggagaattcgaaaaatgaaagaggaagaaatgaaacctggtactgcttatttagatggtaatagaatgattattgaaaataagcaaggtgacatcttgaatcaagtagatatcgaggatcgcaatgaggcgagagatgacgaagttagtgttgatagtacagcccactcaagtttaaccaccacaatgaccaatctatccagtagtagtgggggaaggttaaagagaattttaactcccacatctttaggaaagatacattcattggttgataaaggaaaggataaaaataaaaacagcaagtatcatgcatttaaaatagacaatctgttaatcatcgagaatgaggacggtgatgttataaaaagatataagataaatcctcataaatctgatgatgataaaagtaaaaaccgcccaagaaacgatagtgttgtatcaagagctttaacagcagtaggactaaagagcaaagcgaacagcggcgtaccgcctccagtagatgaagaaaaagccatcgaaggaccctccaggaagggcccagggatgttaaagaaaaggactttaaca

SEQ ID NO: 82382 - DNA, 1824 bp, Saccharomyces pastorianus
  modified_base (1780)..(1780): a, c, g, t, unknown, or other
atggtgagtcaattaaataacgacgtagtgtttcatgaaactataccgagacaccagttgactggctccaacactgatagtaatgagaaatttttaggcctagtaagagattcggtgaaagaaacgttttggtgtttctcaaacatcaacgtctttgaaattattatcgaaaatgagcctaattcggtatggaatttattagttcgggataacaaatttgacaaggccctatcgttgaaaggcttgacggtgagggaaatagaatctgtaaaactttcaaaggcaatgtaccttttccacactgctaaagattttcattccgcggctcaaactttgggaagcatgaaggacttgtcacactttggggaaatcgcattgaattttctccaaataaaagattacaacgatttgaacgtaatattgataaaacagttggataacgttccctggaaatcaactcaagtcgtcttgtcgagttggattatttggaattttatgaaacaattgaatgatattgaattaaagataaacacaactaaaccagcttctactgatgaagacaatttgctaaactggaacctgaatctcaaggagaaatcgaatgaactaacgaaatttttggaaagccatctagaaaaacttgataatgaaaccgtttatcaaataatgtccaaacaaaaccggcaaaacgaattattgatttttgctagtctaatcaacgatatgaagtttttattatcattttggattgaccaaggaaattggtatgagtccttgaaaattctgcttacaataaataaccatgacctagtctataagtactctttgattctcttattgaattcaccagaggctactgtgtcaacgtggatgaaaatcaaagacttggatccaaataagttaattccaacaattttaaaatttttcacaaattggcaaaataattctaaactgattactaacatatcagaatatcctgaaaattactcactgacatatttgaaatggtgcgttagagaagtcccaaaaatgtgtaatccaatagtgtacaattctatcctttacatgatgattactgatccgagaaacgatatgatactagaaaatgatataatcaaattcatgaaatcaaacgaaaacaaatatgatcttaatttccagttacggttgtctttaaaattcaagaaaactaagacctcgattttccttttaacacgtttaaacttattcgaggatgccattgacttggcattgaaaaataacttgattgatgattgtaaggtaattgtgaatgacgagattcttatagaggattataaattaaggaaaagattatggctgaaaattgcaaaacacttattactttcaatgaaagacatagatataaagcaattaattcgaacgattttaaatgattccaacgaaattttaacgattaaggatcttttgccattttttaatgagtatactacaattgctaacttgaaagaagaactgatcaagtttttagagaatcacaacatgaaaatgaatgagatttcagaagacataataaactccaagaatttgaaggtggaaataaacacagaaatttctaaatttaatgagatttacaggatactagagccaggtaagtcttgtgatgaatgtggtaaatttctacagatcaaaaagttcattgttttcccctgtggccactgttttcactggaactgtataatcagggtaatactgaactcaaatgattataacttgaggcagaagacggaaaacttcttanaggccaaaagtcagcataatttgaatgatttagaaaatatcctt

SEQ ID NO: 82383 - DNA, 885 bp, Saccharomyces pastorianus
atgataaaaacacgtatagaggaagttcagttacaattcctcacagggaataccgaacttacgcatttgaaagtctccaatgatcaacttatagtaacgacacaacggacaatttacagaataaatttacaagatccggccatcgtcaatcactttgactgtccattaagcaaggaactagaaactataatgaatgttcatgtttcaccaatgggtagtgtcattcttattcgaaccaactttggccggtatatgttgctaaaggatggcgaattcactcaattgaacaaaataaaaaatctcgacctcagctcgctacattggatcaacgaaaccacctttctgatgggaatcaagaagacgcccaagttgtaccgagttgaattgacaggaaaggatataaccacgaagctatggtatgaaaacaagaaactctctggtggaattgatggcattgcgtattgggagggctctctgctattaactataaaagacaacattttatactggagagacgtgacaaatatgaaatttcctttagtattaccagatgaatctgagcaatttgaaaggttaaaacatcatgcgataaagaaattcgattcgtacaatggactctttgcttgggtcacatccaatggaattgtctttggtgatttaaaagaaaagcaaatggaaaaagatcctgcttctaataattttggaaaattcctatcttcgtcgaaggttctactcaatttcgaactgcctgactaccagaatgataaagatcacctcatcaaggatatagttttgactgctttccacatcctgcttttgagaaaaaatacggtaacaatggtgagtcaattaaataacgacgtagtgtttcatgggatcctctaa

SEQ ID NO: 82384 - DNA, 1779 bp, Saccharomyces pastorianus
atgaccattgatggcacggggcaatctaaggaggcgctgcaagatgaacggttaaatactggctctgataaggtttaccataactatatgatgcctgctttagaactctacgatgccaaggtctccataaaccattggcagttgcgggattgtatcaaaccgggctccatgaaccagagtaaactgtattatatttacgatcattcgataagagtactagatacggattcttccgtattgaggtctccagtaaggcgacataattctattcaaccgagtaacagtggtaaaaactctactgaaaaaacgtctacaaaaggttctaggacaacgggctcgtatatctccaaaaatttacatgttccttccgagaaactggtagagttcaactttaagccgagatgtttcacggaattaaatgggttgactgtttgtggtggtctaatcggttctgatgataagggattcccttctaattggaaccgtttagctcaagatgcaaatatttcgttgccgccaccttcccaaccgattaatatttccaaaaatattagtttccctataaattcacattattcaaatcctaatatctggaagggcatcgtggagttttataatcaagaaacggacacaatgatgacttttacgttgggccagttcatcaataattgtgtcacactttatgacagggccagtatgcagtttgatctttttgcatgcaacaatgatggtcatctttaccaatgcgatgtaagtaatagagatgtaacactagtgaagcgttatgcggatttaaagtttcctttgaataacgcttctttgtcacatgatggtcaaacgatggtagtgtctggcgattctaataaatttgctgtttacaatcaaaatgaattaaccaaccaattctccttacattacgataatcatccttcctggggtagttctgtcaatcgtgttagacggataccacggtttgcgttacctgatgaatcagaatatatcgaaaacatatatgaagctccaaattcagaccatgggttttataactgtttttccgaaaacgacttgcaatttgcgacggtatttcaaaatggtacttgcgcaatttatgatatcagaaacatggctactcccatggcagaaattagttcgactagaccacattcccacaacggtgcatttagagtctgtaggttcagttatggcctagatgatttattattcatttctgaacatcagggcagagtacacgttgtagatacaagaaactacgttaaccaccaagttattgtaattcctgataaagttaatatggaatatatatacgaacggaagcataatacaaatcataatttcaccacaaataataacaacgaaaacgaaagtaatgatagcaaaaatgaattacaaggggcggattatcggtctttatcaagaagaagattttcgctgccctctatgccaaatgtaaccacagaaccatggataactatggctcaaagaatcccaaaaaagtatttggagccgcaaattctaccttttccgaaagttatggataaaattagtaacgaatcggttctgttttctacgaaaggtagttcatcaagtgacgtagctcatccatacaagagacgatgttcattcagggtaaggagagtatcgacttcggcaccaaccgccgattattctaataacaatgttaacgcaagtcttggcacacctgctgctgattctatcgcaacttcgtcgtcaaattccgcacctcaaaatttaatgtga

SEQ ID NO: 82385 - DNA, 714 bp, Saccharomyces pastorianus
atgtccaacccatttgatttgttaggtaacgacgtcgaagacgctgacgttgtcgttttgccaccaaaggaaatcgtcaagagcaacacttcctccaagaaggctgacgtcccacctccatccgctgacccatccaaggctagaaagaacagaccaagaccttctggtaacgagggtgctatcagagacaagaccgctggtagaagaaacaacagatcaaaggaagtcactgactctgccaccaccaagaagtccaacaccagaagggccactgaccgccactctagaactggtaagactgacaccaagaagaaggttaaccaaggttggggtgatgacaagaaggaattgagtgctgaaaaggaagctcaagccgatgctgctgctgaaattgctgaagacgctgcagaagctgaagacgctggtaagccaaagaccgctcaattgtctttgcaagactacttgaaccaacaagctaacaaccagttcaacaaggtcccagaagctaagaaggttgaattagacgctgaaagaattgaaactgctgaaaaggaagcttacgttccagcaaccaaggtcaagaacgtcaaatctaagcaattgaagaccaaggagtacttggaatttgatgccacttttgttgaatctaacactagaaagaacttcggtgacagagacctgcaggcatgcaagctggactgccgtcgtttacaa

SEQ ID NO: 82386 - DNA, 810 bp, Saccharomyces pastorianus
atgacaatcaaggaacataaagtagttcatgaagctcacaacgtaaaggctcttaaggctcctcaacatttttacaacagccaacccggcaagggttacgttactgatatgcaacattatcaagaaatgtatcaacaatctatcaatgagccagaaaaattctttgataagatggctaaggaatacttgcattgggatgctccatacaccaaagttcaatctggttcattgaacaatggtgatgttgcatggtttttgaacggtaaattgaatgcatcatacaattgtgttgacagacatgcctttgctaatcccgacaagccagctttgatctatgaagctgatgacgaatccgacaacaaaatcatcacatttggtgaattactcagaaaagtttcccaaatcgctggtgtcttaaaaagctggggcgttaagaaaggtgacacagtggctatctatttgccaatgattccagaagcggtcattgctatgttggctgtggctcgtattggtgctattcactctgttgtctttgcagggttctccgctggttcgttgaaagatcgtgtcgttgatgctaattctaaagtggtcatcacttgtgatgaaggtaaaagaggtggtaagaccatcaacactaaaaaaattgttgacgaaggtttgaacggagtcgatttggtttcccgtatcttggttttccaaagaactggtactgaaggtattccaatgaaggccggtagagattactggtggcatgaggaggccgctaagcagagaacttacctacctcctgtttcatgtgacgcttga

SEQ ID NO: 82387 - DNA, 519 bp, Saccharomyces pastorianus
atgtcatcgactaagtttttgaaaccactctgcaggataagggcttttcatacttcaattgccagatcctttaccattccttttctgccaaagattccacagaaacctggaggtgtgagtgggaccgcaaatgattcctcttatatgccgcccgaaagcagagctcagggttcgtaccattggattgtcgagcgcggactgtccttagcggttcttccgctgatcgcagttcccttggtcactacaggccctatttccacttttaccgacacatttctttccttggtcctgctaggtcattgtcatatcggatttcagtcttgcattatagactatatttctgaaagagtctatggaaaggtacatcattacgcgatgtatttattgagcttgggctcctttttatcgttcgtcggtatatataaattagagagccaagaagctggtcttattgcctctttaaaatcattatgggataacaaacctgtggaaaaaaaagaggcagtaatcatcaattaa

SEQ ID NO: 82388 - DNA, 273 bp, Saccharomyces pastorianus
atgggaaaatcagatattgttgaacaattaaggctgtctaaaaactggaaattaaacttaaagtccgtgaaattaatgaagaatctattgatattatcatccaaactagagacaagttcagtaccaaaaacaataaacacaaagctggttattgaaaagtactctgaaatgatggaaaatgagctgttagagaattttaattctgcatatagagagaataattttactaaattaagacctgcaggcatgcaagctggcactgccgtcgtttac

SEQ ID NO: 82389 - DNA, 918 bp, Saccharomyces pastorianus
atgcacactaactcacccttacgagcggataaccaagatctagaaactcaaccactgttgagaccaaacactgaagaaagccaactcctcaatgatgaagtgagaatcaatgttgcaaatgagacccttattaaatctcgttggcggagtataaagtgcttaattatatatctgctaggtattattttattaagtttctttggcatcagcatagtgcagtatattaggggacatgtgccgcccacagatgtgatagaaaagaatctagttcaagtaacaaatttcaaactggtggagtttcagcttgatggttggaaagataatatgggctctgacctgaacaatgatacaggtaagtatttgcaggtgtctatacactctcaaatttggttcgattatgacaaatggccaggaacggaaaatgactcggacgccagaagccaacgtgactggatacggtacatcaatgaaaatgttcttaaaaccatttgtatagatctgaataacgtgaccacattcgatggagatctagtgtttaagaataaactgggagatgttgttggcatggaacccatttgttttaatttggctcaccgacagattaataacctacagttcaaaattttagttaaaccgtctatttggaaaatcgtaaaagttttgaagaaattttggaatagggattttgaatccttaaatataaaatcgaatttagatatgactatcttcaagagaaaatttggcacgaggtttaatttattgaaacttaatggcgaaatcttaaattggaaagatattatcgattgggaaaaaatatcggcaacgccccttcggatgattcaaaatatgatcgatgcaatatctcttcaaggattacattacgggactccaattctgatggattcatgcccgatatga

SEQ ID NO: 82390 - DNA, 1107 bp, Saccharomyces pastorianus
atgcctcgtatccgagtacacaataacgatcccatatcgcccctatcgtctccattgccctcttcaccttcgccgcaggtacctaacgtttcatcgccgttctcattaaatagaaaaagtctttctcgaactgggtcgcccgttaaacagagtagtaatgacaaccctaacgaaccagaactcgaatcacagcatccaaacgaaacagaagcaaataaactagattcgctgccaccagcggcaaataaccctaccggaacactgtcttcagatgaattaactttcactcatgatttaattgaaaaagttttcaattgtaatgacaagctatcagataactataatacccaaatattatcgaacacagaacatccgcttttgacatcatataagttagacttcccaaaaattcccgcaggtgtactccccacagacactgattcggatgttatatcatccttggagtcattatatcatatccattgcaactccgtttatgaatgcatcaagtttctgaagagtgataatatatcaaatgcattattcttctctaactctaactctatatcgcccacgatgtttaatctattcatttctgagccattgattgattgggtaactaaatgtgacttaatcacctatacagggttaatcaaatttttttcacaatttataattcattctaatgagatcagtgactcaatcattcaaaaactggaaagtatgatcaaactattgcccgaacaaattaataaggctgttttagaattaccaaaagcgctagtgcaaaggaagttatcaattattaataattttaccaaattagtgaaaaaactaataaagttattaaaattcattctaaacttcttgaaaagttttcctatatttaaaagtggcatgaataatgactggaagaatattgtaaatttagacgatattttggaaatgatgattaatgaagacgatacaaattcagagacaaacacaataatgcaacatttacaagggttctgtcaagttttcgtaacaaagttcttaaattcctctatgagcgttagcaatgatccctctgtgtctatcgaatgcaagtcgttaaatgaaatgatt

SEQ ID NO: 82391 - DNA, 795 bp, Saccharomyces pastorianus
atgtccggtgataataacattgaacctactagtcggggctcgaacgacaatagcaacggtccaagtaacggatcttcggtaaacagtaatcggtacagtttaaacgcacccaagtacagcagccaaccaccgccagcatcacacacttatttgccccccatgtcagtgaatatcccgcccatagcgagcaaatcatcgtcaatatacagcctgctacaccaaagttccccccgcccggagacgccaaatccaatattaccgccacttatcggtagtggtcccggctcccataaaccatctcctacccctacacagcgtcctgcacaacccgcaacacaacggcaacctgccacatactcagtgtatccagcgtctatcagcctgaatagatcgaattcatctgcttacccactttctttcaagtcagaggaaaccttaaacaataatcctcctactgctgccaaacgtactaataccttcccctcaattccaagcagtactaaaaaacagaaaacaagccaagagaaacgaatctcttccatttcaaggagaaacacgcaagaaataattgctaagcaaattgcagaaaataacaaatctaaaaccatcgaggagtatgcgcagatcgtgaagcatgcagaaatcaaagtcctgagcatggactcacagaacacgtcaaaggcagctttgcagctggcggaacaaaacagagaaagagaaagacaagtgtttgcgttactttggttaatgaaaaattgtaaatctcagcatgatagttacgtaccaaggggctaa

SEQ ID NO: 82392 - DNA, 312 bp, Saccharomyces pastorianus
  modified_base (11)..(11): a, c, g, t, unknown, or other
atgagttatcncgggagaaacgtggatgttatgaatttacaacatattttgacaaatcacctggcttttgcgaacgttcaacaaacaccattattccaattacaacaggttaactcgcaaatttctgaattgtcaagagacgaattgcgtacgatcttgagcgacgcgaaatgcgttggtgtcatttatcgtcacggtaaagatgccgctggtaaaccattagacgaagaatatttctacgagttagaataccatgatgattacgagagaagatacttggtgagttcattaaaaggtggaggacaggcttaa

SEQ ID NO: 82393 - DNA, 864 bp, Saccharomyces pastorianus
atgagaaagctggtaaaactgcgtcagaatcaattggaaatttcgggaaaggagattatcaactcatttccttcttccagtataggaagggtttcgtctcccgttaggtcgaataaggttgacgccatcccttcctctccagcttttcctggccagttggcagaaacgtcacccaagttttcttccaaactttcttctccttcaaggcatactagagtcatcaatgctgaactagatcctagcaagatcagcaccattactgtagggcgcaatggttcgcaatgtgatgttgcgctctgtaagaataagttcatatccagagtacacgctagtataacttatttaccacaaacaaatgaagtgaagattcactgcttcagtatgaacggattaatcgttacctatcgtaagcaatttgattgttatcaattaaaggataccatgaataacaataatagggcatataggcttgttcccagattctctaacgaaaaatgtgttaaagaaattcaagatgagggaggattcattaattttactctggaagagggagacaccgtttatatgacatattacaagggtatcatgttggattttaggcaggttttacttcgcatttcgttaaaagaaaaaaactctccttcagagccgttaagattcgagaagaaagctgaatttgaaagtgaaagtgaaacgaaacatatgggtagtataaggaagcatccattgatttttactgacacttcgatggacagacccaaaaaaatactaaaggatagcaacaaaatctcaattggtagtgattatggcgttgcagaaaggatgctaaaccactgcctaaattctaaatcgtccccactttgg

SEQ ID NO: 82394 - DNA, 201 bp, Saccharomyces pastorianus
atgagctcgcaatttccttcgtccccctacaggacagtggatccgtactctccaccaaattacaaacagcagcctaattgtccctcatccaattatgagaaagctggtaaaactgcgtcagaatcaattggaaatttcgggaaaggagattatcaactcatttccttcttccagtataggaagggtttcgtctcccgttag

SEQ ID NO: 82395 - DNA, 153 bp, Saccharomyces pastorianus
atgaaagtagagaaagagtttccattgatgaattttagtttacgtcgactgccgctgttcattctcatcaaaacacgaaagcaaaccatagagatgaacttaagaaaaaagggccacgggatttttttttcgcgttttggcgttttcatataa

SEQ ID NO: 82396 - DNA, 585 bp, Saccharomyces pastorianus
atgtcatccacagcagtaccacgacctaaaccttgggagaccagtgcttcgttagaggagccacagcgtaatgctcagtctttaagtgcgatgatgacctcgaatcagcaggattccaggccaactgaagaaagcaataacagtaatagtgcaagtgagtctgctcccgaagttttgccgcggcctgcggcacttaactcctctggtacctacggcgaatcgaatacaataccgggaatatacggtaatagcaattatgggataccctatgataataatccgtatagtatgaactctatatacggaaacagcatagggaggtatggctatggaggatcgtactatggcaacaattatggatcgttttatggaggagggtacggtgcaggagcgggatatggaatgaataatggaagtggactaggtgagtcgacgaaggccacctttcagttaatagaaagtttgataggcgctgttactggatttgcacaaatgctggaatctacttatatggccacacacaactcgttattcaccatgatatccgtcgcagaacagtttggtaattggaaggaaatgctaggt

SEQ ID NO: 82397 - DNA, 174 bp, Saccharomyces pastorianus
atggttcttttacacaaaagcacacatatatttcctaccgattttgcctctgtttcacgcgccttttttaatagataccccaatccatactccccccatgtactatccatagacacaatatcaaggaacgttgatcaagaaggaatttgcgcacaacgaggctgggatcctcta

SEQ ID NO: 82398 - DNA, 1131 bp, Saccharomyces pastorianus
atgtcagaagaggataaagcgaaaaaattagagaatttattgaagttattacagttgaataatggcgatacttcaaaattcactcaagaacagaaaaaagctatgaaagaccacaaattctggagaacgcaaccggtcaaagatttcgatgaaaaggtggtggaagaaggccccattgataagccaaagacaccggaagatatacctgacaagccactacctttattgtctagcttcgaatggtgtagtattgatgtggacaacaaaaaacagcttgaagatgttttcgttctactaaatgaaaactacgtggaagaccgcgatgcaggcttcagatttaactataccaaagaattcttcaattgggctttaaagagtccaggttggaagaaggattggcatattggtgttcgcgttaaagaaacacagaaattagttgcctttatctcagccataccagtaacacttggtgttagaggtaaacaagtgcctagtgtagaaatcaatttcctgtgcgttcacaaacagctaagatcgaagagattaacacctgttctaattaaagaaattacgagacgagtgaacaaatgtgacatctggcatgcattgtacacggcaggtattgttttgccagcacctgtgagtacgtgtcgttatactcatcgtcccttgaattggaagaaactttatgaagtagatttcacagggttaccagatgggcacacagaggaggatatgattgctgagaatgcgttaccggccaaaacaaagacagcgggattgagaaaattaaagaaggaagatattgaccaagtttttgagttgttcaaaagatatcaatccaggttcgaactaattcaaattttcacaaaagaagaattcgaacataatttcattggtgaagaatcgttaccattggataaacaagtaattttctcatatgtagtcgaacagcccgatggaaaaattacagacttcttctcattttactcattgccattcacaatcctaaataacacaaaatataaggacctaggcatcgggtacttgtattattatgccaccgatgcagatttccaattcaaagacaggttagatccacaagctactcaggctttgagaacaagatag

SEQ ID NO: 82399 - DNA, 1047 bp, Saccharomyces pastorianus
atgaccgtgctatatgctccttcgggtgctactcagctatatttccatctgctaaggaagtcgccacacaacaggctagttgtctctcaccaaacacgtcgtcacctcatggggttcgttaggaacgcccttggattggatcctcctccttctccagaagatcctactccggagaacagattccatccatgggatcagtctccctcagtggacttgcgtgaaagggccgccaagattagaacgctagcacactgccctgttaccggcaaagatattaactacacttgtcctctgtcaggaattccgactcatcactcacgagaggcttgggagatggataaagcatatcacgattctaaaaaatatgaaatcctgaaaaaagttaatatttatgagcatgacttaagaagcggtagacccttcccggagtttggttttccccaacagcaaggctacgacaaggccgttaacctaacaaactgggatttgtttttctacacaagatcattctattccatggatacagagttccaattagccgcagtcacaaagatgctaagctatccaattacgattgggtctttgctgcacaaattttccccgtattcattgaacccaaaggggcctatcaccttagaaggtctaaaatctctggctgctctcaggtatactttatatccgttggagaatagatctttaccaaccacaactaagaaccgtgctatgagaattttcatcctaggtgcacgtgctgaagctcaattgccgggccacgtttggaaacagctccagtttcttttcccagagcagagttttgaaatacatttcattggacccgaatgcctgtataaaagggataaacaggagtacgtcaagtctactacgccggtagtacaaagagtagacgagactctgaaattcatttatcgtacaaactttttcgaagtattccatgaggctcaagattttttcccatacgatccatacatggatgtcttttttactttccatccaggctacgcatctccagaatctcacggttcatga

SEQ ID NO: 82400 - DNA, 1032 bp, Saccharomyces pastorianus
atgatgcttgaagggtatacggtacaacctccacagtccactttgataggtgacattgaaatccaggacgaaaatgcaaaccaagaagttaagaacgtactttaccaaggagttcaaaagggtataaaaaggctagaaaaaagacaaaggagggttgcattaggtgatgtaacctctcaaaaggcaaacaaaatacacaatgctatacataataaattccatcagacgaagaacaattttgaaatagagaacatacgctcatcggccttggtaaaagaacaacaacgagacgtaagggatgaagatagcgactattttttaattgatagttctgaaggctcttctactgatgacgaacaagttaatgaagatgctattgatgatttgttaagtcgaagagtaaatgatcagcagattcaagccgatgaagtgtatgaagatttcgatggagaaatgcaagatgtcattgaagaggatgttgatagtcaaattgaaccactatcaccaataaacaacgatgaaattcagactgagctggacagggcgtttgaaaaatattttcggtcggttcccaatccgctggatgatgatacccatgatgttgtgatggttgtggagtacgcttccgacatattctattacttgagagaacttgaagtgaaatataggcctaatccctactatatgcaaaatcaagtagagcttacatggccgttcagacgaactatgatagattggctagttcaactgcattttagatttcaacttttaccagaaacgctatacctgacgattaatatagtggatagatttctgtcaaagaagaccgttactttgaacaggtttcaattggttggtgtatcggctttatttattgctgccaagtttgaagagattaactggcccactttggatgatctagtttacatgctggaaaatacatacactagagatgaccttattagagcggaacagtattttatagatactctgcaatctgaaataggttggcaaggaccatgccatttttaa

SEQ ID NO: 82401 - DNA, 1248 bp, Saccharomyces pastorianus
atggttagaacccgtgtattattctgcttatttatatctttttttgctacggttcaatcgagtgctacacttattagcacttcatgtatttcccaagctgcgctataccaatttggatgttctagtaaatctaaaagttgctactgtaaaaacatcaattggctgggttcagtgacagcatgtgcctatgagaattccaaatctaacaaaacactagacagcgccttaatgaagttagcatcccaatgttcaagcatcaaagtttatactttagaggacatgaagaatatttatttaaatgcgtcaaattatttgagagcacctgagaaaagtgataaaaaaaccgtggtcagtcaaccgctcatggcgaacgagacagcgtatcattattattatgaggaaaattatggtatccatcttaacctaatgcgctctcaatggtgcgcttggggtctcgtcttcttctgggtggctgtgcttactgcagccactatcttgaacattctgaaaagggtgtttggtaagaacatcatggcaaactccgtcaaaaaatcacttatttatccttctgtttacaaagattataatgaacgaactttttatttatggaagcgtctaccatttaattttacaactcgaggcaagggtctcgtcgtattaatttttgttattttgactatattatctctcagttttggtcataatattaaacttccacacccatatgataggcccagatggagaagaagtatggcctttgtgagtcgtagagcagacttgatggccattgcacttttcccagtagtctatctattcggaataagaaataatcccttcatccctaacaggctttccttttctacatttaatttctatcataaatggtctgcctacgtttgtttcatgttggccgttgtacactcaattgtcatgaccgcctcgggagtgaaaagaggtgtgtttcaaagtttggttaggaaattttactttaggtggggtatagtggcaacgatattaatgtctattattattttccaaagtgaaaaagtatttagaaatagagggtatgagatattccttcttattcataaagcgatgaatattatgttcattattgccatgtactaccattgtcacaccctgggctggatgggttggattcggtcaatggctggtattttatgctttgatagattctgcaggattgttagcataatcatgaatggtggcttgaaaactgctacttag

SEQ ID NO: 82402 - DNA, 123 bp, Saccharomyces pastorianus
atgactagacctaaaactttttttgatatttctattggaggtaaaccccaaggccgtatagtttttgagttgtacaatgacatagtgcctaaaacggctgaaaattttttggaagttgtgtga

SEQ ID NO: 82403 - DNA, 168 bp, Saccharomyces pastorianus
atgtttaacagtgaaattatcatcctcgaattttacaccgtatatgctctcaccgccagtaccattaaaattggtaaaatcaccaaattgacacatgaagtctttgatcactctgtggagaatggaacccttgtacgacaatggtacatcagggttagtctttgccat

SEQ ID NO: 82404 - DNA, 201 bp, Saccharomyces pastorianus
atgagctattttgcatttttttatggttactacaatcaaatcacctttcgtttacaatatcatcatcagtatgtgactttgccttattctactctgaattttgctttatcgttggttgaaaagaattacatgttatttttttacttatatatgcatatttttatagaaaaacacaatcaatatttttttttactggtataa

SEQ ID NO: 82405 - DNA, 2199 bp, Saccharomyces pastorianus
atgtacaaacatgaaattggactgtgtttacagccctattcagccaagaagaagaaggattcttcgtcgtcaaaatttgcatcagcggtccacgatagggtaggcaagaaaaatctgagtgacaatgccatcatgttacaacaacaacaacagcaacttcatcatcaacaagaacagcaatttcgtcaacaacagcaagttcagttacagcagcaactgttgccacatgttggtactgatgaacaaagcaattcccctaatagcgttcctccatccgtatccaataatatggagaatcttttgttaccgcacctattagcgagtttagtgaataacaccagtaacagtaccaacagcagtgcaaatggagctgaagcgcataataatataacacaaacagctcccagttcaatgataaacaacaaccacccaaacatggccctaccagggaattcgccattgagtataccgataacacctagttttcaatcaacggccatgaatttatcaagtagccttaacggcttactctcgcctggtaggctaaattcggtgacgaatggattgcagcagccacaacttcaacaacaaaatcagcaaattccacaacaacaaggaacacagtcccccttcagcaatattcccttcgaccagctagcgcaattgaacaagatgggcttgaacttcaatatgaagagcttcaatacattatttccatacggtgctgcaaatggaatggcctctgagtttcaagagttatttggcctcggaaagtttgctacatccaataacagagcaatcaaagttagcacagcagaggaggcactcgcaaatatgcaacaggaacaggaggacaaaaacaagcaatttacgaagaacccattggataatactaagacggatgctgttaattcgggcaataacccccttaacggaaacgaaaataaagttactgcttctgatatactatctcataacaaaaacttgataatcgacaataccggtctcacaatcagtcccccacacacgttgtccaaaccttccatagatcaaaacattgcgtccccttcaacgggagtatccaatgtaacctctacaaagtcattgttatctataccggacaacaggaccgctttgggaaattctcctactttgaagacgtccccaatgggtgacctgttatccaactcggaggcattgtctccacgttcatcaaattctcacactcaacaacaatcttctccccattcaaacgcttcatcagcctcacgactagtccctgaattagtcgggctgtctagaaaatcaaatttgaatttgatagatctaaaactttttcatcactattgtactgacgtatggcataccataaccgaagcaggcatttctggtcctgaagtatggagcacttatattccggatttggcttttcattctcccttcttgatgcatacaattttggcttttagcgccactcatttgtccagaactgaagccggcttggataactacgtgtctagtcatcgtttagaagcgttgagactgttaagagaggctgtgctcgaaatttcagatgataacacagatgctttggtggctagtgctctaatattaatcctagattcattggcaaatgcttcaagcagctcaccaacggcatggattttccatgttaaaggcgccgtaactatactaactgctgtatggcccctgtcggagacatccaagttttataacttaatttctgttgacttgagtgatttggatgaggctgtaatcaaccaaagtaatcataataatgataatgacaatagcaataatggtgatggaaataacaataatacgatatcggaactcgtatgctttgacgaaagtatagcagatttatatcccgtagaaattgattcaccgtacttgataactttagcatatttggacaaactgcatcgcgaaaaaaatcaattagattttatgttgagagtcttctcatttcctgctcttttggataggacttttttagcattattaatgacaggcgacctaggggccatgagaataatgaggtcttactatacattattgagaggttataccacagaaataaaggacaagtgtggttcttggatagcgtatcacaggttttaccacaggatgttgatgagtataatggaggtggtggtatgcatggggatcctctag

SEQ ID NO: 82406 - DNA, 291 bp, Saccharomyces pastorianus
atgacatccgatgatgggaatgctggacaagaaagagagaagaatgctgaactgattgaggttgggggcaagaaagtgagcaagacttcgacagggaaacggaagtatcataacaagtccaagaccggttgcgacaattgtaaaagaagaagagtaaaatgtgatgaaggcaaaccattttgcaagaaatgtacaaacatgaaattggactgtgtttacagccctattcagccaagaagaagaaggattcttcgtcgtcaaaatttgcatcagcggtccacgatagggtag

SEQ ID NO: 82407 - DNA, 537 bp, Saccharomyces pastorianus
atgaaggactatgtccacttatttaaaacgttcatgaaaaaatttcatgcacaaagtcacaatttaagatttgtcgaaagcttcagccccatgtcgaggtgtattcgccagtccgtatgcacaaacttcaatgtctgtaggcgacaatgctttagcacttatgcctctgctctcaaggaaatgacacatcctataaaaccatcagcgcaaacgctcagacatctacaattcactcaaagaataccttttcaaaaaggattggaaatacaggagacattagttagggcaaatttggacatcaaagacattcaatcgaagattgagagaaaattaatacaattggatgaagaatataagggcactgcaacaataaatgataacgaaaaaagaatattagacaaggttatggcaatgaaacctaatccgataatattaacgtttgagtttgagccaacttatacaggtgggaagaggattaagaaaactatgacgccagatcaggacctgcaggcatgcaagcttgcactgccgtcgttt

SEQ ID NO: 82408 - DNA, 99 bp, Saccharomyces pastorianus
atgacatcatatatcgaaaggctcaagtcggcagcatcgtatcttgatacagttccagatgagcatcacgatttcagaaacccaccgccaaggttgtaa

SEQ ID NO: 82409 - DNA, 4308 bp, Saccharomyces pastorianus
atgtctgcagtaggtgcgctattagcaagggagtacaatgtgactgccgaaaaatgcgactttttcctagaaaatggttcttttgattcagtgatagcagcattgccagcgctaaatcaggaacaagagactgtaactcaaaaagttagcaagaacggaaaagaattaatcaacgttgcctcggtaaatattgaaataccagagcgaataagtctttccaacaacggcaggcagttatttaaatttattgttgatatagagatcttaccttgtgaaaatgataacgaggcaacacttgttgtgtcgtcagattccgtatccttatttcaaattggatttaaaatggagaacaattcaaaaatcgctgttgacaaacaacttccgctgatcttggatatatgtgctcataaaaaccaagaaagggccctacgaaatcagttagaaaatcgtaaatctttagaacgcaaaccatcaagaaagagaagaaaaaaaaattcaaatgttaacgatcctgaaaaattactaaaaagtcgtatacacgaattatctttgtcctacaaagattttgaatgctctccagtcgtattccgatacaatgattcctctttaacatgggttttatcttttaatttaaagttgaagtttttaaataataaattcaaccggttttccgtggaggctaaccaaatactggacttgacgttctctaatagggacgagaacgaatttgagcgatatcacaagcacggccatatccattcaaacttcattcaaaaacaatttatttctcaaatcttggaatatagtgataggctatcaaagatcaaaccgttcttaccccaatctataccagacctaaaagttaacctcttaccatttcaaagagagagcgttgagtggatgctaattaaagaagggcatggtaattctcttagtgatacacctacagtcatcgacgaagtagggcttagagattttatgaacgagtactatgcatacggttacgagctcattgcacgcagccctgacgaggtagggccatcattgttatggaacaaattaacaggatatattctaactacagaagatgctgcacatttgtacaaccaatataggaaggaaaggttaagcggcgactacccagtttgtgcaaagggggtgttagcagaagagatggggttgggcaaaactattgaaattttatcactaatactcttaaatagaaggaaattgaaggactcagaggcaacatttattgacgatgaaaatagaacaatcacgaagacaaagacgactttgattatctgtcccaatgctatcttaaaacaatggctcgaagaaatcgaattacacgcaaattccttaaaatggtatacctatagaggatataatgagataatgaaagattgcaaaactgtggacgaagctgttcaacaattgtgccaatacgatattatagttacatcatataacattattgccacggaggtccatcatgctgagtttaaccgtagtatcagatcgagaaggttgaaaagcccaaagtatgactattcttcaccgttagctttgatgcagttttatagaatcattctggatgaagttcaaatgctacgtagttcatcaacatattctgcaaaatgcacgagtttacttcatagaatacacacttggggtgtttccgggactccaatacagaacatttacaactttaggatgatcatgtcttatttaaagctgcatccattttgtgatgaggtagactttattcggacacttcaagaagaaattaaactaagaaatgaggctaaggattacactagtactgattttgtatgccaattaaagggcgttcggttttctatcaaggattgtatgaacattttttacaggtatgatctttgcataaggcattcgaaagccaatgttgcgtctcagattcatattccgcggcaacacaacttcatcattcccctggagtttgcgcctatcgagtgggacaactatttaaatctttggaacaattttttagagttgagtggctataattcggatggcagtggatcaccccgtgtaagcaatgcctttttaaacgaatggttgtctaggctgcgatatatatgttgccatgcattatttccagaaattttaagtacccgacagaagcgccttcatgggcacttgtcaagaatttcaaatatagacgatatcttaatatccatgcgaatggatgcatttgacagtttaattggctattacagagagagattccatttatcgatcaagcaggcacagtatgaacttgaaatttccaatactccggccaaagcccttgaatcatttatcaaaatcagagatgatttgatgatacacatacgccaaaaattcaacgtcgaggatccgtttgataagtcgttaaacctcagtgaagatggggacgaacatatggacgagaggtttggtgagaaggaaacatcttcaagcgacgaaagcgatagagaaataaatggtgctaaaaaccatgataatcacaacaatgacggaatgttatccaaccacctgaagaagaaaggattacgtgctatgatgaatttactgcatgattgctacttcttcctcggttctgtttactataacttgggcactcgtaagctagaagaggcggacgacaagcatcgaaaagagaagactgaagaagtggtgtattctgatgtttttccaaaaaatgagttagaggaaattgaagagaatagacttttagaacaagaaaattatgcgaatgcggaaattttgaggaagtcgatcctctcctctgaggctagaaaagttgatatgactattaaaatggccagaactaagtttgctcctatgacgagcaatatacctttgcgattaatcaatattgaatttgaccacaaaaatgactactcatctaatttagcagtatctcgttgtttcaagtctttgagtaagttgatagaagggttgaatgaacaaactaaaaacttcaacgagttattggatgagttactcattactatctatgaacctgtccacaggacagaggacgatgatagcactaataaaattatcggtaatgaagaatattcaacatcgattgacagtcaagataagatattcagtcttcttggttgcttggagataattttacagaatagggacaatattttaacttcagaatcagaagttaaaattccgaagcatttggtaccggaaggttcaataatttcaaaatatcaaaagcagttattgaacagcttgcgcttgatttcaggaacacctttacgaactgtttttgatgaactgaagaacagcaggatagtaagacggatatcctcaagcaatgaaagtgaatccaccattcaaaattttgaggactacttacttcagtacgaagttgaaagtaaaagcctgttcaagtacaataaacaggtaagagaatctttgaaaatcctgggatcgatttataatgccaagacggaatattatagtcaattacagaggatttccgattcattggtgtccttgcactctttgagtgctccacaactcagccatctaataagaactatcaataagtcattgggcggtacactagatgcaaaaatcaataacattgaatcacggctgatatatttaagaaatttgtccagattgaaagacacattaaacgataatcaaatattgagctgctctatctgtttgggagaagttgaaataggtgctatcattaagtgtggacattatttttgcaagagttgtatccttacgtggctacgagcccatagtaaatgccctatatgcaaaggtttctgtagtatatcggaagtctataactttaagttcaagaactcaacggagaagagggaaaaagaaattcaagagccacaaagagagggcgccgattcgtctcaagataattcaaatgaaaactcgattatatccaatatgagtgaagtagaaaaattattcggaaataaatacgagcaattccatcaaattaatgaagtccatcaaattcacataaaggaaagttttggtgctaagattgatttcgtcatcaagttaatatcttacctgaggctaaaaagtgagcaggaaaacgctgatccgccacaagttattctatactctcaaaagacagaatatttaaaggtcattggtaaggtattaaagttgtatcacattgaacacttggcatgtctatctaatacagccaatgttggcgaaactataaataacttcatacgccagccttccgtcacttgcctacttttgaatgtgtaa

SEQ ID NO: 82410 - DNA, 651 bp, Saccharomyces pastorianus
atgaggtttttgaggggatttgtattttctttggctttcactctatataaagtaactgccacggcagaaataggatctgaaattaatgtggaaaatgaggcaccacctgatggtttatcctgggaggagtggcatatggaccatgagcatcagctaaaagattacactccagagactttcttcgcgttacatgatatcaagaagaaaggatttttagatgaaaacgatattctatctctctacgggttgaaccgtgaagaaattgtgggggctggtgatggtatgggacaacacgatgaatctgagaaaattgacaatgaaatggctaagcgtgttgttagccttattatgaggttattggatgttgatgataataccaaaatcaccaaggaggaatatctacaatttgctaagagaggaaacaagttccctgaccttggcgttggtgtaggtcaccactccgattttgaactagaatatgaaattcatcactggaataagtttcataaggacaaagatccagacgttaaagtcgttcacaaagaagacatagaacatgaattgcttcatcatgaacatgaaattgaacatgaagaagaaatcaaagaggcgcttctagagctatgtaatactgatgacaatagagtctaa

SEQ ID NO: 82411 - DNA, 1617 bp, Saccharomyces pastorianus
atgtcgcataccccttataattcatctgtgccttccattgcatccatgacccagtcttcggtctcaagaaatcctaacatgcatacagcaactacgcctggtgccaacaccagctctaactctccacccttgcacatgtcttcagattcgtccaagatcaagaggaagcgtaacagaattccgctcagttgcaccatttgtcggaaaaggaaagtcaaatgtgacaaactcagaccacactgccagcagtgcactaaaactggggtagcccatctctgccactacatggagcagacctgggcagaagaggcagagaaagaattgctgaaggacaacgaattaaagaagcttagggagcgcgtaaaatctttagaaaagactctttctaaggtgcactcttctccttcgtctaactctttgaaaagttacaacactcccgagagcagcaacctgtttatgggtaacgatgaacacaccacccttgttaatgcaaatacaggctctgcttcctctgcctcgcatatgcatcagcaacaacagcaacagcagcaacaggaacaacaacaagacttttccagaagtgcgaacgccaacgcgaattcttcgtccctttctatctcaaataaatatgacaacgatgagctggacttaactaaggactttgatcttttgcatatcaagagtaacggaaccatccacttaggtgccacccactggttgtctatcatgaaaggtgacccgtacctaaaacttttgtggggtcatatcttcgctatgagggaaaagttaaatgaatggtactaccaaaaaaattcgtactctaagctgaagtcaagcaaatgtcccatcaatcacgcgcaagcgccgccttctgccgctgccgccgctaccagaaaatgtcctgttgatcactccgcgttttcgtctggcatggtggccccaaaggaggagactccccttcctaggaaatgtccagttgaccacaccatgttctcttcgggaatgattcctcccagagaggacacttcgtcccagaagaggtgtcccgttgaccacaccatgtattccgcaggaatgatgccgcccaaggacgagacgccttccccattttccactaaagctatgatagaccataacaagcatacaatgaatccgcctcagtcaaaatgtcctgtggaccatagaaactatatgaaggattatccctctgacatggcaaattcttcttcgaacccggcaagtcgttgccccattgaccattcaagcatgaaaaatacagcggccttaccagcttcaacgcacaataccatcccacaccaccaaccacagtccggatcccatgctcgttcgcatcccgcacaaaacaggaaacacgattcctacatgacagaatctgaagtcctcgcaacactttgtgagatgttgccaccaaagcgcgttatcgcattattcatcgagaaattcttcaaacatttataccctgccattccaatcttagatgaacagaatttcaaaaatcacgtgaatcaaatgctttcattgtcttcgatgaatcccacagttaacaactttggtatgagcatgccatcttcatctacacggggatcctctagagtc

SEQ ID NO: 82412 - DNA, 1746 bp, Saccharomyces pastorianus
atgactttgaaaccttcaaagagacgtaaaggcaggtctcgccattccaggaagaagcaaataacgtcagcgatactgactgaggaaggaataatgatcaaggcaaaaccatcaagtccttacacatacgcaagtagaatggcagataaacgaagtcgcagcagcattgacaacatcagtagaactagctttcaaagcaacagtgataacaacagtatatttgaaacggcttcactaattagctgtgttacctgtttaagcgatactgatacaatagacagatcggaaacatcgacaacggatacaagtaaagatgatctttctgctaatccaaaacttcattatccttcggtgaatggtcaattgccagcaaacaccgttatcccctatggacgaattctggatgccagatacattgaaaaggaacctctgcattattatgatgccaattcatcacccagttcacctttaagcagctcaatgagtaacattagtgaaaagtgtgatcttgatgaattagagtcctcccaaaaaaaagaaaggaagggcaactcgctatcgcgaggaagtaacagtagtagtagcctcctgacttccagatctccttttacgaaactagtagaggttatatttgctaggccaagacggcatgacgttgtacccaaaagggtttcattgtatattgactataaaccccattcatcttctcacttaaaagaagaagatgacttggttgaggagattttaaagagaagctacaaaaacactagaaggaacaaatccatatttgtgatcattaatccgtttggtggtaaaggtaaggcgaaaaaactgtttatgacaaaggcaaagccgttactattagcaagtcggtgttccatagaagtggtttatacaaaataccctggtcatgctatagagatcgcgcgggaaatggatattgacaaatatgacactattgcttgcgcttcgggagatggcattcctcatgaggtgatcaatgggttataccaaaggcctgatcatgtcaaagcattcaacaatatcgccattacagaaattccgtgcggatcaggtaacgcaatgagcgtatcctgccactggacaaacaatccttcgtactcaactttatgcttaattaaatcgatagagactagaattgatttgatgtgttgttcgcagccttcttatgcaagagagcacccaaagttatcatttttaagtcaaacatatggtctcattgcagaaactgacataaacactgaatttattagatggatgggacctgcaaggtttgaattgggtgtagccttcaatatcatacaaaaaaaaaaatatccttgtgagatatatgtaaagtatgctgccaaatcaaaaaacgagttaaaaaatcattacctggaacacaaaaataaagggtcgttagaattccagcatattactatgaacaaagataacgaggattgtgataattacaattacgaaaatgaatacgaaaccgaaaacgaagatgaagatgaagatgcggatgcggatgacgaagactcccacttgatatctcgtgatctggcagattctagtgctgatcaaattaaagaggaagatttcaaaataaaatatccattagatgaaggtatccctagtgactgggaaagattggatcctaatatttcgaacaacctaagtatcttctatacgggtaaaatgcgacctgcaggcatgcaagctggcactgccgtctttaca

SEQ ID NO: 82413 - DNA, 153 bp, Saccharomyces pastorianus
atgaaagaggtgatgaaaatgttatattgtgcattgttggtaacaaaagtgatttatcagatgaaaggcaaatctcaaccgaagagggagagaaaaaagcaaaactattgggtgctaaaatctttatggaaacgtccacaaggcaggctataa

SEQ ID NO: 82414 - DNA, 522 bp, Saccharomyces pastorianus
  modified_base (509)..(509): a, c, g, t, unknown, or other
atgagcagatccgggaaatcattgacaaagtacaaaattgtttttttgggagaacagggtgttggaaaaacatcgctgatcactagatttatgtatgatacgttcgatgatcattaccaagccacgattggtatagattttctttccaagaccatgtatttggatgataagacaattagattacagttatgggatacagcaggtcaggaaagatttagatcattaataccttcatatatcagagattcgagagttgctattatcgtttacgacattacgaagagaaaatcatttgaatatattgataaatggatagaagacgttaaaaatgaaagaggtgatgaaaatgttatattgtgcattgttggtaacaaaagtgatttatcagatgaaaggcaaatctcaaccgaagagggagagaaaaaagcaaaactattgggtgctaaaatctttatggaaacgtccacaaggcaggctataatgtcaagctttattcaaaaagatgccanggggatcctctag

SEQ ID NO: 82415 - DNA, 1905 bp, Saccharomyces pastorianus
atgccttacagccatggtaagaagcttaaaccgtctttgaaactcgcaaaaacaatctccacttcttcttttgtttcctcaacaacctctaattcattttcaccactagaagactctacatctgcatcttcgtcgacatcatcttcatcatcagggaaatcggtaaggtttgctgcacatttatacacagtcaaaaagttcaacacaaaattggcgcctatctcgatatcagaaaaagccgcttcaaatcttacaagaaatttacataacaatgccattccactaacgttccccttcattggaggtgaagatcatcgttatagtttagacattttagattacagtgatttagaatatgacaataaggatgttgagtatgacaacgagagtgacgtagaggataatgcaatgcttatgcatgatcgtagcatgttcatggaaaaggagattctctgctttggtgaagaggagacattcgatatggcagattggaaactggtcagtaataatttgaatccattcaaaagtgactgtaaagtggacgttactgagttagaagacaagattttcaaatacttaaatggacaaaatataaaggttcattcattagaactatctgatcctgtaagctacgaggatatttgtagcaataattttggtaactgtcaaatctggggccttatatttgtcaataatttgaacttcgagaaaaaaatagagataaaatttactttaaataactgggcagacattcattatattaatgcacactaccacaagtctgtcacccctcatgttgacgaattcaaatttattattgatatatctgcgttgaagttaaatctaatatcaaaaaacttgatttacgctaacttttttgaaaggaaaactacttgtctcctgaatttgcagttctgttgtcgttatgatgtaaatggtttcgaatatagatcattttacgataataatgactataaaaactatgaaataacgatctctttgtcagcaataaatttaaatcgtgcggtttcgaattcatcgatatttaattccaatcttgggccttccaaaatgagggctagcaatgcagaggttactatgtcgaaaaataataaaaattctaaaaagcctctcagaaaattcattaaagatacagattactacaacgactccccgttaaagcacaaattttatcaatcgtttgaaacaaaagcggcttgtaaaaccgaacctgtaccccaaactttcaaagctgaaacaattgattgtgaaattgaaccatttaattatttctttgaaccgcctgattctcaaactaatgaggacatgtccgatagctcatatgacttatcgctacaagattttaactattgggaatttagtaaccacggactagggaaagcgctggctgactcagatatcttacaatttaaaaattatccgaaaccagagccttttagcaggcctcccataatagatgacacattcacattaaataccgacgataggaccttaggtttaaaaacagaaaagcttgaagataatttggccaaagagtggaaaagcgctaagacaaggaccacgttaaacgagacgccattacacgatgatgagcatagaacttccttcacctacaccacttggaataattctaccgatacattgatgaaaaaacaagaggagcgaccagtagaatcagcctcttgctctcagttatccattgcaaccataaaggcggaagaagatttactataccaagattatatcaacagcgggagggaaagctcatctccggaaatttctcccttgaataacacaacctcattaccattttttccaggtgataatatgagtgacagctcaggagaatatgaggagagatctctcttagccctaataaaattc

SEQ ID NO: 82416 - DNA, 171 bp, Saccharomyces pastorianus
atgcgattcaggtctcaacgtgcagtgtgcaggagcaggaactattcaatgtattgttgttccagggtttttgttcgcaacccacgtcttgaccgacggtacccgcaggtgaaaattttagcaaagttacactttttttttcattttttttttcttttctcctccatctaa

SEQ ID NO: 82417 - DNA, 222 bp, Saccharomyces pastorianus
atgtgccatcatcatgttcgatgtacttccagaattacttacaagaacgttccaaactggcacagggatttagtccgtgtttgtgaaaacatcccaattgtcttgtgtggtaacaaggtcgatgtcaaagaaagacaggtcaaggccaagactatcactttccacagaaagaaaaacttgcaattactacgatatttctgccaagtccaactactactttga

SEQ ID NO: 82418 - DNA, 330 bp, Saccharomyces pastorianus
atgtctgccccagctgctaacggtgaagttccaacattcaaactagttcttgtcggtgatggtggtactggtaagaccacttttgtcaagagacatttgaccggtgaattcgaaaagaagtacatcgccaccattggtgtcgaagtgcatcctttatccttttacaccaactttggtgaaattaaatttgatgtctgggatactgccggccaagaaaaattcggtggtttaagagacggttactacattaacgcccaatgtgccatcatcatgttcgatgtacttccagaattacttacaagaacgttccaaactggcacagggatttag

SEQ ID NO: 82419 - DNA, 246 bp, Saccharomyces pastorianus
atgggcagttctcgcgttattcgtcatcaggcaagtaattatgcccaatcagcttaccaatgtcacataaaggaaccactattatccctttttggtaatgaaaaacaacactcttccggtacgacagccgctgcggcaattacttttccccaaaagctcataatcgatcaattaacgcgtaaacgaaaaacaaaaaaaaaattacgtaaattaggtcttcatacgagcgtttttttttttgtttga

SEQ ID NO: 82420 - DNA, 1542 bp, Saccharomyces pastorianus
atgctgttgtgtaatagaaaagtccccaagactttaaatacctgttttatactgcatatattcactctgttaacactgggtgtgttagtgtcgggaatgccgtcaaaaatggtatcattcgcctctcaggagactttgcagagaataaataatctccttcgagggtctgccaatcgagatgttgacattattgcagaatatttgaaaaaagacgacgatgatgatggcggcgataaggatcaccataacatcgatattgaccctttacctcgccgtcctagtttaacgcctgataggcaacttctaaaagtcggtttgcatggtgctataagttcagatttagaagtctgtagtaatttgactataaatgaggtactcctaaaatttcccggttctaacgctgcagacgctgcagtaacacaagctctttgtaagggtatggtgaatttttttaatagtgggattggaggtggtggctacgtagttttttctggcaaagacgatgaagatcgtctatccattgattttagagaaaaagcacccatggattcacataagttcatgttcgaaaactgctctctatgctcaaaaatagggggtcttgctgtcggtgttccaggtgaattgatgggtctctatcgcctctttaaagaaagaggtagcggccaagttgattggcgtgatctaattgaaccagtcgcaaagctgggaagcgtgggttggcaaataggcgaagcactcggtgccactttagaactttatgaggatgttttcctgacgttgaaggaagattggtcgtttgtattgaattctacccatgacggtgttttgaaagaaggcgattggatcaagaggcgggcactatctaacatgctaatggaactggctaaaaatggttccgtggccccattttatgaccccgatcactggattgcaaaatccatgattgatactgtcgcaaaatacaatggaataatgaacttgcaggatgtttcatcgtatgatgttcatgttactaaaccactatccatgaaaatcaggaagggcgccaatttcatccctgataacgatatgaccgtattaacaagtagcggctcaagttccggggctgcactacttgcggcgttaaggataatggataatttccagaatcaagaagggggcgattatgaaaaagaaactacctatcatttgcttgaaagcatgaaatggatggcaagcgcaagaagcaggttaggcgattttgaaggcgaagcattgcctaagcatatagaagaggtattggatccagaatgggctttgaaagcagtgaaatcaatcaaaagaaactctcaagacggaaattttaaaactttagaaagctggacgctttatgatccggcatatgatatcaataacccgcatggaactgaccacttcagtatagtagattcacatgggaatgctgtttccttgacaaccaccatcaacctgttgttcggttccttagtccacgacccaaaaaccggggtgatcttcactaatgaaatggacgatttcgct

SEQ ID NO: 82421 - DNA, 354 bp, Saccharomyces pastorianus
atggggggtaatagaattgtatctatgtatctgacgaccctgtattacacgaaggaaatagtagatgaaaagacaagagagcaagaaaaaggaaaaactttctttctaacagacgctttacttaaccttatatatatcttatttttttcatcgagcgtgttcaattggacaaggtgccaccttttcgacacttcggttattatgttacacagttttcatgaggatggcgccttgactaacttaattagtcatttgccaaccaccacagttccccaatatcgacagcttcacgtgccatttgccatttgcgatcatgtgaccgaaagagaaaaagcaaaaaataatgagagctaa

SEQ ID NO: 82422 - DNA, 84 bp, Saccharomyces pastorianus
atgccatctcatttcgatactgttcaactacacgccggccaagagaacactggtgacaatgctcacagatacagagctgtacca

SEQ ID NO: 82423 - DNA, 1695 bp, Saccharomyces pastorianus
atgtccgatactaacacgtctattcccaatacaagttctgcaagggaggcaggcaatgcttcacaaactccatcgatcagctcttcatctaacacttccactaccactaacacagaatcatcctcagcttctctttcttcttccccctcgacaagtgagttgaccagcattcgtccaattggaatagtagtcgctgcttatgactttaattatcccattaaaaaagacagttcttcgcaacttttgtctgtacaacaaggggaaaccatttatatacttaacaaaaactcatctgggtggtgggatggattagttattgacgacagtaatgggaaagttaacagaggctggtttcctcaaaacttcggtagacctttaagagacagtcatctcagaaagcacagtcatccgatgaaaaaatatagttccagtaagagctcaaggcgcagcagcttaaatagcttgggcaatagtgcatatttacatgtgcctagaaatccgagcaagagcaggagggggagttctactttatcagcgtctttatcaaatgcccacaatgcagaaacaagttccggccacaataacaccgtatcgatgaataattctcccttttcagcgccaaacgatgcttcccacataacccctcaatcttcgaactttaattccaatgctagtctatcccaggatatgacaaagagtgcagatggctcatctgagatgaatacaaacgcaattatgaataacaatgaaacaaatttacaaacttctggtgagaaagcaggtcccccactagtagcagaagaaacaattaagatattaccgttggaagagatagaaatgattattaatggtatacattcgaacattgcttcgacttggtcccccataccactgataacgaaaacatccgattacaagttggtatactataacaaagaccttgatatatactgttcagaattacccttgatttctaactcaattatggaatccgatgacatttgtgacagcgaaccaaaattcccgcccaatgatcatcttgttaacctatacactagagatctgaggaaaaatgcgaatattgaggacagttctacgagatcgaagcaatcggaaagtgaacaaaatagatcaagccttctaatggaaaaacaggattcaaaagaaactgatggaaataataacagtattaatgatgatgataataataacgaaaataacaaaaacgaattcaatgaggctggtccttcatcattaaattctttatctgctccagatttaacgcagaatattcaatcaagggtagttgccccaagtcgctcttctatactggccaagagtgacatcttttatcactattcaagagatataaaattgtggacagaattacaagacctaacagtttattatactaaaacggctcacaagatgttccttaaaaagaatcgtctcaatttcacgaaatactttgatttgatatcagattcaatagtcttcacacagttaggctgcaggctaatgcaacatgaaattaaagccaaaagttgcagcaaggagattaagaagattttcaaaggtctaatctcttcattgtcaaggataagtatcaattctcatttatatttcgattcagcttttcacagaaaaaacatggatactatgaatgacgaggataacgataatcaggaaaataat

SEQ ID NO: 82424 - DNA, 1740 bp, Saccharomyces pastorianus
atgagatcatcattcagtacagtcaatgagaacgatatggaaaatttctcagtcttaggtccaagaaatagtgttaattctgtcgtaacaccaaggacttcaatacaaaattctactttggaagatttttcaccgtccaacaaaaattttaagtcagctaaatcgatttacgaaatggttgatgtggaattctcgaaatttttaaggcatgttcagttactttattttgtgttacagagctcagtcttctcagatgataatactttaccacagttgctcccaagattttttaaaggttcatttagcggtggttcttggacaaatccattttcgacttttattacggatgaatttggtaatgcgacaaagaacaaagctgtcacatctaatgaagtgaccgcttcgtcgtccaaaaattcctcaatatcaaggattccaccaaagatggcagatgctattgcctctgcgtcaggatatagcgctaattcagaaacaaattcccaaattgatttaaaagcaagcagtgccgcgtctggttcagtttttacacctttcaaccgtccttctcataacagaaccttttcaagagcaagagtttcaaaaaggaagaaaaaatatccattaactgtagacactttgaatacaatgaagaagaaatcctcgcaaatttttgaaaaattaaataatgctacaggtgaacacttaaaaattataagtaaacccaaaagcagaattaggaatttggaaataaattcaagcacatacgaacaaataaatcagaatgttttactattggagatactggagaatttagatctgtcaattttcatcaatttgaaaaacctgattaagacacccagtattttgttggatttggaaagcgaggaatttttagttcacgccatgtcttcggtctcctcagtactaacagagttttttgatataaagcaggcttttcatgacatcgtcatcagattaataatgacaacgcaacaaacgaccttagacgacccgtatttgttttcctcaatgaggtccaatttccctgtcggacatcatgaacctttcaagaatatctctaatacacctttggtcaagggccccttccataaaaaaaatgaacaattggcactctccttatttcacgtattggtgagtcaagatgtggagttcaataaccttgaatttttaaacaactccgacgattttaaagatgcttgtgaaaagtatgtcgagatttctaatcttgcgtgtattattgttgatcaattgattgaagaaagagaaaatttgctgaactacgcagcaagaatgatgaagaataatttgactgcagaactattgaaaggtgagcaagaaaaatggtttgatatttattccgaggactatagtgatgacgattcagaaaatgatgaagctatcatcgatgacgaattaggatctgaggactatattgaacgcaaagctgcgaacatagagaaaaaccttccatggtttttaacttcagattatgaaactagtcttgtctatgactcaagaggaaaaattcgtggcgggacaaaagaggcactgattgaacatttaaccagtcatgaacttgttgatgcggctttcaatgttacaatgttaataactttcagaagtatattaaccacaagagagtttttttatgccctgatttacaggtactacttgtatcctcctgaagggctgagttacgatgattacatatttggatag

SEQ ID NO: 82425 - DNA, 1059 bp, Saccharomyces pastorianus
atgaaaccgttgaagattattgaaaaagtgaaaaatgagaaaaacggtaaggatatatcatctctgggtgatagcggtagtactgctgttagttttccatcctctggtaagcccattacgaaaaaatcggacgtgccagtggttgtagcatcgccatcaatttccatcatagaaaaatctgaatcttctactcgagagagtgggaaggtacgaaataatacatctggagaagcgaacttaacgtttgtgtcgccgttaaaaaacactaagaattcttcaagaattacgagtgagccatctccgcgagaaagtttgcctctgaaagttgtctcgaactcgagaagtccaagtcctcaaggtaacacattgccgctaattggtaaatttcggcaggattatcaggcatcacctccgaagaaagttatcactaaaccagtggcagaaacggcgaagccgtatgcaaatattccgccagctgcagacgtactttactcgccaaccgtgaccaaaatgaggaaattcagagagaaagtgcagaaatttgctctcaactctggtcttggattaagaatatctacttcagaagaaaacttgaataattctgatgtcaactcaaccacgcacaacgctaacataaataacctcgtcgaatttgttgagagtaaatcaatggttgttcttcctatggcacagggcattttgaatgatgttcaagcctctaaatcaaaattgtacaagtccgcaagatcagtttcgagattatgtcaaaattccatcgagattattcctattttggaatcggtgattgatatgactaccaaagcaatggtccaaaaaagttttaaactggatttaggcgagcactgtaaagaaattattgaaaggctcacagattgctcgcaaaagttatcggaattgtgtacttatggatgcgattccacaaagcttgggaagaaacgattctatcaaaaattagcagatatcctgatggaagtaaccaagcgcaccagggaattggttgaatgtgtgaagatggcgaacaggcagactctttcatag

SEQ ID NO: 82426 - DNA, 570 bp, Saccharomyces pastorianus
atgattagctcagaattaacgaatgatcaaatcatagaccttatatcggattataagaatttcaaaagaattatagaggcctctgtaccagaagaagatagaagaaggaatcaaaaccgccaaaatagaaataaagacctgacaaaattgtcgaatgtacaattttggcaactgacgactgatgtcaacgatgaattgatgaaaagattgacagattcgggtgcggatgcatcactaaatgatcttgatctgaaaagaggtaaagcacaatctaaactgtctcgattgaaggacgcgaagttccataaattgattcttgatattttcacggaaattgaaaggagaaacttacatcatttggatatggggacgcataacaatgggttagacgagggtgatctaaatttctatttaaatgacacattatttgaatcattcaaaataaacgatgattttatgggcgtgaatggtattatatccattgaagtcttccgagaattaaaaactcaatttacactttattttcaaaacacgctccatcgaattgatcctgtggataccaccaccaca

SEQ ID NO: 82427 - DNA, 219 bp, Saccharomyces pastorianus
atgaaaatcttattcgagttcattcaagacaagcttgacattgatctacagaccaacagtacttacaaagaaaatttaaaatgtggtcacttcaatggcctcgatgaaattctaactacgtgtttcgcactaccaaattcaagaaaaatagcataccatgccttcctggtgactgaagccacaaagcagtcattgatcactgcatcatttacctgttga

SEQ ID NO: 82428 - DNA, 312 bp, Saccharomyces pastorianus
atgttccacagtttggtcggtacatacgcattcgttgatttattgatcaattatacagtaattcaatttaatgggcagtttttcactcaaatcgtgggtaacagatgtaacgaacctcatctgccgcccaaatgggctcaacgatcatcctcatcatccgcaactgctgcgcaaatcaaacaacttacagaacccgtgacacatcaacaatacttacacaagctcaatataaatccctctccttatcttccttatagcaagatcctccctccaccatcatctatcaaaaagctcactgacctgagagaagct

SEQ ID NO: 82429 - DNA, 261 bp, Saccharomyces pastorianus
atgagacactgcattatctttatagtgtgtatcagcattgttgaaattagaaccgttcatattgaattcatcaaagagatcgttgtcatattccgcatagttgaccactttagcccttttatgctgccttgtttgttgagccattgtaaagatggggataccatcatcttcgtttgtcaatctgttgtgaaagttagaaatataagcttgtggaataagctggttttggtgcgacattgtgtgctgctatggcctttcttc

SEQ ID NO: 82430 - DNA, 732 bp, Saccharomyces pastorianus
atgaacagagtatccttgaagtcagatattttgctctcccccatggttaaccttggaacgcaagatattcaacggcttctatatactacggtcatattatctccaatatacgtgatgataacctggctacttttaccaccgagaagcttgatgctgatggtgggcatgttccttttaacgtatcactcaccatggtctaaagtagcaagaaggcttttatggaagtttaagattgtcaggctgcttgttttctacgtcacgggtttagaccttggtggaataaataaggaccagggtatttttgctacagtgcagaagcaagtgaaaaagttggcatcaacagaaaacagtaatggcgtattatccgattccaagcctatccgttttacttatgttttgtacgagaaccagcgtcgttggttaggtattggatggaagcccagtatgttgagttatgagaggactccatggaccgatgaatttttgaatgaggctccctctcctgaaaactttcatctacctgaagagactaacactatggtttggagatgggtcgacaagacatggaggctagacatgactaatgacggtgccattcaagtgcccaattcaaaggcgagaacttcggcagatccctcccctgacgagggatttatatattacgacaatacctggaaaaaaccaagtaaagaagattccttttctaaatatacagaagaagaagatgggtaa

SEQ ID NO: 82431 - DNA, 498 bp, Saccharomyces pastorianus
atggatcccacaagagctccggatttcaaaccgccatctgcagacgaggaattgattcctccacccgacccggaatctaaaattcccaaatctattccaattattccatacgtcttagccgatgcaaattcctctatagatgcaccttttaataataagaggaagaaaaagcatcctaagcatcatcatcaccatcatcacagtcgtaaagaaggcaatgataaaaaacatcagcatattccattgaaccaagacgactttcaaccactttccgcagaagtgtcttccgaagatgatgacgcggattttagatctaaggagagatacggttcagattcaaccacagaatcagaaactagaggtgttcagaaatatcagattgctgatttagaagaagtccacatggaatcgttcgtcaagcaagaaccttggaagactacgaattcccctcacacagattatcgaaaaaattactggatccaaataaactgccgttag

SEQ ID NO: 82432 - DNA, 576 bp, Saccharomyces pastorianus
atggtacctctggcaatcttggttgggacacccaaagcttggaagaaagaagtcttacctggttccataccagtgttgacggctctaacccagatgtcttctggagcaacggcaccagctctggctggagcagcaactctgttagagacaataacgttcttgatttcagtcaatggttcgttagtgaaaacgaaaccaacgttacctttgacaaaaggcaacaacttttcgaagtctggcaagtcggataagaaacctctgatggctcttctaaccatggtgttcttacccatcaagacgacagctctgcctctcaattcctttctgacttcgtgcatttgttgggaagaaacattgtcaacaccaacaacgaacaaagacttgtattcttccaagtattctcttaatttagcaaagtattcagctttcttttcacgaatgcctcccatttcaaacttattatacgtatttattagactgtttgcaggatgtctaaaggtattccggttatgtatcttatgcgtgaagctgaaaaagaatcggaatagatttgtaatcttcattacttatacttga

SEQ ID NO: 82433 - DNA, 819 bp, Saccharomyces pastorianus
atgaacactgatcaacaaccttatcagggccaaacggactatacccagggaccaggtaacgggcaaagtcaggaacaagactatgaccaatatggccagcctttgtatccttcacaagctgatggttactacgatccaaatgtcgctgctggtactgaagctgatatgtatggtcaacaaccaccaaacgagtcttacgaccaagactacacaaacggtgaatactatggtcaaccgccaaatatggctgctcaagacggtgaaaacttctcggattttagcagttacggccctcctggaacacctggatatgatagctatggtggtcagtataccccttctcaaatgagttatggagaaccaaattcgtcgggtacctcgactccaatttacggtaattatgacccaaatgctattgctatggccttgccaaatgaaccttatcccgcttggactgctgactctcaatctcccgtttcgatcgagcaaatcgaagatatctttattgatttgaccaacagactcgggttccaaagagactccatgagaaatatgtttgatcattttatggttctcttggactctaggtcctcgagaatgtctcctgatcaagctttactatctttacatgccgactacattggtggcgatactgctaactataaaaaatggtattttgctgctcagttagatatggatgatgaaattggttttagaaatatgagtcttggaaactctcaaggaaggcaagaaaagctaagaagaaaaacaagaaagcaatggaagaggccaatcccgaagacactgaagaaactttaa

SEQ ID NO: 82434 - DNA, 2490 bp, Saccharomyces pastorianus
atggaagaggccaatcccgaagacactgaagaaactttaaacaaaattgaaggcgacaactccctagaggctgctgattttagatggaaggccaagatgaaccagttgtctcccctggaaagagttcgtcatatcgccttatatctgttatgttggggtgaagctaatcaagtcagattcactgctgaatgtttatgttttatctacaagtgtgctcttgactacttggattcccctctttgccaacaacgccaagaacctatgccagaaggtgatttcttgaatagaatcattacgccaatttatcatttcatcagaaatcaagtttatgaaattgttgatggtcgttttgtcaagcgtgaaagagatcataacaaaattgtcggttatgatgatttaaaccaattgttctggtatccagaaggtattgcaaagattgttcttgaagatggaacaaaattgatagaactcccattggaagaacgttatttaagattaggcgatgtcgtctgggatgatgtatttttcaaaacatataaagagacccgtacttggttacatttggtcaccaacttcaaccgtatttgggttatgcatatctccattttttggatgtactttgcatataattcaccaacattttacactcataactatcaacaattggtcgacaaccaacctttggctgcttacaagtgggcatcttgcgcattaggtggtactgtcgcaagtttgattcaaattgtcgctactttgtgtgaatggtcattcgttccaagaaaatgggctggtgctcaacatctatctcgtagattctggtttttatgcatcatctttggtattaatttgggtcctattatttttgtttttgcttacgacaaagatacagtctactccactgctgcacacgttgttgctgctgttatgttctttgttgcggttgctaccatcatattcttctccattatgccattgggggggttgtttacgtcatatatgaaaaaatctacaaggcgttatgttgcatctcaaacattcactgctgcatttgcccctctacatgggttagatagatggatgtcctatttagtttgggttactgtttttgctgccaaatattcagaatcgtactactttttagttttatctttgagagatccaattagaattttgtccaccactgcaatgaggtgtacaggtgaatactggtggggtgcggtactttgtaaagtgcaacccaagattgtcttaggtttggttatcgctaccgacttcattcttttcttcttggatacctacttatggtacattattgtgaataccattttctctgttgggaaatctttctatttaggtatttctatcttaacaccatggagaaatatcttcacaagattgccaaaaagaatatactccaagattttggctactactgatatggaaattaaatacaaaccaaaggttttgatttctcaagtatggaatgccatcattatttcaatgtacagagaacatctcttagccatcgaccatgtacaaaaattactatatcatcaagttccatctgaaatcgaaggtaaaagaactttgagagctcctaccttctttgtttctcaagatgacaataattttgagactgaatttttccctagggattcagaggctgagcgtcgtatttctttctttgctcaatctttgtctactccaattcccgaaccacttccagttgataacatgccaacgttcacagtattgactcctcactacgcggaaagaattctgctgtcattaagagaaattattcgtgaagatgaccaattttctagagttactcttttagaatatctaaaacaattacatcccgttgaatgggaatgttttgttaaggatactaagattttggctgaagaaaccgctgcctatgaaggaaatgaaaatgaagctgaaaaggaagatgctttgaaatctcaaatcgatgatttgccattttattgtattggttttaaatctgctgctccagaatatacacttcgtacgagaatttgggcttctttgaggtcgcagactctatatcgtaccatttcagggttcatgaattattcaagagctatcaaattactgtatcgtgtggaaaatcctgaaattgttcaaatgtttggtggtaatgctgaaggcttagaaagagagctagaaaagatggcaagaagaaagtttaaatttttggtctctatgcagagattggctaaattcaaaccacatgaactggaaaatgctgagtttttgttgagagcttacccagacttacaaattgcctacttggatgaagagccacctttgactgaaggtgaggagccaagaatctattccgctttgattgatggacattgtgaaattctagataatggtcgtagacgtcccaagtttagagttcaattatctggtaacccattcttggtgacggtaaatctgataaccaaaaccatgctttga

SEQ ID NO: 82435 - DNA, 486 bp, Saccharomyces pastorianus
atgaccactagaggtggtgtttccaaagcacaaaagggtttgcatttaaacgaagatatttatgctggtatgaatgctatgcttcgtggtggtcgtatcaagcattgtgagtattatcaatgtggtaaaggtagagatttgggtttcggtacaattctaaatttcactactaagattggtgctggtatgggtgaacaaatgttatctcgtgaatattattatctgggtacccaattaccagtggaccgtttcctaacattctattatgcccatcctggtttccatttgaacaacttgttcattcaattatctttgcaaatgtttatgttgactttggtgaatttatcttccttggcccatgaatctattatgtgtatttacgataggaacaaaccaaaaacagatgttttggttccaattgggtgttacaacttccaacctgcggttgaatgggtgagacgttatacattgtctattttcattggt

SEQ ID NO: 82436 - DNA, 1410 bp, Saccharomyces pastorianus
atgttcgaagtgtctgcgggccaaatctactcttctgcgttattaaatgatttagcaattggtggtgctcgttatatatccaccggtcgtggttttgcaacttctcgtataccattttcaattttgtattcaagatttgcaggatctgatatctacatgggtgcaagatcaatgttaatgttgctgttcggtactgtcgcacattggcaagctccactactgtggttttgggcctctctatcttcattaatttttgcgcctttcgttttcaatccacatcagtttgcttgggaagatttctttttggattacagggattatatcagatggttatcaagaggtaataatcaatatcatagaaactcgtggattggttacgtgaggatgtctagggcacgtattactgggtttaaacgtaaactggttggcgatgaatctgagaaagctgctggtgacgcaagcagggctcatagaaccaatttgatcatggctgaaatcataccctgtgcaatttatgcagctggttgttttattgccttcacgtttattaatgctcaaaccggtgtcaagactactgatgatgatagggtgaattctgttttacgtatcatcatttgtaccttggcgccaatcgccgttaacctaggtgttctattcttctgtatgggtatgtcatgctgctctggtcccttatttggtatgtgttgtaagaagacaggttctgtaatggctggaattgcccacggtgttgctgttattgtccacattgtctttttcattgtcatgtgggttttggagagcttcaactttgttagaatgttaatcggagtcgttacttgtatccaatgtcaaagactcatttttcattgcatgacagcgttaatgttgactcgtgaatttaaaaacgatcatgccaatacagccttctggactggtaagtggtatggtaaaggtatgggttacatggcttggacccagccaagtagagaattaaccgccaaggtaattgagctttcagaatttgcagctgattttgttctaggtcatgtgattttaatctgtcaactgccactcattataatcccaaaaatagataaattccactcgattatgctattctggctaaagccctctcgtcaaattcgtcccccaatttactctctgaagcaaactcgtttgcgtaagcgtatggtcaagaagtactgctctttgtactttttagtattggctatttttgcaggatgcattattggtcctgctgtagcctctgctaagatccacaaacacattggagattcattggatggcgttgttcacaatctattccaaccaataaatacaaccaataatgacactggttcccaaatttcaacttatcaagtccctaatatactcatacgcctccattaa

SEQ ID NO: 82437 - DNA, 339 bp, Saccharomyces pastorianus
atgctaggagtgaacacactgcgtgtttatgcaatagatccgacaaaatcacatgatatatgtatggaagctctatctgccgaaggaatgtacgtcctattagatctttcagagcctgatatttcaataaatagagaaaatccatcttgggatgtacatatttttgaaaggtacaaatctgtaattgatgcaatgtcatcctttccaaatttgttggggtattttgcagggaatgaagtgacgaatgaccatacaaatacctttgcatcacccttcgtgaaggccgcaatccgagatgccgaggagtatatctcgcatgctaatcatagaaaaaccctg

SEQ ID NO: 82438 - DNA, 249 bp, Saccharomyces pastorianus
atgaacaagaaacaaaatttttacgcagccattattgtggctatttttctttatttgcaattgtctcatggctcttcaggtgtcagctttgaaaaaacccctgctattaaaattgtaggacacaaattctttgactctgagagtggggaacagtcttcatcaagggcattgcttaccaattgcagagaagtgaagaggagcttagcaatgcaaatggggcttttgagacaagttatattgatgccttag

SEQ ID NO: 82439 - DNA, 507 bp, Saccharomyces pastorianus
atgtccaccgctgaatttgctcaactattggagaacagtatcttaagtcccgaccaaaacattcggttgactagtgaaacgcaattaaagaaattatctaatgacaacttcttacaatttgcaggtctttcttcgcaagtgcttatcgatgaaaatacaaagctagaagggcgtattctagcggcgctaactttgaagaacgagctggtgtccaaggactcagtcaagacgcagcaatttgcacaacgttggattacacaggttagtccagaagctaaaaaccaaattaaaactaacgcgctgaccgcattggtctccatagaaccgcgtatagcaaatgcagcagctcaattgattgcggctatagcagatattgagttgccccatggcgcatggccagagttgatgaaaattatggttgacaatacaggtgcggaacaaccagaaaatgtcaagagagcctctttattggccttgggtatatgtgtgaaagtgcagaccctcaaa

SEQ ID NO: 82440 - DNA, 600 bp, Saccharomyces pastorianus
  modified_base (416)..(458): a, c, g, t, unknown, or other
atggcaccactgaacatggagcaaggtaaaagatacgccatgttagtcaattgctcgcgtgggatcacattctctttcaacaagtcgtatgcaccgaatctcaccgtcgtgtatgtacattgcctcaacacagcagcgctcaggccggaatataaccccaccaaaccttcattcgccaagatactctccaacatcctgaagagtgtgggcttgggcataggagccgcctgcagtctgaccttggccaagtcaagaggatgtgtcaccatggtagcaaagatacccgctgcacctccgtaccaccatggatacttgatattcttaccggcagactcttttgcgttggttgacatgccgtccagctgttgcgttatcttttcaacactttcagagcaagaggaacgaacctctacacnnnnnnnnnnnnnnnnnnnnnnnnnnnnnnnnnnnnnnnnnnncactacaagccgaccgcccgaccgtttcctgcccccaacattgcagcgtaatcgcttgccaaagaccacaccttgcagcccttttatacaaacatgtctacgacgtacagtggagagggccctttccttggcactcaactga

SEQ ID NO: 82441 - DNA, 1488 bp, Saccharomyces pastorianus
atgatacaatcagacgaagataatttggactcttctgaaacgacagcatcaacttcatatagtggtacttcctctgtatcatccagactacaactaagaacatccttgttttttgaaaatcttaatggagcacatgggaaccccgatgcggagacagagatggctactgttgcctatgaaaccacaagtagaggtcaaggatttgctgtatacatcaacaatgaaaggttttctcaaataatgggagcatccacaagctctagctctagtagcaactcgtcctctattacacaatttcacgatacccaagataataatataccaagcaacactactgtaaggccaacttcacttcgacgagacaacgaggataccgtaccgttaaggaacgtaactccttcacaaaacgcggcggtatggccagaaagagcaatgaattcaccatcttcgcagagattaagttgcgcactgacaatatcaacttcagttcttatgggagaagatgttgaaggaagccctatagagcaagagcatagtagggtcgtatcttcattatactcatctttggcgaatcgcgggaacgacgagtcaaagaatggaacacctccacgtcctacctcaattgaacctaatgaaacaacggaacactcatttttctcatgccattacgatgacaccttagaaccagatgttgaagaggcagtgaggctaacgaagaataaaacttctaatgttaattttataagctcaactggcagtaaaggtgaaggcgagaccgaggatgaagtcatagatcaatacgaacctgtgaatgaatcaaaatttataccgcacaaactaaaaatcccagagaaggctggatcaataaagtcgtcgacaagtgatgattcgcattcgccaggtgcgccaggtacgtcggcaaggaagattaaaattcctcagagtccatcgttaattggtaacatattgattccttcacacaatagtgacagtagtaacgaaagttctcctaaagaccatatagggcataataatgaagaaaaattcaattcaaaatctatgcgcaagccctccacatccctagaagaagaaggtccaccaattggactaccttcaattcccgtattaagaagtgtgtccggacctagcaaatggacaaagacacctttacgcttagaatctggaaattcaactaagtctgatccattttcacgctatgaaggacacaagacgccctctccattgaccaagatgaacaagaaaaataaaacgttgccagaacatggacaacccctcgtgctagctccaattaaatctcaaagctcggagtcagacacaggacagaactctattatagaaaagccacctcgaagcatacgacgaaagcaacaagaaaaaactgataataggaaagaagacaggcacgatgctgaaaacatagacctggaggcgagaatgccaattcgggatcctctagagtcgacctgc

SEQ ID NO: 82442 - DNA, 294 bp, Saccharomyces pastorianus
atggatgtatccatcacattcgagcctattaacatagaactattgcagaaaaggagctacataagcgatattaacattctctttggtgttgattgcatccagccgatagcaaattggactcttcaaaaagaatttcccttagtaaaataccgctacagcgaacctgcttatttgacttacaaattcgttggtactcgtcctgtagacacaggagctcaacggctgcaagaaactgatgaaggaaagttcaaattgttcagttggcggatctccactgggtgtgggggagtctga

SEQ ID NO: 82443 - DNA, 162 bp, Saccharomyces pastorianus
atgactcgctcttccgttttagctgatgctttgaatgccattaataacgccgaaaagaccggtaaacgtcaggttctattgagaccttcttccaaggttatcatcaagtttttacaagttatgcaaagcatggtatgttccaactatttttcaatatttcac

SEQ ID NO: 82444 - DNA, 1113 bp, Saccharomyces pastorianus
  modified_base (755)..(788): a, c, g, t, unknown, or other
atgagcgaaaccaacgttgacagcttaggggacagaaatgacatatactcccaaatatttggtgtagaaaggaggccagattccttcgctacttttgatagtgactcgcacggagacataagttctcagctgctgcctaatagaatcgaaaatatccagaatctaaatgttctgctttctgaagacattgctaatgacatcattattgccaagcagaggagacgttctggagttgaagccgccatcgatgattctgatataccaaataacgaaatgaaggggaaaagctcaaattacattttatcgcagcagactaatattaaggaagttccagatacacaaagtttgtctagtgctgataatacacctgtgagcagtccaaagaaggcaagagatgccacatcttcccatcccattgttcatgctaaatcgatgtcccatatatattcaacgagtaatagtgctagtagacaagccaagcactataatgaccaccctttgcctccaatgtctccaagaaatgaagtctaccagaagaataaaagtactacagcttttgtgcctaagaggaaaccttcactcccgcaactagcccttgctggtcttaagaagcaaactagcttctcaaatgggagtggttcgactacccctacacaggcaagaaagtcgcctttgcaaggctttagtttcttttccaggccaagttccaaagacctgcacgaacaacaactacatcagcagcagcagcatattcnnnnnnnnnnnnnnnnnnnnnnnnnnnnnnnnnncaacaataatactaataataacggtacccatcatcaagtgggcaataacaataataactacccacaacattcacattcactatcatctagatcgatgtcattaaactcttctactctcaaaaatattgcatcatcttgtcagtccaagacttccaacggtagaagagtccctcaaaaatatgaaatgtcttccaaaccattcgcagattctcaccactaccatcacacttcaaatagtcacagtaacctcaacaatggtcacagttccatgaagtccttcaacaccatgagtgcatcgtctgctataggaaagggtctcaagacg

SEQ ID NO: 82445 - DNA, 2202 bp, Saccharomyces pastorianus
atgagagcgatggacacacaggtacagagtgctgaaagaggattggtgttgcctcccatgaattcaactgtatcgtcggcgacggcggctacgacggccacaaatacggatacagatacagatggagatagagatgaggaaagggagtcgttagcagaggatggtagcgaatgggtgcccgcatatatgcttaccagagacaggtcacgctacttgggccattttctgggtgtagacaagatgctggaggcagtaaaatgcaagtactgcggtgtgataataagacggcaagaaaacagcataagcatggcggaagcctcgcaaactcatttgtggagcacgcataagatagacccgaatgccaattactatagcggatggacgggcgtagaagcaggttctacttttatggtcagaccacctttgaagaaccatcaaggcggtagcgccacaacgaacagcattgctaacctgctggaaatagacgaggactttttgaagagaactagggaaaaagaaatggccttgcctcttgtgcagtcgcttgcgatcataattgcatcagaaaacttgcctctgtcgttcgtagacaacactgccgtacgccttttgatcaatcagaacgccaactcactaagcttcattgaccatgacttaattctgaatgctatcaggtccatcgcatataatctcgatagaatcattcaaaggacagctttgcgtaacaattccgacttgtcgttgattatcgacaaaaactacttactaatggacccaaccgatagatctaatcagttatcaaacaggttgaagaaccaattatttgaaatgcaaaaaatcaattttttctctctaagccactccgtttggaataacacgatatctatattgagtattcagtactatgatgattttcattcccaagtaaagactttaccccttatcatccaaaacttacatgaatataacaatgaccccaaactatctattccagctcaactgctcaaaatctcacaagaattacctggtttacaaaatactgtgatttctatcactctaccaagatctcaaatagtagatctactaaacgtaatggatagccaaccctttttcccgaatacgtatacgaatgctaaaaactattatcacaattgtattatttccataataaattctgcgatattgccattgttcggtacgcctaaatccgccgatattacgcatccgagacaaacatcattctccaaagaacctttgactttattggactctctaattgatttgtcaaatatagatatttcgaataccattttttccagaatcaattcttttttggatgatttacaatctaattcgtggcagttagataaattccgttcattgtgtgaaaaatttggcttcgaattcgtttgttcgaaattcgatttatcccgttactctaccgccaccgtttcactgcaaacttttttgaaccttcgtcccataatagaagaatatcaatcttctatccaaattgaaaaattcaacgaaatcgactttcaaataatagactatttattaattactttgaattccatcaatagaatactaaagttctttacttcttccaaaagcttaaactttacctatgttttgttcgccataatgtctattgaaaagcatctgttgtccaccttgggcagcctacaatttcaacggttaattgcaccatttgaaacatttttgtctaaaattcaagaattcaaaaccattttattttcagacgatatgaaccttttagcaatgttcttgtgtcctgcgattttattcgaaagagaagtcctggaatattcttttcataccatttcactttctgaaatagtcgacaaactttctacatcaattttcagtttattgaaaaggtttttgaatttacacacaataggcaacgttaacaacagtcataatacttccaatcatagcaacatgaacattcacactgataatcagacgaacaacatcaacaatagaagcggcaacaacagcgacaataatgataacgaacatgataacgacaacgacaaccactcgaattcaaatacgcccgcatcaagaatagatatagatcctactggtggagacaagtctgtattaacggcactaccaccaccgaatagctataagaacatatcattgggttatcatagcgatacccatcagtta

SEQ ID NO: 82446 - DNA, 1002 bp, Saccharomyces pastorianus
atgagtaatgcaaacaatagtgctatgaaccacatcacgttgcctcccatctcgtcatttgacaaccttatcaaggcagccgagagacaatataatggcgaggcttcgtccgcctcgacacatccgacactgcctaatatgaacattagtaacggcagtggcagtgcgggcgcatcatcgtcgatgctgagctatcagttgcttccgcactccaatgatgtgtcccggtcgaactccagctcgagcttccttccctccgtgcagcagcctacggaaggttccgcttctgcatcggaaacttcttcatctgcatcaccttcacgttccatttcaccaattttaaaagtggctggtccttcatctgttggcggtgccggggtgagtaccccccatagcaccaaaatcaataagccaaggaaaaagaagcaatgtccaatttgtcgtaatttttatgccaatctgaccacgcacaaggcaacgcacctgacgccagaggatcggcctcacaagtgtcccatctgccaccgcgggttcgccaggaacaatgacttattgaggcataagaaaagacattggaaggatgagatactgtcccaatcgggagtactttcgaaccataatgatggtaagggaggatccgtttctcccaatgatgatgatgcccatgaaaaaatgacaccgatgaattctgtcacagattatgcacaattgaaatcgttgcatcaaatcaagggcacattcaagtgcccattcaactccaccttaatacaattggacatggatatgtacccgtataaactgaaacctttaaattttgagacttccaattgtcaccagacgggggtgttctcacgttgcgacaccttcaaaaaccatttaaaggctttgcattttgaatacccgccaggcacgaagaaaaaggatagaaatgttgttcctggtagatgtaagcattgcggcctgaagttcgagacgttgacgtttggctcaacgaacacgtag

SEQ ID NO: 82447 - DNA, 312 bp, Saccharomyces pastorianus
atgatgggcgaaacacccaattccagtaaagtaccacggttggaggccagcatggcacgtagccagtacagagggtcggaagtctcactggacacgatcccgtacagcggaatctggcccagaatcaaaaagatcagtagagaaacgcctgtccagataagtttctggttgtatggaaccttcctttctggagcaatcacttccggcaggaaagattcatatggcttaaacaagtctagaacacggttggaggacattttcaaagtaaagcgtgaaccagtgtcagttttttctacttgctactatatttaa

SEQ ID NO: 82448 - DNA, 543 bp, Saccharomyces pastorianus
atgttcctaactttgttgaagtcattatcaaatagagactcggtgctaatcgagaaagctttaagtctcttacagagtttatgttctgactcaaatgataattatttacgtcagtttcttcaagatttattaactttattcaagagagataccaaattggtgaaaactagagcaaactttatcatgagacagatatcttcccgtttatcaccagaacgtgtttataaagtaatttcttcgatattggacaattataacgacacaacgtttgtgaaaatgatgattcagattttaagtacaaacttaataacttcaccggagatgtcgtcgttaagaaacaaacttagaacttgtgaagacggtatgtttttcaatagtttattcaaatcttggtgtcccaaccccgtgtccgtgatatccttatgttttgtagcagaaaattatgagttagcttacacagtgttacaaacttacgcgaactacgagttgaagttaaatgatctagtgcagttggatattggattcagttgttcgaatcacccg

SEQ ID NO: 82449 - DNA, 1389 bp, Saccharomyces pastorianus
atggaaaaatcgattgccaaaggtttaagcgacaaactatacgaaaaacggaaggctgccgccttggagttggaaaagttggtcaaacaatgcgttctagaaggggactatgatcgtattgacaagataatagacgaactatgcagagactatgcatacgctttgcatcagcccatggctagaaatgcaggattaatgggcttggctgccacagcaattgctttaggaataaacgatgttggccgttacttgaggaatattcttcctccagttctcgcatgttttggcgaccagaatgaccaagtaagattttatgcgtgtgagagtttgtacaatattgcaaagattgcgaagggtgaaatactggtctatttcaatgaaatatttgacgtactctgtaaaattagtgctgatacagaaaactcggtccgaggagcagctgaactattagatcggttgataaaagatattgttgctgaaagagcatccaattacataagcattgtaaataatggatcgcatggtttgcttccagccataaaaacggatccaatcagcggggatgtctaccaagaagaatatgagcaagataatcaattggcgttctctttaccaaaatttattcctttattaacagagagaatttacgccattaaccctgatacgcgtgtttttttagttgactggcttaaagtcttgctcaataccccaggactagagctcatatcgtatctaccatcatttcttggcgggttattcacgttcttgggcgattctcataaagatgtcagaacagttacacacacccttatggactcactactccacgaagtcgaccgcatttcaaaattacaaactgaaattaaaatgaagagactggaaagactgaaaatgctggaagataaatacaataacagttctactccaacgaaaaaggccgatggtgcacttattgctgaaaagaagaaaactttaatgactgcattaggtgggttatccaaacctctgagtatggagactgatgataccaaattatctaatactaatgagacagatgatgaaagacacttgacaagccaggagcagctgctagatagcgaggcaactagccaagaacctcttcgcgatggcgaagaatatatacctggtcaagatatcaacctcaatttcccagaggttattaccgttcttgtgaacaatttggcatcatctgaggcagagattcaattgattgcattacactggattcaggttatattatccatttctccaaatgtgtttatccccttcctttcaaaaattctttctgtgcttttaaagctattgagcgattcggatccgcatattactgaaattgctcagctggtgaacggtcattactctcattgt

SEQ ID NO: 82450 - DNA, 189 bp, Saccharomyces pastorianus
atgggcgtatctcttttagcttcttcttctgcatttgtaactaaaccactcctcactcaattggttcacctctcacctatcagtctcaatttcaccgtaagacgcttcaagccattcacgtgcttatcacgctattacacaacaaatccttataatatgacatccaattttaagacattcaatctggac

SEQ ID NO: 82451 - DNA, 2709 bp, Saccharomyces pastorianus
atgggctctgagaaatttccagacgaaaacgaatactcgagctatttaagcaagcacggtggttcatccaatgcctacacagcatcgcaaaacacaaattatttttttgaggttaatcaccaacatttatttggtgcgctagacaggttttcagggtttttctcttgtcctcttttcaacaaggactctactgataaagagatcaacgccgttaacagcgaaaacaaaaagaacttacagaatgatatttggagaatttaccaattagacaagtctttgaccaatacaaaacatccatatcacaaattttctacaggaaacatcgaaactttgggcacattgccaaaggaaaatggactaaatgttagagatgaactgttaaaattccataagaatttttactccgctaacctaatgaagctatgtattcttggtagagaagaccttgatactctctctaattggacttatgatcttttcaaggatgtagccaataacggtcgtgaagtacccctttatgcggaacctattatgcagcctgagcatttgcaaaaaataattcaagtccgtcctgtgaaagatttgaaaaaactagaaatctctttcactgtccctgatatggaggaacattgggagtccaagccaccgaggatattaagtcatttaatcggccatgaagggtccggttcattactagcacatttgaaaaaattgggctgggccaatgagctatctgctggtgggcatactgtgtccaaaggaaatgctttttttgctgtcgatatagatttaacagacaacgggttgacacactatcgcgatgttattgtcttgatcttccagtatattgaaatgttgaaaaactcactacctcaaaaatggatattcaatgaactgcaagatatctctaatgctaccttcaagtttaagcaagctggtagcccatcttccacagtttcatcattggcaaaatgcatggaaaaggattacattcctgttagcagaattttagccatgggtttgttaacgaaatatgaacctgatttgcttacccaatatacggacgctctggtcccggaaaattctcgtgttactctgatctcaagaagtttagaaacagattctgctgaaaaatggtatggtactgcgtataaagtggtagattatccggcagatttaataaaaaacatgaaatcgccaggtttgaaccctgctctgactttgccacgtccaaatgaattcgtttcaacaaatttcaaggtcgataaaattgacggtataaaaccattagatgaacctgttttgttattatccgatgacgtcagcaaattatggtacaagaaggacgaccgattctggcaaccacgaggctacatttacttgtcttttaaacttccacacacgcatgcaagcatcattaatagtatgctttctacgctatacactcagctggccaacgatgccttgaaagatctacaatatgatgctgcttgtgccgatcttcgtatatcattcaataaaactaatcaaggcctcgccattaccgcgtctgggttcaacgaaaaattgatcattttattaacaaggtttttacaaggcgttaattcattcgaacctaagaaggatcgttttgagattttgaaagataagaccatacgtcacttgaaaaaccttttatatgaagttccttattcacaaatgtcgaattactacaatgctataataaatgaacgttcttggtcaactgcagaaaaattacaagtctttgaaaaattgacctttgaacaattgatcaacttcatacccaccatttacgaaggcgtttattttgaaactttaatccacggaaacataaaacatgaagaagcattggaggtggattctctgatcaagtctttgattccaaacaacattcataatctgcaggtttctaacaaccggttgagatcctacttacttcctaaaggcaaaactttcagatatgaaactgctttgaaagactcccggaatgttaactcatgtattcaacatgtcacccagctagatgtctattcagaagacctatctgccctcagcggattatttgcgcaattgattcacgagccatgttttgataccttaagaacaaaagagcaattgggctacgttgtttttagttcgagtttgaacaatcacggcacagcgaacattaggatcttgattcagtcagaacataccacgccatatctagaatggagaataaacaatttttatgaaacttttggccaggttttgagggatatgccagaagaggactttgaaaaacacaaagaggcgttatgcaacagtctattgcaaaaattcaagaatatggccgaggaaagcgccagatacacagcagcaatttacttaggtgattacaatttcacacatcgtcaaaaaaaggctaagctcgttgctaacattacaaagcagcaaatgatagatttttatgagaattatataatgagcgagaacgcatcgaagttgattctacatttgaaatctcaagtggaaaacaaagagctcaatgaagatgaattggacaccgctaagtatccaactggccagttgatcgaagatgtcggggcattcaagtcgacgctgtttgtagctcccgttcgtcaaccaatgaaagacttcgagatttccgcgcctcctaagctgaataatagttctgaatcagagtga

SEQ ID NO: 82452 - DNA, 237 bp, Saccharomyces pastorianus
atgcgtgccaccactttattatcttcagtcgtttctttggcattgttgtcgaaggaagtcttagcaacacctccagcttgtttattggcctgtgttgcgcaagtcggcaaatcctcttccacatgtgactctttgaatcaagtcacctgttactgtgaacacgaaaactccgccgtcaagaaatgtctagactccatctgcccaaacaatgacctgcaggcatgcaagcttggcact

SEQ ID NO: 82453 - DNA, 1017 bp, Saccharomyces pastorianus
atggacttgattatcttggaaaggaataccgatcctataacgccattgttgacacaacttacgtatgcaggaatactagatgatctatatgaattcaattctggaataaagataaaggagaaagacatgaacttcaattataaggaagataaaatatggaatgatttgaaatttttaaattttgggtcgattgggccgcagttaaataaattggcaaaggaactacaaacgcaatatgatacaaggcataaagccgagagcgtacatgaaatcaaagaattcgttgattccttaggttctttgcaacaaaggcaagcttttttgaaaaatcacacaaccttatcatccgacgttttgaaagtggtagagactgaagagtacggatctttcaataaaatcttagagttagagctggaaattttgatgggaaatacacttaataacgacattgaagatattatactcgagttgcagtaccagtacgaggttgatcaaaagaagattctcagattaatctgtttattgtctctttgtaaaaattcacttcgagaaaaggattatgaatatctaagaacctttatgatcgactcttggggcattgaaaaatgctttcaacttgaatcattggctgagttaggatttttcactagcaaaacgggaaaaactgatttgcatattacaacaagtaagtcaacaagattacagaaagaataccgttatatttcacaatggttcaatacagtacccatagaagacgagcatgctgccgataaaatcacaaatgagaacgatgacttctcggaagccacttttgcttacagtggtgtagtacccttgacaatgagactggttcagatgttatatgataggtctatcttgttccataattattcctcgcagcagcctttatactgtcaagagaacctagagtttctcaaacggaggattaaattgaacagtctatatggagactcacatgcgatcgacatcagagtagatgggtcccgggaaccatta

SEQ ID NO: 82454 - DNA, 657 bp, Saccharomyces pastorianus
atgaatagattttggaatactaagaaattttcattaacaaatgccgatggactatgtgctaccttaaatgagatatctcaaaatgatgaagttcttgtggttcaaccaagtgtattgccagtactcaatagtttgctaactttccaagatttgactcaatcaactcctgtaaggaaaattacgttactcgatgatcagctaagtgacgatttaccgagtgccttaggcagcgttccgcaaatggatcttatttttcttattgatgtcagaacatctctccgactccctccacaactgcttgatgctgctcaaaagcacaatttatcatctttgcatataatatactgtcgatggaaaccgtctttcccaaatactttggaggatacagaacaatggcaaaaggatggtttcgatttgaattcaaaaaaaacacatttccctaacgtcattgaatctcagttaaaggagctatcgaacgaatataccctttacccttgggatctcttgcccttcccacagattgatgaaaatgttctattgactcattccctttataacatggaaaatgtaaacatgtattatcccaacttacgttctttgcagagtgccacagagtcaatactggttgatgatatggtcattcgttgcagagtttga

SEQ ID NO: 82455 - DNA, 198 bp, Saccharomyces pastorianus
atgaactttccagacaccctagtttgcgaaaggccttttttcagaggcgacttgcgagattcaaatcactgcgcgttttctaaatccacctgtatttacctgctatgtgagccactcaggtacagttgcatcaggttgatagttatgttcatttgtttcgatgataacctgtccgggggatcctctagagtcgacctg

SEQ ID NO: 82456 - DNA, 147 bp, Saccharomyces pastorianus
atgatacaaaaaccgattttattatcctcgtttctgtttctctacatccgtgcattattacatagtatacatccgtacatccgtacatctgtacatctgtacacaaaaaaaaatcacctcatacaattttttaggagtgccgtttaa

SEQ ID NO: 82457 - DNA, 96 bp, Saccharomyces pastorianus
atgttccttacattctcaatgtgtgtgaactggataatcgtaaaaatgccaaacaggtctgaagaactgaccgatactcgacaaatatcactctcc

SEQ ID NO: 82458 - DNA, 1038 bp, Saccharomyces pastorianus
  modified_base (1022)..(1022): a, c, g, t, unknown, or other
atgcatctattcaccaatattggaggtttcagtcttaagacgtcagctagcgaatatatgtctttgaaattgccacctcccggtattcaagatgatcacagtgaagagaatctcaccgtgcatgatactctgcaaagaaccataagcactgcactaggaaacggatacaacaccaatacagttacgacttccggtttaaaaaaggcagacagtgaatcaaagtcagaagctgatcctgaggggctcagcaattctaacatagtcaatgatgcagataacataaattccatctccaagaccggatcgccccatttacctcaaggaacaatggacgctgagcagactaacatgggaactaactctgtacctacttcatcagcttcttcacgcaaatcctcgactagtcatcccaaacctaggctacccaaggtagggaagattggggtatgtgcaatggatgcaaaggtcctttcaaagccaatgagacacattttgaatcgtttaattgaacatggtgaatttgaaactgtcatttttggagataaggtgattctagatgaaagaatagagaattggccaacttgcgactttttgatatctttcttttcttcaggatttcccctagataaagcaattaaatacgtcaagttacgcaagcctttcattatcaatgatttaataatgcaaaagattttgtgggacaggagattatgtctacaagtattagaagcctacaacgttccaacacctcctagactggaaatcagtagagatggtggtccccgtgccaacgaagaattaagggcaaaattacgtgagcatggcgtagaagttaaacccgttgaagaaccggaatggaaaatggttgatgatgatactttagaagttgatgggaaaaccatgactaagccctttgttgaaaagcccgttgatggtgaagaccacaacatttatatatactatcattctaagaacggaggaggcggtcgtcgtctattccgtaaagttggtaacaagtcttntgagtttgatccctag

SEQ ID NO: 82459 - DNA, 96 bp, Saccharomyces pastorianus
atgaaacatgtgaaaccctttttcctcttcgttgatcctaaaaaaagcgcgtctggaaaacaggggaagcttcctcacatggaaaaggcttcttaa

SEQ ID NO: 82460 - DNA, 147 bp, Saccharomyces pastorianus
atggagtactggcattatgtggaaactacttcatcgggccaacctcttcttcgaaaaggtgaaaaagatatctttatcgatcagtccgtaggtctttaccatggcaaatctaagattctacagcgacagaggggcagaatcttttaa

SEQ ID NO: 82461 - DNA, 474 bp, Saccharomyces pastorianus
atggtttcgaacgaaacgcagggggaattcactaaagatactctacctacacccatttgtatcaattgcggtgtgccagcggactatgagctcaccaagtcgtctataaattgttctaatgcaatcgacccgaacgccaacccacggaatcagttcggagtgaactctgagaacatttgccccgcctgtacttttgctaatcatcctcaaataggaaattgcgagatttgcggccacagattgcctaatgcatccaaagtacgatcaaagctgaacaggctaaactttcatgattctagggtccatattaagctagaaaaaaattcactggctagaaacaagagctcgcattcaggcattatcagtcctcagtcctcgacaggatcatcgacagaattcgtgcaattgagtttccgcaaatctgatggcgtatgttttcacaagaccagggatcctctagagtcacctgcagca

SEQ ID NO: 82462 - DNA, 1224 bp, Saccharomyces pastorianus
atgtacgcttgcgagctgctgaatgacgacggatctattatcgtttttttgcctggtgtgggagagattaataagtgctgcaatttgctagctaataaatcaaatgaagcagattttatggttctacccttgcactccgctctaactcctgaagaccaaaaaagggtgttcaaaaaatatcatgggaaaaggaaagttgttgtatccactaatattgctgaaacatctattactatagatgactgtgttgcaactattgacacaggccgtgccaaatcgatgttctataatccaaaggataatactacaaaactaattgagtcgtttatttcaaaagctgaagttaaacaacgtagaggtcgtgctggtagagtacgtgaaggtttatcttacaaattattttctaaaaatttatacgaaaacgacatgatatcaatgccaattccagaaatcaaaagaatcccgttggaatccctttatttatctgttaaggctatgggtataaaggacgttaaagcgtttttgagcacagctttggatgcccctcctttaccagctctgcaaaaggcagaaagaatattaacaacgataggacttgttgatgagtccgacaagtcactcacacagctaggtcaatttattagcctgatgcctgtcatggatagtaagcatggtaaattactaatatacggcattctgtttggctgtacggacatttctgttttacttgtctcgatactcggtattggagttttgcctttcatcggaggttttgaaaatagggaaaagataaaaaaactgctatgtaaatatgaaagtcgtggggatttatttgcagtattggaaattgtcagagattacttcaaaatcaaagattcgagcatcaaaaggaaatatttgagagacaatttactttcctataataaaattaatgaaattaagtcatcaacagcccaatattattctattttgaaagatgtaggctttctaccaatggactataaagttggaagcatttctgatttgaataggaacgagcgaaattttgatatcctaagggccattctcacgggtgcgttttatccacacatagccagggtgcaactaccagatgtaaagtatctatcaacaagttccggtgctgttgaaaaagatcctgaagccaaaatgatcaaatactggattgacctgcaggcatgcaagcttgcactgccgtcgtttaca

SEQ ID NO: 82463 - DNA, 1605 bp, Saccharomyces pastorianus
atgctttataaagatccattgtctttcttattgtttaacttaccggaggatgatttaccaccattttttcataaaaagaaaggtgatacaaaaaacaaggttgaaataacaaacctaccgttatcaactagaatgatcgttgagcgtttaacagaaattggtgtctcttcagatgaagccttattggctttacaacaaaacgatatgaatgaaaatgaagcggccgggttcttgacgagggaaattttaccaactttaaatagcaatacgaatgaacctgtatcagaaactgaatctatagaatgttggaaccaagagctagagagcctagagagcatttatgagggctgcgtgatggacgccaaggaagattcacactacacgctcaatttaattgaaaaactcaaaataaaattgaaagtatatagaaccaaaaattatcctgcatcattacctggtattgtagtttcaacctttgataaaaattacaagctacctgattatattaagaaacaaatattaaccaggttactgcattatctccaggaaggaaatctaataggcgatatgttagtatatcatatttatgaatggttgaaagagaatatatctaagataattgacaaccctggcccattaatttcagattcagattcgaaaggtgcaataaacaaaagaaacatttcaaacggtaagagaagtataaataattctagttcgagaaaatttacaaaaaccaccatttctgaagacacactctctgtcctaagggaagagtacacaaaaaggatcaaaagttctgaatacaaaagtatgcagttagttcgagaacaactgcctgcctggaagaagcaaaaggttattatagatatcatcaataaaaacgaagttgtattgattactggtgaaacaggttcgggtaaatccactcaggtcgttcagtttatactagatttcttacagaaggaaaaaggagatttcggtaagactaaaatcgtatgtacgcaacccagaagaatctcggctattgggcttgctgaacgtgtttctgatgaacgctgtgtaacttgtggggaagaggtaggttacgtaataagaggtgtcaataaaaccaaagcttccacacgtatcaagttcatgaccacaggtgttcttgttaggttgttacagaatgctagaactatgttagaaaacacaattgttgttattgatgaagttcatgaacgttctattgatactgacttgatagtgacattgatgaaaaatctcttacatagagttcgcggcatgaaaactgttttaatgagtgctactgttaacgttgacttgttcaaaacattctttccggggctagcaacatgtcacatagaaggacgcactttccccatcactgattacttcttggaagacattcttagtgaccttgacttcaagatcaagagagagaaggctttgtcttatgatgatgatagcgttgatgaaagaaataatgacgaccaatatttgaagccgagagcagattctaagttttttacatctgggcaaatcaattatgatttgctttgtcaagacctgcaggcatgcaagcttgcactgccgtcttta

SEQ ID NO: 82464 - DNA, 732 bp, Saccharomyces pastorianus
atggccaaaaaaacgaaaaataactcaaaaagttcaactccagtgaatgatgtaccaacaactgctggcaaaaagaaagcaaaaggaaaaaagggacaagaaccagagccagaagatgacaaaagggccaagcaacaaagtaatagagcaaaagtgacatccacagcaagctggacaggtaaattgcctcatacagtcttacacgaaacatgtcagaaacgaaaatggaataaggtagagtatgatatgaagaaaatcggtgataaaggtttcattgcaattgcagttttgtcattcactgacccaaagacaaaagaaacattgactgcaagaatgaacgatccaacctatgacaaagcttcaggaaaaggccttgtaattcttcaagaaactccaattgaagctagacacatggcctccactattgcgctatatcgcattgcatacaacaccaacctgcacatgatgcttccgccaaaccatagaaaaacatggtatgccctcgacgattttcgaaaagataacctgaaaacagacgaaaagcgtataaacaaactatttgatcttgatcccttcaagacaatggtggaagacagaaagctcaaagcccaacgtgaaaaagaacaagtagcccagaataatcaagcacagaaagaacaagttgcacgaactattttatctagccatggtggaattcttcttctggaaaggacaggcaagagagaaaagtag

SEQ ID NO: 82465 - DNA, 3657 bp, Saccharomyces pastorianus
atgtcgcaacaggattcacagcgctggctgcccacggatcggctaatatatggtgtgctagtcaaatctttccttcccttacaaaggtatcctgagctggtatatgaaaacagcaattatgcgaacgtttatgtgggtgcagaagtttacgtcttcgaagaatctgtggataagaaatggtgtagagcgtaccaatgtttacgaccctttcctgaagaattcatatcgaatatgaactcggcgaatgatgtactgccagccgtgaaaccgaaagtagtgatatttcccagaaaatatgttcattttgaagcagaaaaagctgtcagcacaatgccatttttcaaagcacctagtgctgaggattttaaaccattgataagtaaagaatgtgagtcccgctccttttgtgacagcctatatgttagctctactgatgatatatcaactggtaaaccaagaaagacaccgagacctccgttcccctttttcagataccaaaagaggtcctttaaggacgaaatgggtcctatattatctcttatttcctcgcatgtttactctatgtattcaattggcgagttttctatatataggaaaatgataaaactttattatgatttggacactatacgatttagattgtctatgaatttaaccacagaggctgagaaaataaatctgataagagcagcaacatccctaagaactaaaatcgcaaaatttttgtcctccacatacaggaagaataaactaattgctaactctactccaagaaacccagatccttatggtttcgaaggaatttttgccagggatattgatactggcgaattgctctcatacgagatcgacaaattaagaactttagtgtcatcgtcaatgctttgtggtttaactaataattttcctactgtacctgtggtagagtccgatgatcagtcctcgtctaacggactattcggcacagttagatcgagcattttggttaacttgaaagatctggcatgggatccctctatatcagatcctaaatatcaagatctttctatttgtgtatacttgagaaccaaagacgaagatttaacagagtcttttaccatgacgaagtcgtccaatatggaatcagctctagatgaaattcctgcaatgttattcaagaatattttagaaacgatagtgcataaaaataaagtatacttagtagtagtgctgaaggaaacaatagcaattacaacagaaactgctccggaaatttcaacttacaatatatctaccgaagagtcaagttcacattccccattttctccatttaattcatcgactgagaataagattgaccacgtaaaaaagggcttagctgccggagttattgacatatctccggtattcaagttttataacggcccatcagttgtgaataaagctcagaggtttaatctttatctttatagctccgattcctcggattcgcaaaacttcaactcttcaaaagatgcggatttaggttggggcgggttaataaataagataataaaagattcttctgaaggcgtttctgtgaaccctagggctgtttctttatcggtaactgtaaaggaaattataggcaaacaagaggcggaaaaagtgctctccacatctttagtaccgataagatctattcccacatacttttatgataccatgtttagccaagcagaaagaatttatctgaacttaggtagggtgtcgctttatggacttcctgcagctgatacaaatatagaaaatgttaccgttcaaatatcctgcaggaataaggccgtaaaattttgcaaaaataagctcgaagagagatctggggactggaagtttgtttcagttcgtccaaatgagagcataggcgaatcgattagaatagaaggggtagagaacatgaacgaagacgagacattaagagtattggtatatttgaatggatttttgatggcaaaatcaaatatacatatcaagaaaaagaacgaaatcatagaatatagaaagggtaccgtatttcaaataatgtcatccaaatcagtacccctaattcatttagagcttgaagcatcatattttggtcggagatataatatcaaccctgccattacaaatttcttagttcttcaaaccaaaaatgttgaattcgaccagcaacttaaagagcactattcagttacattgaagcagctgaataacgtttcttttaaagatttactaaagcattttgacacaattttagcacactatttgttacttcttgaatcggtgaatgaagctactgataaaaaaggcctttcttcaagtttacccaatattgtattcagtgaattcgtcaagtttttaaatttaatgttaacacaccaagaaaactctagatattggtttaatagactgtacaaaaaagtcatgtcaaaggaactagaatgtcccaatgttgcaccgatactaataaaacatatgacaacgatctttgataggagtcattcttcttggactagaacaggaactgcaatctgccgaaccatcctgtacatagttgtgttggcaatcggttcgtctcattctgatgaaatgcctaatttcagtcattttttcagaagcttgcacaaatttttaatgcttgctgatgagccaataatggcggatcaaattttgttaatagaaagtattccctctatgctggagacaatgaccaatcactgtaaggtggaagacttagttcgttttgtgatcggactgtttgaatgttgccaggaaaaagaaatgaatcaaaaaatgtacaccaggccactctcagttcgagaagaagaatatttgaatacaaagtttaattgcctgttgaagttaattaacaagaaggttttgcaaaattatttaaccaatacggaatccgtagataaactgaggttacagtttttatctaaaacccttgagtggttacttacgccgtatactccaggcgatgacaaatgttttcacgtagaatccttacgcttggttaattctgttttcattacaataatcgaagattacaaatttgacatgctacaaaggaacttgataaggttactaccatatttgtgtaagtccttcgtccatttaagaaggtactgtaagaaagcacgtttaatgaggcctcgaagagtttttaccatgctttttcccagagaaattccatgcaactacataccggttgattcaatagtgaatgatgaagtagtcgtagaagttcttctagagcttgccatcataatttgtgaaataacgaaaattgcatcaagcagatttccatcatatcaatctttcagcgaaatcataaacttgtgcgataaagacactctttttcaatcaaatttttattcacgacaaatcacgaatgaaaatgtctatacaataaccaaaacagtttttttgttttttaaacaagattggttcccaggaatgaagtggcttggcgtatcagcgttattaggaagatcgtctctaatattgcttagtttatgtaaggattttatcatagaaaataattcaccttctccatcaaaggagtctgaaaagagggttgacatgcgactttgggcagaatatgtaaaagtcatactactagtttcaaaccataaaagtgcatccttgatctaa

SEQ ID NO: 82466 - DNA, 672 bp, Saccharomyces pastorianus
atggtgatgtcaagaatacgagatacaatagccaggccattccagaaccttacagcccttgagaaagtggtacagtggctaagattagggacgacattactcataatctctttcgggttggcgttgactgtcggacccctttcttcgccaagaacattgtacatgtcacgactggatacttactctgctgatattacgacgggtttatttaccgtgttgagagagtctatggagcagtcgacatctacagaagaaaataacggtgtaggcctaacaacatccgaactgtatatattgactgcttacactgaaagtcagataaagaatgttcctcagtacatcacagtgtcgctttatgggaggtgcgattcaacatataccatggtggaagtattcgactctgaaggaaatatgcatagcgtaaagaattcgactactaagagtacctgcagtagcataggaacggactatctttttgattatcgtgaggttttagaaagcttgggtttagatatcattttagattatgcatacaacaaaatcggttcacaacaggcagaaagttctgcatacacgacctacatgaggagtttaaaacataaaaaggccaacgtgttacatttactctatgcagttattagtttccaggtgtgtatgttattgttggaataa

SEQ ID NO: 82467 - DNA, 168 bp, Saccharomyces pastorianus
atgatgggtgaaagaattcaaaactgtaatgctgacgaaggcttgataaccctttgcatactttcttcactgtcgttgcttgaccggaatcttatgtcctgcaattcgaattcctctctagtagcaaatggttcgtgtttgccgccattgcttatatttgcggtgtga

SEQ ID NO: 82468 - DNA, 912 bp, Saccharomyces pastorianus
atgtcacttcccttaaaaacgatagtacatttggtaaagccctttgcttgcactgctaggtttagtgcgagatacccaatccacgtcattgttgttgctgttttattgagtgccgctgcttatctatccgtgacacaatcttaccttaacgaatggaagctggactctaatcagtattctgcatacttaagcatcaagccggatgagttgtttgaaaaatgcacacactattataggtctcccgtgtctgatacatggaagttactcagctctaaagaagccgccgatatttataccccttttcattattatttgtctaccataagttttcaaagtaaggacaattcaacgactttgccttcccttgatgacgttatttacagtgttgaccataccaggtacttattaagtgaagagccaaagataccaactgaactagtgtctgaaaacggaacgaaatggagattgagaaacaacagcaattttattttggacctgcataatatttaccgaaatatggtgaagcaattttctaacaaaacgagcgaatttgatcagttcgatttgtttatcatcctagctgcttaccttactcttttttatactctctgttgcctgtttaatgacatgaggaaaatcggatcaaagttttggttaagcttttctgctctttcaaactctgcatgcgcattatatttatcgctgtacacaactcacagtttattgaagaaacccgcttccttattaagtttggtcattggactaccatttatcgtagtaattattggcttcaagcataaagttcgacttgcggcattctcgctacaaaaattccacagaattagtattgacaagaaaataacggtaagcaacattatttatgaggctatgtttcaagaggtgcctacttaa

SEQ ID NO: 82469 - DNA, 171 bp, Saccharomyces pastorianus
atggcagacacaccctctgtggcagtacaggccccaccgggctatggtaagacggagttatttcatctccccttgatagcactggcgtctaagggcgacgtgaaatatgtgtcgtttctgtttgtaccgtacacagtgttgcttgctaattgcatgatcaggttgggccga

SEQ ID NO: 82470 - DNA, 1140 bp, Saccharomyces pastorianus
atgaaagagaatgaacttaaaaatgagaagagtgtagatgtattatccttcaaacagctcgaatcccaaaagattgttctacctcaagatcttttcagaagcagctttacctggttttgttatgaaatttacaagtccttagcgtttcgcatctggatgctattatggctaccacttagcgtctggtggaaactttccaacaattgtatttacccacttatagtttcacttctggtcctgtttctgggaccaatatttgtccttgttatttgtggactttctcgtaagcgttccttatcgaaacaactcattcagttttgcaaagaggttactgaaaacacaccaagttctgatcctcatgattgggaagttgttgcagcaaatctaaattcgtacttatatgaaaataaggcttggaatactaggtactttttcttcaatgccatgggctgccaagaagcgttcagaacaacccttctcgaacccttctctttgaaaaaagacgaagctgccaaggttaagtcatttaaggattccgtcccttacattgaagaagcattgggagtttattttacagaagttgaaaaacaatggaagttgtttaatactgaaaaatcatggagccctgttggcctggaagatgctaaacttcccaaggaagcttaccgatttaagcttacttggtttttaaagaggatttccaatatttttatgttgataccattccttaattttttgtgctgcatatatgtgtcacggggaatgtgccttctattacgcaccttgtatctcgggtggattcttttcatgttggtacaaggtttccaaaatataagggttttgattatgagcatggaacacaagatgcagttcttgtcgactattataaatgagcaagaaagtggtgcgaatggatgggacgaaattgcaaggaaaatgaataggtacttgtttgagaaaaaagtctggaagaatgaagagtttttcttcgacgggattgactgtgaatggttttttagccacttcttctaccgcgttctatctgcgaagaaatctatgcgggctctatcattgaatgtggaactatggccatacattaaagaagcgcaattatcctgcagtgaggagtccttagcgtaa

SEQ ID NO: 82471 - DNA, 1515 bp, Saccharomyces pastorianus
atggatagccaagtagaaggcaaaatatccccctcacagaaggagtcctcctccacctcaggcctcgtttcacctagtgaagatggcccagcacatcaaaaaatacacagagaccaattaagtgtggatcaaatcaagaaaatcagagaagaacgtgctcagaagagacaagtacgtaggaactctctaatatcccaagggaaggaccctgacttcccaacgcctgacttacaattcattgaaagaccattcctccctatcaaccatgataattcgaaaggtcttacaccagcgaccatacaagtcacccaagattcattggacgttaaaataatgacctataatactctagcacaaaccttgattaggagagattttttcccagaaagtggaccagcgttaaagtggcataagagatcaaaagttttggtccacgaattgaaaaagtacaggcctgatgtagtatcgttgcaggaggtcgattacaatgaactcaacttctggcaggagaatttccataagttagggtttgatatgattttcaaaaggcatgaagggaaaactcatggactactagttgcatggaacaataaaaaattccagttagataatgattggatgctggactacgataatatattggcgggaaatgtcatttcagcaagaacaaggactaaaaatattgcccttattatatcgctatatttcaagggtataacagattcatcatcaagaggaattatcgtcgcaaatacacacctattttggcatccctttggggtatttgaaagattaaggcaatcttacttggttttacaaaagatccaggaaattaaagcatgttccaaatataatggctggcatagcctactgatgggtgatttcaataccgaacctgaagaaccaccttacttggccataacgaaaagaccactgatattaaaaggcccaataagagctatggtggaatgctcactagcgtatcggtattcaaaaaaaaggaatggtgaagaaagtgaccaggatgatgaagagtgtgatgaaaagtctaggggcgaaggccattcagatcaaccacaaaacccaaaaccagagagctttacagccacaaaggaagaaaaggctctggtgaatcaattagttgcgttgcataattcactacatgtgaaaggagtatctttgtatgggattggctacggtaaagtgcatcctgaaaatgctaacggaagccacggcgaaccgggactctcaaactgggccaatacatggtgtggattattagactacatattttatatcgagggtgatcataatcaggacacgcgtcagaaagagcctctgaatgcctttgaaggaaataacaacgtaaaaataatcggatatctgaggatgccgtgtgcacaagaaatgcccaaacactcccaacctttcgagggagaatatgctagtgatcacatttccctaatgtgccaaatacgcttgttttttgtggggggggggggggaaagtacatag

SEQ ID NO: 82472 - DNA, 465 bp, Saccharomyces pastorianus
atggactctcttgaagctagattacaattcattcaggtcctgaagaacctgcaaaagacgctgcacaagaccagagactctatcacatcatcgtcgaccaccacaccaccgtcatcgcaacaaaagctgaacaatgaccctatacagttctacttgagaaactacagacatcattacgaggacttccaccagtgtttgttcgatacaaccatgaagatggacccactagatagactggacgtagtgatatactatgttagaataataagaaacttatatccgcatagccattccaatgccaatgttgcaaaagtgttaaacgaagtgctactcatggacatagacttggtttttgagctttgtctgccctgccaggactggaaatccctcacgaatcaagccacctgtaaagagctattccttgacttatccaaactaatccattacgacgccaccagcgtcacg

SEQ ID NO: 82473 - DNA, 306 bp, Saccharomyces pastorianus
  modified_base (197)..(242): a, c, g, t, unknown, or other
atggaagcagacagggaactgcacaagaggtcgaaagagacaagttggtacatcgaaaggccctccaacgatatactggatgaatccgaatttaaaagcttgtggacgcattttgaaactactgattccggatttgataaggacgattacaaaaatatcaaggctttaaatgacattgcgaaggcatcttacatgtnnnnnnnnnnnnnnnnnnnnnnnnnnnnnnnnnnnnnnnnnnnnnntgtgaagagaatccgtatctgtattatatatatgtatatacgtatcaatgcgcgtacaaaatga

SEQ ID NO: 82474 - DNA, 3378 bp, Saccharomyces pastorianus
  modified_base (3362)..(3362): a, c, g, t, unknown, or other
atgcctaagtttccacagtttcgattgattttagttttgttttacttaatatcaatgatacaatggtcggtaatcactttttcgctggggttctttctaaaggtctgcatctttgcgtacttcgtattcttcaaatccttgcctgatttaccgaaacctcagccaagatttgttgatatcgtaccggaaagttcgaatactgtggatgttgataaagaattgaagtctgtcaagggtttaatacaagatgggaacgcgcaaattgggaaagaattagagagtattgttaatttaattattaaagattttgttcagccttggttcacaaaaatcgataagaatagtgacgcagagttcctcaaagtaataaagtggagattattacaaacgctcctagtggtgaaggacaagttgatgaagaatgatagtgccagcttgattgttctgaagctgttgcctatatttaacaaacatttcagcactttttgtgatgccagagaagctgtgctaagcgatttgactcttgaaaggcataaatcagccaacatcgatctacaaattgccgttgagtttaataaaaattacaaaatacataaatcattatcattgaagccgaatgctcttcagaaagaaattgaaaaatccataaggaaaactgtaatcgggctccttcctcacctttttgataatgatgagttagattcattgcttgttttcacattaatgacggaagttctcactacgtgcattatttctccattaattttcaaatttactgatccagatagttggaatttaagaattgtaagcctttcacaaaattatttcgaggaaaagcacaaagttcacaagataagaagaatgttgagtaaagagttacaagatcatagaaaagtgatgaatgacgtagcgaacaaagatgttggagaaccctcaagtgaaaaattggagcttaatgctgaatatactggaaaacaattcgagcattatctcaaccagttggactccttgttggatttaagtgatatcaaatatgttgcgtattcattggccctcaaaatataccaattgaaagaaaatgaacatttgaccaaggaaaatttgaagtataagaaacgattactgctttccttaaatttgattgaatcaaagttatcgttccctggctcggaaattgatacggcaagcaaaaagcttgcaagagaggctaattatcccgatttaaatatggataatggaatagtattgaaggaaatggcttcatttcttacctccatcacattgaaggacattgtagacgatagcgagtttcttcctttttttgaatcatttttaggcagtgttcctgaaacacagggttcaacatttttagagtattcgcaaacaattgaatcattcaaaaatcccttggaagatgctacatctgaagatataatttctggttattcaggaattagcacaatgcaactgcaagagatttcttcaaagttttttcataacaataacttgcaaaatatgaaattgctggatgaaggtttagtgaaaaatataatacttttcagaaattcatttcaaatcaacaacgatgaagacacatttatcctagctcggaaaagcgttttactactacagacagaggctataaagtatctcgatgatagatttttacctcttttcaagaaaacaccttcatttctcaaaatgctttcaacgtcccacatcatttcgactgatatatatgctcactttctgagtagaatcggtggtgttaacaatccagaacaaaacaaaataataaaagataatgtgaagactgattttatgaatcctgtcagaatattcgcaaaccccggcatcacagatgctttagataatatagtgaatggatcgggatccaagccgcataaatcaagaataagctcaaatccccgttattctcagctctttggttcagaaaatgacaacattttcaaagataaactcttcgacgatgaaaacgataatacctcagaaatttctgttgtcgaggatcagttggatcacccacgtaatatggagaaagtaagtgtttccagcgggaattcaggcctaaatcctagccaattttatgggtcaaacaactttagggataatatagcatccttgactatttcaattgatcagattgagaaagagcttgaacttttaaggcatttgattttgaaggcagatctgaccaacaatcaaatgcagttgaaaattttaaaaaagtcacaaagaaccctattaaaggaactagaaatgaaggaactgttgaaacagcaatatatggtacaagaaaatggtaatagtttgttcagaaaaactaagatatacattaggtcgtacttcagtgagaattctagtaatggcctaaaagaaataacttattatatcatcaatatccatcattttaacaatgggcaggtaagttcttgggatatggcaaggagatataatgaattttttgaattaaatacatatttgaaaaagaattttagggatctgatgaggcagttgcaagatttgttcccgtcaaaagtgaaaatgtcattgaaatatcatgttacaaaaacattgctttatgaggaacgaaagcaaaaacttgaaaagtacttgcgagaactattatctatttctgaaatatgcgaagataacattttcagaagatttttgacagatcctaccccattcaaactgaacaaggaatatatgcatgatgatattctggaggagccacttcatgaacctattggtagtagtaatagcacaagtaatagcagttctgttgttgatttacaaagctctgaagacggcggtgaattgaatttctatgaagatgaaagacattttttcaccgattctggctatcctttttattcgcaaaataaatcttttgttaaacagatatgtgacttatttatttcgctctttgctttaaataaggccaacgcgggttggttaagaggaagggctataattaccgttttacaacagcttcttgggagcactattgaaaagtatataaaggtcagcattcaaaaattgagatcagaggatcaagtatttgaagcaatagttacattcaagaatatgctatggggtgataacggtctgttcgaaagaaaaagaaatgaaacggcagaggcaacaagaagcgaaggtgaaaggttacggacggaacaactcgctttaaccagtttgcaaagactcttcgcagacacttgtggtcgtgtagttggtctaagagattctcatgaagctgctggccgggtccatgccatgctacagaatccgtatttaaatgccagcttactgttggaagctcttgatgcaattttatntggacataatatgtaa

SEQ ID NO: 82475 - DNA, 213 bp, Saccharomyces pastorianus
atgtataaatgtgtcccgagttattgttctaaagcgggcaccattgtagtaacttattgcgaaatttctgctcttctcgtctcgctcaaaaatcgcgttcagggtaaaaggggcgaaacagagggccagatagaaatttcgagaaaagcgggtcacccccgcccctgcattttgatatggcgtatttgggattgcttgctcgaaagtgtctaa

SEQ ID NO: 82476 - DNA, 210 bp, Saccharomyces pastorianus
atgaacagcgaaaatagtaagataaccttcaagcccaatattctaagtaaaggcgtttatatatttgtactttatggtatgtgcatatgtattgtaaagaattatttcaagacacagttcttccagctactggctccggctattcatgaaaaatccaaaaataacatatttatgatagcatcagattcatttcccaatctttataaatag

SEQ ID NO: 82477 - DNA, 384 bp, Saccharomyces pastorianus
atgtttaaacgttccatcattcaacagtcccgcttattctccaattctgcttctagactaggtaaaaaagtgttctttgatcctgcggtcaatggaaccaaaatcggcagaatagaatttgaattatatgataatgtggttcctaaaactgctgaaaatttcagagccttatgtaccggcgaaaagggctggggctataaaggtgtccctttccacagaatcatcccagacttcatgatccaaggtggtgacactgatttgactaacggtttcgggggcaaatccatttacggtcccaagttcgctgacgaaaatttggtcaaaaagcatgacaaggcaggtgtgttatctatggcaaatgctggacaaacactaacggtctca

SEQ ID NO: 82478 - DNA, 4374 bp, Saccharomyces pastorianus
atgactggcatcaaagctcaagtccatcccccacctgatagtaccctatttcatgaggaggagaagaagaaagtaggaggcaatttacctcaaaaggtcataaatcaacaagaaaggggttctgatcacgctccatcgggtcaccatcaataccaccaactgattaaccatgacgcaaatgacacaaagacctcaaattcagtttctgatgtgtctaaaggtcagaaaactgctgactccaacccggaaggtaagaaacagtcatcaaaagacatatttgttgcctccagcgctcaaaaaaccaatcaattgcccggtcccaacccacagggaagcataggagccgtgccattggaagatttacgtccgaaggaattcagatcagcaccatctaggaagccaaataaattcgacacttcgattactaagcctggcgtcttagacgacttaggcaaacttgatgaaaaggatattaaggaaaaatttcacccagattccgacgacaagttatttccatggcaaaatgttggtgagttccatgcttcaggaaagggttcgccaaatacaaagatgtccagggttataaaagcttacattctggaaaatttttataacgattggtactgtaatatagccaccgttcttggaacttgtttcttctcatggttatttgcttacattgggttttcatggtggtctatgatatttatcttcttgggaactgcgaccgtttacaacgcagaatatacaagattcaacagaaatatcagagatgacttgaaaagagttacagtcgaagaaaccttgtcggatcgcgttgaatccactacgtggttgaattcatttttatcaaaattttgggtgatttacatgccagttttatctcaacaagtcaaagataacgttaaccctcaactggcaggtgttgctccaggttacggtatcgatgcgttagctatcgatgaattcactctgggctctaaagctcccaccataaaaggtattaaatcgtacactaagactggtaaaaacactgttgaaatggattggtcatttgcattcaccccaagcgatgtctcggatatgacagctactgaagctagggagaagatcaatccaaaaatatctctgggtgtcacgttaggaaaaagttttgtctctaaaacaatgcctattttggttgaagacattaacgttgctggtaaaatgcgtattaaagttgaatttggtaaagctttcccaaatatcaaaattgtttctttacaacttttagaaccacctttgattgatttcgcactgaaaccaattggtggtgatactttaggtcttgatgttatgtcattcttgcctggtttgaagagttttgttaaaaacattatcaactccaatatagggcctatgctattccctccgaaccatttggatattaatgttgaagacattatggctgctcaatcaaaagaagctattggtgtccttgccgtaaccattgcttctgccgactctttgaaaggctcagatttcattaccaatactgtcgatccttatattgttatgactaccgaagatgctgtgcctggtacagatgaagaagtgcgtacatctatcaaatcaaatgttaaaaatccacgttggaacgaaaccaaatatctattattaaacaccttagagcaaaagttaaacttaaagtgctttgacttcaatgatgtaagaaaagataccgtaattggtgatcttcaacttgacttggcagatttactacaaaaccctgttttggataatcaaactgctgaattaagatccggtacaaaatcaaaaggtattttacattattccttacactggttccctgtgaaagaagataaatcagaggaaaaagcagttgagcgtgccgaagctaaggccaagggcaagaaagaagatgaaaacgaggacactactgaaaaagaagaagacgagaatgaagaaagttctcaaactgatgtcgggattgccaagatcactttacaaaaggtcaaatatctggatacaaccagttctatgaccggtagcttgagcccatgtgctgaattattcattgatggacaaaaagtaaagagctatagaactttgagacgtatcaatgagccatcttggaatgagaccatcgaagttttggttccatcaaaatctaactctaagtttgtcctaaaaatattcgatgacagaatgaatagtaaggcgctgatctgtgagtattcatcttctttagatgatataatgactactttagacgctgctcaagagtttgttaaaggctcaccacaaggtgacatttatttggatgtttcttggaaatcaattgaaatgaccggagcttttgccgctgcaaactctgtaagcgaacctattggttgtattaagctagacgttaaggatgccattatcaagggtgacttatccggtgtaggggatgttgatccatattacaccgtatcgttgaatagacgtgttctttacaagtccatatatcattctgatacggatcatcccatttttgacaacagcacctacgttcctatcttctctccaaatcaaattttgactctcgaatttcatgattatcaaaagatcggcaaagaccgtttcattggctctgtacaaattcctacatcaaatgttttcaaaaaagatcctaaatcaggaaaatatgttgggaataatgacaaagaagaaatttcaaaactaaaattaaaagaccacaaacacaaagttaccgaaagcattgtcaatgtttcaacaacatttatcccaatcaatctggtgtattcccctgaggagttggtgaatgttgagaaactagaaaaggagttgaaggaaaagaagaaaaaattcgaagctacccaagaagaaaacgagcaagagatggaaaaaaatccaaaggaatgggaagttgccgagatcgaagacccatttgacagcgatgaaaaaaaaataaacaggaaggccaagttatctttaaacgagttgatcaagcaaaaatctggtattttgtctatgcaaatattggaagggactttgagcccatcctctgcttacctagaaatcttagcggatgacatttcgtaccctgtattcatttgcatgaaaccatctcaaggtaaactaaactcggagatggcaaatattttcattagagatttgaattacagtaaactacattttagagtatcgaagaaacatattgccaaagattcagatgatgtcatatccgaaacttcctatagtacattgaagctactaaagcaagcttacgaagagcccatgtggttaaacttcaatgggtctaaaatgaaggtaagatttttgtacacgcccactagcgtgaaactgcctagcagtgaaagtgttgaagacactggttatttgaatataaagcttatttccggacacggtctgaagtccgcagataggaatggctattcagatccatttgttcacatctttgtcaatggtaaaaaagttttcaaatcgaacattaaaaagaaaacattggatcccgtatggaacgaagatgctaaaataccaatcctttcaagaagtaagaatcaagtcatatttaatgttcttgattgggatcgtgcaggtgataatgacgacttaggccaagcttcacttgacgtttcctcattagaagttggtaaaacttacaactggaatttgaatttaaacacacaaggaagtatcaaattacaaggttcattcaacccagaatatatcaagccaagttttgatatcgtgaaaggcggtatcactgataagccgatgaaaatagccagtggtgcagcccatgcaactgttggcatagctggtactggtataggagcagcaacaggagttgccactggtggtttaaagaaaggtggtcaccttctaaaatctctaggtggcaatccaatgaaaagaagcaagagcagcaatggaaatgagtccaacggtgcaaaaaaatcatcagagaaaaaatcttttgataggagatccccaagtaatttgaatagcactagtgtaacaccaagagcttcactagactatgatccatcagtacctaacacaagttacgcgcccgttcaaagcgcatctcctgcagtcaagccaactgacaacacttctagctcaagcaacaaaaaagatacccctagtagcaactctagaggacattctcgtgcaagcagttttgcgcgtactttagctcctcatggcacttacaatggttttattaccgtggttgctgcggaaaacgttgccaagcatgttcaaattaagatctctttaactcaaggtggtagactaaaacacatatacgaaacgaccagccaacaagccaataatgatggt

SEQ ID NO: 82479 - DNA, 1608 bp, Saccharomyces pastorianus
atgtccgctaaatcgtttgaagtcacagatccagtcaattcaagtctcaaagggtttgcccttgctaacccctccattacgctggtccctgaagaaaaaattctcttcagaaagaccgattccgacaagatcgcattaatttctggtggtggtagtggacatgaacctacacacgccggtttcattggtaagggtatgttgagtggcgccgtggttggcgaaatttttgcatccccttcaacaaaacagattttaaatgcaatccgtttagtcaatgaaaatgcgtctggcgttttattgattgtgaagaactacacaggtgatgttttgcattttggtctgtccgctgagagagcaagagccttgggtattaactgccgcgtcgctgtcataggtgatgatgttgcagttggcagagaaaagggtggtatggttggtagaagagcattggcaggtaccgttttggttcataagattgtaggtgccttcgcagaagaatattctagtaagtatggcttagacggtacagctaaagtggctaaaattatcaacgacaatttggtgaccattggatcttctttagaccattgtaaagttcctggcaggaaattcgaaagtgaattaaacgaaaaacaaatggaattgggtatgggtattcataacgaacctggtgtgaaagttttagaccctattccttctaccgaagacttgatctccaagtatatgctaccaaaactattggatccaaacgataaggatagagcttttgtaaagtttgatgaagatgatgaagttgtcttgttagttaacaatctcggcggtgtttctaattttgttattagttctatcacttccaaaactacggatttcttaaaggaaaattacaacataaccccggttcaaacaattgctggcacattgatgacctccttcaatggtaatgggttcagtatcacattactaaacgccactaaggctacaaaggctttgcaatctgattttgaggagatcaaatcagtactagacttgttgaacgcatttacgaacgcaccgggctggccaattgcagattttgaaaagacttctgccccatctgttaacgatgacttgttacataatgaagtaacagcaaaggccgtcggtacttatgactttgacaagtttgctgagtggatgaagagtggtgctgaacaagttatcaagagcgaaccgcacattacggaactagacaatcaagttggtgatggtgattgtggttacactttagtggcaggagttaaaggcatcaccgaaaaccttgacaagctgtcgaaggactcattatctcaggcggttgcccaaatttcagatttcattgaaggctcaatgggaggtacttctggtggtttatattctattcttttgtcgggtttttcacacggattaattcaggtttgtaaatcaaaggatgaacccgtcactaaggaaattgtggctaagtcactcggaattgcattggatactttatacaaatatacaaaggcaaggaagggatcatccaccatgattgatgctttagaaccattcgttaaagaattactgcatctaaggatttcaataaggcggtaa

SEQ ID NO: 82480 - DNA, 351 bp, Saccharomyces pastorianus
  modified_base (9)..(75): a, c, g, t, unknown, or other
atggttttnnnnnnnnnnnnnnnnnnnnnnnnnnnnnnnnnnnnnnnnnnnnnnnnnnnnnnnnnnnnnnnnnnncgatttacttttaatgcatttttgcagtcaaaaaaagcttcgtttacatttatatgtatttatgtttgtatttctgggggaaatatgcctttatgggcgtatatactctttcgtacgtttctacatccgagtagcagtagtaactcggtattgtgctttcgtcgccataatcaggactatcataatcgaattttttttgcgttttgttgtcaccacatatggtcccttcttcctcatcatctatcaatattcccattcgtagacagttctacttaa

SEQ ID NO: 82481 - DNA, 1680 bp, Saccharomyces pastorianus
atgccagatgaaacaaattttacaatagaagatattgagcctaggcctgatgcccttcgaggtttggacacccagttccttcaagacaacacagcattagtacaagcatatcgtggtttagactggtcagatatttcttcgttgacccaaatggtagatgttatagagcaaacagtggttaaatatggcaatccaaatgattcaatcaaattggccttggaaactattttatggcaaatattgcgtaagtaccctttattgtttggattttggaagaggtttgctactattgagtaccagttatttggtctcaagaaatcgattgctgttctggccacctcggtcaaatggttcccaacttctctggagttatggtgtgattatttgaatgtgttgtgtgttaataacccgaacgaaacggattttattaggaataattttgaaattgcaaaggatcttattggcaagcagtttctatcacaccctttttgggacaagtttatagaatttgaagttgggcagaagaattggcataacgttcaaagaatatacgagtacattattgaagttcctctacatcagtatgcgcggtttttcacatcttacaagaagtttttaaatgaaaaaaatttgaagacaacaaggaatattgatatagttttacgaaaaacacaaacaacagtaaatgaaatttggcagttcgaatcgaaaatcaaacagcccttcttcaacctgggccaagtgttaaatgatgatttggaaaattggtcgcgatatttaaaatttgtgacggatccttcaaaatccttggataaagaattcgtaatgtccgtttttgacagatgtttgattccttgtctttaccatgaaaatacgtggatgatgtatattaagtggctaacaaagaaaaatatatccgatgaagtggtagtggatatataccaaaaagccaatacgttcttaccactggatttcaaaactttgaggtatgattttcttaggtttttgaaaagaaaatatcggtcaaataataccttattcaataacatattcaatgagacagtatcgcgttatttaaagatttggcccaacgacatattacttatgacggagtacctttgtatgttgaaaagacattcttttaagaattccttagatcaatcgccaaaggaaattctagagaaacaaacatcgtttactaaaatcctagagacatcaatcaccaactacatcaataatcaaattgatgccaaggtgcatttacagaccttaataaatgataaaaacttaagcatagtcgtggtagaattgataaaaactacatggcttgtacttaaaaataatatgcaaacaaggaaatatttcaacctttatcaaaaaaacatcctcattaaaaattctgtaccgttctggttaacttactacaaatttgaaaagagtaatgtaaattttaccaagctgaataaattcattagggagcttggggtagaaatatacttgccgactacagtaatgaatgatattttgacggattataagactttctatttaactcattcaaatatcgtcacgtatgaatcctccattatagattcaaatacatttgaccctatcttgtatcctgagctgaaaatgtcgaatccaggggatcctctagagtcgacctgcagcatgcaagct

SEQ ID NO: 82482 - DNA, 432 bp, Saccharomyces pastorianus
atgccagtagtcaatcatgaggatagtgaatttcacctttcgcacacagaagaggacaagttaaatgagttccaggtcatcacgaatttccccccagaagacttgccagatgtggtgagactgttgaggaaccatggttggcagttagaaccagcattgagccgatatttcgatggagagtggaaaggcgaaccagaccagatgggagagtccactcaaacgtctacacccatggctgagaccttggttcctcccgtgttgggacctagaccgttgttatttacagcctcattgcccgtggtcagaccattgccagcgaacttccgcaatgatttcagaacaattgggctaaatggacgctctaacactgtgtggtccatgtttgaatcttttagttatgatggtaacccctttctttttattttactgttg

SEQ ID NO: 82483 - DNA, 555 bp, Saccharomyces pastorianus
atgcaggtgttacagttatggttgacaactttgatctctttggtggtggcagtgcagggattacatttcgacattgcagcatctacagatccagaacaggtttgtattcgtgattttgtcactgaaggtcaattggttgtcgtggatattcactcagatggttctgttggtgatggacagaaactaaacctcttcgtgcgtgattcagttggaaacgagtatcgtagaaagagggactttgcaggcgacgttcgtgttgcgtttactgctccatcctccacggcattcgacgtttgttttgaaaatcaggctcagtatcgtggccgttctttaagcagggccattgaattggacattgagagtggtgctgaagctcgtgactggaacaagatcagtgccaacgaaaaattgaaacctatagaagtggagttgcgtagagtggaggaaattaccgacgaaattgtcgacgaattgacttacttgaaaaacagagaggagagattacgagacaccaatgaatctaccaacagaagggtaagaaatttctcaatttag

SEQ ID NO: 82484 - DNA, 576 bp, Saccharomyces pastorianus
atgagcaaatccactaacgttagttatgaaagagtagagctattcgagaacccgaaagtacctatcgaagttgaagatgaaattctggaaaaatatgcggaatccagtctggaccatgatatgaccgttaatgaactaccaaggttcttcaaggatttgcaactagagcccacaatttggaaactggtgagaaatgaagacgtcattatagaaggaactgacgtaatagatttcacgaaactggtacaatgcacatgccagttactgatactgatgaataatttaacagtaatagatgatttatggtcgatgcttattagaaactgtggcagagacgtggatttcccgcaagtggccttaagagatcatgtattaagcgtaaaagaccttcaaaaaatctccaatctcatcggggctgaccaaagttctgggaccattgaaatgattagttgtgctactgatggcaagaggcttttcatgacatacttggactttggttgcgtattgggaaaactaggttatcttaaagatgtgaagcgaacaaatccatattcaagacctgcagcatgcagctgc

SEQ ID NO: 82485 - DNA, 798 bp, Saccharomyces pastorianus
atgggtaagaaaaaactgaaaattttatccattttccaaagggataattacacaggaagaatctatatcgaagcccctaagcaatccgttattgaaaaattttgtaatggtgttccagatatttatatttctcaaaaattgctaattcctgtccaagaattacctctattactaaaaccaaacaaatctgatgatgttgctttggaagaaggtagttacgttcgtattaagagagggatctataagggtgacttagctatggtcgaccaaattagtgagaataatttagaagttatgctgaaaattgttcctcgtctggattatggtaaattcgacgaaattgatccaacaacacagcaacgtaaatccagaagaccaacttttgctcatagagcaccaccgcaattatttaatccaacaatggctctaagattagaccaagctaacctgtacaaaagggatgatcgccactttacttataagaatgaagattatatcgatggttatctgtataagtccttcagaattcaacatgtggaaaccaaaaatattcagccaactgtggaggaattggcaagattcggttccaaagagggcgcggtagatctaacatcagtttcacaatcaatcaagaaggctcaagctgcaaaggtcactttccagccaggtgatcgtatcgaagttctaaatggtgaacaacgtggttccaagggtattgtaagcagaaccagcgaaagatattgctactatcaaactaaatggctttacacgcctctagattggggatcctctagagtc

SEQ ID NO: 82486 - DNA, 138 bp, Saccharomyces pastorianus
atgagtgacaactcggacacaaacgtgagcatgcaggaccatgatcaacatgttgctgatcccgtagtggttccgcagtcaactgacactaaagatgaaaatactagtgacaagatactgttgatagtggcaatgtga

SEQ ID NO: 82487 - DNA, 1407 bp, Saccharomyces pastorianus
  modified_base (1387)..(1387): a, c, g, t, unknown, or other
atgagtgacgaaaccatgcctgtagaatttttagttagtgataaaagactgttgaaaaccataaaagttaaactggaaaccaacggcctttttgttactcctatctattccgacaatgataacaaagttataaaatcttctattgaggatctcaatcatccattggctgtcgaaattaacaatatagccggtgtgaaggcacgattccatgaaagtagtaacttggaacgtagtgaaggacgtttgaaacaccaaagtaacagcattacggaatttacgaagagctttttaaaagatcatgggcttgctaatgacaagatgtttttatctcatttattagatcatttacctctaaaatacacaatatatccaccagttgtattgttcaataattctacagtgagatcgtttaatcacccaatctggcaaaaagcattccaactgaaactcttcgatccaaatgagtattatcgtgagctgctatgtttcctttcgcccggcaaaccaagtaaaggcacgagtcttcatcctaacaatcgactactgactcatctggccataaataaccctatcacagaggcagatgtattgcgaagaccattcaatatccaaccgctttatggcaaattgattgatgacagtattttggatgataacgataatacgttatgggaaaatcccagtcaagaacaactaaactcaagcatatggtgtaaggtcatacaaaatggtgtaacacaaatctggtcacccgtttttaccatgtttagtagagggaatatcaaggagaagaaaagagttttgactactttcccagatatttgcaataatgatgtggtcgatttatacgcaggaataggttacttcacttttagctacttaacaaagggcgctaggacactttttgcatttgaactaaacccttggagtgtagaagggttaaagcgcggcttaaaggcaaacggattcagtaaatctgggaactgccacgttttccaagaatcaaatgaaatgtgcgttcaaaggcttactgaattcttatctcagaatcccggatttcggttacgtattaggcatattaatttaggtctcctgccttcaagcaaacaagggtggccattggccatcaaattaatttacttagaaggagcttctttggaaaaagtgacaatgcatatacatgaaaatgtacacatagatgcaattgaggatggaagtttcgaaaagaatgtcattgtagaactcgacgctattaatgagtcaattgcattaattagaaaccgtggcatcaaacttcagtttgtgagatctaagcttgaacgcataaaaacttttgcaccagatatttggcatgtatgcgttgatgtcgacgttatagtaagtactntaaatacaaaatataaataa

SEQ ID NO: 82488 - DNA, 159 bp, Saccharomyces pastorianus
atgctaatcgaagttatactgttacgaagtaaaggatatgaacacaacaaagcaaaaatgcaaaacaaatttatgcaaaatttaaaaaatgctctcatcgcttcaaaacattttgattcacttgatctaataatggttctcataatacagaatcgttaa

SEQ ID NO: 82489 - DNA, 765 bp, Saccharomyces pastorianus
atgcatatgctgtcatccgtaccacaaacatatcaattcctaaaatcaaacatctacataacagaacgggacccatataaaataggatgtgtactaatggacaacggttccaatttgaacgaagtagtaatggcctttgaagcagccatttcacaagatccaagccatataaatgcatggttgaagttaggtatagttaattttgaaaatgaaagcgaaagcaatggagagcttgctttgcgaaattgcttaaatttggatccaaataatacaattgcattggaaaacttagcaattcaccatataaatcaacaaaatgaatcagagtcattgaaactttttcacaaatggattctttcaaaattttcgaaggttttccaaccttctgcgggggaaaacaaagatagcattaataaaattccgaaaaaggcccatttggtgcatattctagaatccctgttgaatatgggtatagaaaaaaaagatcagtatgatatatattcagtattatcaatcttatattattcggatcagaaaataaagcaatctcagaaatgcttagagtttttactactggaaaagcccaataatggaacaatatggaatagatatggtgctattttggccaatactaagtcgtatcactctgcgataaatgcgtacaataaatgcaaacaactaagaccgaattttacaagggttcgttataatttagcgatcgcctacatgaataagggtgactatgtaaaagcaagcaaatgctaa

SEQ ID NO: 82490 - DNA, 138 bp, Saccharomyces pastorianus
atgggtaagatagatttacgggccgcactaccggcagataaatctcaacatagtggtgtcagcgaaaaagaattttcaagccttgaaaaccaggggtcaaaggaattctctagtttccccaagaataacaatgctgat

SEQ ID NO: 82491 - DNA, 1566 bp, Saccharomyces pastorianus
atgggacccaaagttgtacgtaacaactcaataacttctactacttctataacttcaaaagaatctcagacgaagagaaagtccaaagaatctccaggggccgccgcatcgaaagcttattcgatgacaatggaaactacaagtttaagctctcaaacaaatagcaggtcatattctatcacctccgccagctctgtgttaagcggcgcgagtggcagtttcaacagtactgttaatcctaaaccaaagactttgaatttggagaaagtcttagtgggtgctgaaaaaaaggcagaatctcgtattaaggaaagatgggaaccggaaaagacgaacttccaatacggcgtcaagactgatgagcatggtaatttaaatcaattcagtttctccaatgaaatgatgaataacattatggcgaaagttgatgctccaaaagcacaagatttacaaaaggtcaaaaaagtttctgctgagaaagaagccaagtcgatgaaatttgcattaggagctgctaatgctgtgaaagacatgcatcctggtgaggatatcgacaaaagtatagctcttaaggcgcagaagagggaaacctatctgagccaattaacttctcagcaagttttgactttggcaagagccaatgttgacagacaattggatatcattgaaaaaagcgatatgcataaaaagctattcactaatatggaatacaacaaagctgctgtcgctgtcgcacagtctaatcatcagaaaaagacagaattccataacaagattaacatgggtggtggcctgtttttatcaccagaagatatcactaaaatcgcatccggattgatttctcctgtacttggtgaagtgagtgagagggcggaggcgcaacgtgctatggatgaagaaattgcagaaagaactgaggcctataataaatcattaaatgaatgggaaacgatggaacgttctatcatttctaatgacgccaaagtattgactactacggctaataggcatcaaaccgaaaaaaagacctcccaggaaaagattaaagccagctttgatgcacttgtggccagaatggataccaaagtcgctgaaagggaaactctgcttgaagataccaagaacaaagagattgaatttaaaaagcaaatgcagcaagagttaaaggacgaaaaagctcgtctagatcaagatttggaggaatggggtaagaaatgtgaacaagatatcactgaagcgcgcaaagagcaagaagaactattgaaaccttaccatgacgatctggcaaatgcagaagcggaacataaaactttagtggaagagcgcgatgcaattaacgcagaaatctcaagattgcaggatgctatagttgaccataaaagaaagatctctggttacggaaatgatcttgacgcccagaagaatagaaatatcagagaggatgacaaattgctggaactaggtcaaactaaagaaagcttggaatcccatttgaatgatgacgttattattcttgctaataaggctaaagagcaggctgagtatcaaccaaggaggcccgtctga

SEQ ID NO: 82492 - DNA, 279 bp, Saccharomyces pastorianus
atgtctttaatttcagctgtagaagatagagacatacacaatataggaaagacttctggtggagggagcaggacttcgtctataacttcgtcgaaaaagtcgctgaaacacggctctaaatctttgagaaaaccaaaggtataccagacaacgggcgaaccattaagcagggaggctttatataaggcgaagttgaagtacggggtttaccagtcacctgcccaaagttactcaattggcgtcagcgacgctcaatgcagcttccgacaaggcagctaa

SEQ ID NO: 82493 - DNA, 381 bp, Saccharomyces pastorianus
atgagctacagttatgaagcttgtttttgggacccaaacgacaatggtgtgaacatccttctgggtcacatttctcagggaataaaatcttgcgactcaatgatacatttctttaagcagcgtagtgagcttgagaaggactatgccaggcggcttggagccatcacgggaaaactagacaaagacattggaacaaacatggattatggaaagttgaatgaaacatttaatgtggtgctcagtgttgagaaagctcgagcacaatcgcattccaaacaaagtgagattcttttcagacagatttacacggatactaaggcatttgccgctaacttgcaagcaagatatactacattgggggatcctctagagtcgacctgc

SEQ ID NO: 82494 - DNA, 201 bp, Saccharomyces pastorianus
atgtatatcaattttactagttttctgataaaagaaaaaaagtataatgtcagatttttgttaaatagaaatagaaagatatacgctgccgtgggagaaggacacctctccggatttgtaactaaaaatcataaaatatcacatctttccttcatattttcaaaaaaaaaaaaattttctttaccatttttgacacaataa

SEQ ID NO: 82495 - DNA, 450 bp, Saccharomyces pastorianus
atgaagactcaatactctctaatacgaaaaatttgggcacatccagtaacagaatttctgaaatcccagtggtttttcatctgtttggctattttaatcgttattgcaagatttgctccgaattttgcaagagacggagggttaattaaaggccaatatagtattgggtacggctgcgtcgcctggatttttctccaaagtggcctgggaatgaaatcaaggtcactaatggcaaatatgttaaactggagagctcatgccactattctggttctgagtttccttattacctcgtccatagtatatggattttgttgcgcggtaaaggctgctaatgatccgaaaatagatgactgggtacttatcggtctaattttgactgccacttgtccaacaaccgtggcttcaaacgttatcgacctgcaggcatgcaagcttgcactgccgtcg

SEQ ID NO: 82496 - DNA, 894 bp, Saccharomyces pastorianus
atggatcaagattttgacagtttattactaggtttcaatgactccgatagtgtccaaaaagacccaactgtaccaaatggcttggatggttcagtagttgatcctaccattgcggatccaaccgcaattacagctagaaagagaaggcctcaagtaaaattaacagccgaaaaactactcagtgataaaggtttaccatatgttttgaaaaatgcacataaaaggatacgaatttcctcaaaaaaaaactcatatgacaacttatcaaatattattcagttttaccagctttgggcacatgaattgtttcccaaggcaaaatttaaggattttatgaagatctgtcagacagtaggtaaaacagatccagttcttagagaatatagagtcagcctttttagggacgagatgggcatgagtttcgatgttggcacacgggagactgggcaagacctggaaagacaatcacctatggttgaagaacatgtcacttccgcggaagagaggcctattgtcgcagatagttccgcgcaagacaaaaggaatgtcgattacgataatgacgaagatgacgatatctatcacctttcttatcgcaacagaagaggacgagttttggacgaacgtgggaataatgaaacggtacctaacaatgttgtgccgcctaaggaaaatttggatgcattattgaagacattcagggtacaagggcccgttggccttgaagaaaatgagaagaagctcttattaggatggctagatgcgcatagaacaatggaaaaaggctctatgaccgaagaagacgttcaactgattcaaaatttggaagagtgggaaatgaatgatatagaggcacaacatactcattatgatcttattgccaggaggagatga

SEQ ID NO: 82497 - DNA, 2391 bp, Saccharomyces pastorianus
atgatggctaagaacaacaaaactaccgaggcaaagatgtcgaaaaagagagcagctagcgaagaatctgatgtcgaggaagatgaggacaagcttttatccgttgacggtttgatcgatgcggaagcaagtgagagtgacgaggatgatgacgaatacgagtctgccgttgaagaaaaggaatcatcttctgataaagaagcccaagatgattctgatgatgactccgatgctgaattaaacaaactgcttgccgaagaagaaggtgatgaggaagaggactatgacagttccgagttttcagacgacacaacttccttaacagacagattatcgggtgtgaaattgcaaacgatcgttgatccgaatatttactcaaaatatgcagatggcagtgatagaattatcaaacctgaaattaatccagtttatgatagcgatgatagtgatgccgaaacgcaaaataccattggtaatattccactttctgcatacgatgaaatgccacacattggatacgatatcaacggtaaaaggattatgagacctgccaagggttctgctttagatcaactgttggattctatcgagctacctgaaggctggactggtttactggacaagaattccggttcaagtttgaacttaaccaaagaggaattagaacttatttccaaaatccaaaggaacgaacaaactgatgatggcataaatccatacgaaccgttaatcgattggttcacgagacacgaagaagtgatgccattaactgctgttccggagccaaaaagaagatttgttccatccaaaaacgaagccaagagagttatgaaaattgtaagagctatcagagagggccgtattattcctcctaaaaaattaaaggaaatgaaagaaaaggaaaaaactgaaaactatcaatacgatttatggggtgattctacggaaacaaatgatcatgtaatgcatctaagggcaccaaaattacctccaccaactaatgaagagagttataatccaccagaagagtatcttttgtctcctgaagaaaaagaggcctgggaaaatactgaatatagtgaaagagaaagaaacttcgtacctcaaaagtattctgccttaagaaaggtccctggttacggtgaatctattagggaaagatttgaaagatctttggatttatatttagctcctcgtgtccgtaaaaacaaattgaatattgatcctaattctctaattccagaacttccctctcccaaggatttaagacccttccctattcgttgctcaacaatatacgctggtcacaaaggaaaagtacgcacattatccattgatccttctggattatggctagcaacaggatctgatgacggaacagtcagggtatgggaaattttaactggtagagaagtttatagaactactttaatcgatgacgaggaaaacccagatgaccacattgaatgcattgagtggaatcctgatgctaataatggtattctcgccgttgctgttggtgaaaacattcatttaatagtaccaccaatattcggctacgatattgaaaataacggcaaaactaagattgaagatggttttggctacgatacttttgggactgttaaaaaatctaacctagaagtgaacgagaatggtgatggcgatgaagatggagagaatgaatctgctaagaatgctgtaaaaaaacaagtagcccaatggaacaagccttctcaaaagcaactagaaaaggatatttgtatcactatttcttgcaaaaaaacagtaaaaaagctttcatggcatagaaaaggtgattactttgtcactgttcaacctgactctggtaacacttctgttttgattcaccaagtttccaagcatttaacccaatccccattcaaaaaatcgaagggcattattatggatgcgaagttccatccttttaaacctcaattatttgtctgttcccaaagatatgtcagaatttatgatttatctcaacaaatattggtcaagaaactgttgcctggtgcccgttggttatcgaaaatcgatattcacccaagaggtgataatttaattgcgtcatcgtttgacaagagagttttatggcacgacctggatttggctagcacaccttacaagacactaagatatcatgaaaaagccgtcagaagtgtaaatttccacaaaaagttacctctattcagctctgccgctgatgacggtaccatacatgttttccatgccactgtttatgacgacatgatgaaaaatccgatgattgtgccactaaagaaactaaccggtcataaagtaatcaatagtctgggtgtcttgatgctatttggcatccgagggaagcttgctgttttctgccgtgcc

SEQ ID NO: 82498 - DNA, 153 bp, Saccharomyces pastorianus
atgatactgtggggtggttcaggtggttatttggtaataattctttacacaataatgccagtgaagacgatagaggaatacgagtatgatttttttcggtttatcctaattttttttttcaaaagggatctaaacatttatccgttgttataa

SEQ ID NO: 82499 - DNA, 1938 bp, Saccharomyces pastorianus
atggctaaaggtgctgttactaaactgaagtttaactcacctataatatctacctccgatcagctgatatcaacaaatgaactattagatcgtttaaaagctttacatgaggaattagcctctctggatcaagacaatacagatttaacgggattagataaatatagggacgcactagttagcagaaaattattaaaacataaagacgtggggatccgcgctttcaccgcttgttgtctaagcgatatcctgagattatatgctccagatgcgccttatacggatgctcaactaacggacattttcaagcttgtgctctcacaatttgaacaattaggtgaccaagaaaacggctatcacatccaacaaacttatttgatcactaagctactagaatacagatcaatcgtattattagccgatttacctagttcaaacaatttacttatcgaactattccatattttttacgatcctaacaagagcttccccgcaaggctcttcaatgtaataggcggtattctcggtgaagtcatctctgagttcgattctgttcccctagaagtactaagattaatttttaataagtttttgacctataacccaaatgaaattcctgaaggtttgaacgttacttctgactgtggctacgaagttagtctaattttgtgtgatacttattccaatagaatgagtagacatctaactaaatactattccgagattattcatgaagcaactaatgatgacaataattcaagacttctcactgtggtagtgaaattacataaactggtattgagactttgggaaacagtacccgaactgatcaatgcagtaatcggatttatataccacgaattatcttcggaaaacgagcttttcagaaaagaagctacaaaattaattggtcaaatacttacctcatattcggatttaaattttgtttctacacattccgatacgttcaaggcatggatttccaaaattgctgatattagtcccgatgttagagtagaatggacagaatcaattcctcaaatcattaccacgagagaagacatatccaaagaactgaatcaggcactggcaaaaacctttattgattctgatcctcgtgtacgcaggacttctgttatgatttttaataaagttcccgttactgaaatttggaaaaatataaccaataaagccatttatacatctttacttcatttggcccgagaaaaacataaggaggttagggaactctgcattaacactatggccaagttttactcaaattcattgaatgagatcgaaaggacataccaaaataaagaaatttgggaaatcatagacaccataccatccactttatacaatctctattatatcaatgatttaaacatcaatgaacaagtcgacagcgtaattttcgaatacctactaccgtttgaaccagataacgataaaagagtccacagactgctaacggttttgtcacattttgataagaaggcattcacttcatttttcgctttcaatgcaagacaaatcaaaatatccttcgctatatccaaatatattgattttagtaaatttttgaacaatcaagaaagtatgagctcgtctcaaggtcctattgtaatgaacaagtacaaccaaactctccagtggttagcttctggcctttctgactctacgaaagcaatcgacaccctcgaaacaataaaacaatttaacgacgaaagaatcttttatttattaaatgcctgtgtcaccaacgatattccgtttcttacttttaaaaattgttacaatgaattggtcagtaagttacagacgccaggactatttaaaaaatataatatatctactggtgcttccattatgccacgtgatatcgccaaggtaatacaaattttgctttttagagcctcaccaaataatttataa

SEQ ID NO: 82500 - DNA, 1059 bp, Saccharomyces pastorianus
atggaaatatttaaaaaattccctcacgtcctaaatgatgattccactgatatcatatcatacctaattaaagaagttctattatcaaaccaggtcgttggtgattcaaaaaaagaaattgactggatagaagattctctattaagtgacacgaaatattctgcaataggtaataaggtgtttactttaaagctgttcactaacaaattgagatcaattgctccggatgttccacgagatgaattggtagaaagtttcaccgaaaaaactatgaagttattcttttacttgattgcaagtggtggtgagctgatttccgagtttaacaaggagttttatcccacccccagtaattatcaaacaaaattgaggtgtgtggcaggaattcaagttttaaaactagccaggatttctaatttgaacaactttatcaaaccttcggacattattaaattaattaatttggttgaagatgaatcgctgccagtaagaaaaacatttttggaacaactgaaagattatgtggctaatgaactgatttccataaagttcctaccactagtattttttactgcttatgaaccagatatcgaacttaaaaccacaacgaagatatggataaactttacatttggcttaaaatcatttaaaaaagggacgatatttgaaagagctttgcctaggttgatacatgcgattgcacatcaccctgatattgtggaaggtttagattccgaaggagacgcatatctaaatgctttaacaacagcgattgattatttgctgttttactttgactctattgccgcccaagagaacttcagtttgctctattatttatcagaaagggtaaaaaactatcaagataaattagttgaggatgaaattgatgaagaagaaggaccacaaaaagaagaagcgccaaagaagcatagaccttacggtcagaaaatgtatatcataggtgagctgtcgcaaatgattctattgaatttaaaagagaagaacaatcggcaacattcagcatatccaggtaaattaacttaccatcagattgtt

SEQ ID NO: 82501 - DNA, 231 bp, Saccharomyces pastorianus
  modified_base (161)..(161): a, c, g, t, unknown, or other
  modified_base (182)..(182): a, c, g, t, unknown, or other
atgttgagaacgtcaacattgttcaccaggcgtgtccaaccaagcctattttctagaaacattcttagattgcaatccacagctgcaatccctaagactcaaaaaggtgtcatcttttatgagaataaggggaagctgcattacaaagatatccctgtccncgagcctaaaccaaatgaaantttaatcaacgttaaatattctggtgtatgtcacaccgatttacatgct

SEQ ID NO: 82502 - DNA, 1365 bp, Saccharomyces pastorianus
atgcgacgagtttcttttgacaaatacggcttccaaccactatatgggaagctttctgatataacaggggcggaagtcagcattattaaccgctcaattttttttggccttgggtgcttattaacatgttttgccagaaacgtcacggaattctcaatagcaagagccatatgtggtattggtgcaggaggattgaacgctattagtagcattgctgttagtgacatatgtacagcaagagaaaggggcgtttaccagggatatgcgaatattgttttcgggtttggtcaattactaggtgctccgttgggtggtgtatttatagaaaccattggatggagggctctttttggtatccaagtacccgtgataatgttgtgctcggtattagcaatcaaaaacattaatattaagctattccatgttcctcctatgaaagaaagatataccttaaagaatctgtcacggatagatatatttggctcattaagtctggtggcgaccattagtggagttttatttttgtgctctagccagttgaacaagttgtatttagcattgtttaccattggtagttttattgtttttatcctggttgaacgttattacgcgactgagaaaattttaccattcgaactattgactcgttcattctgtttgagctcagcggtaacggttatatcttcatttgttgtatttggtgaaatctttaggtcgccaatctatttacaattgcttcaaaatattagtgtaacaaagactggtctctttttgattttcccctctatatcagttgcagtcggatcattggtaacaggatgggtattgcggaatacgaaaattaacctagcacactgtgcatatcaaatcatttttggtggtatgataatgcagctattgggtttggggttgggctatttgctactttcacatttgaatcctgactacaccatatatgatatgcttgagtctattacattcagatctaactcaatatggtggaaattgatttatgtgtttgcatcagtccttgtgtcctttggttacgcttgtctattagtggccacgttagtaagcatcgtattcaccgtcgaaaaatcacagcaaggaaccatgactggtgttttctatttgtggagatccattggtaacgttcttggtgcctctttaactttagtgtcctatgagaatagcctgtcgtccatgttatggaattatatgttcaaaaccaagcgtgatgacgaatatcacttcaccaaaaagcagtactactcccttatcaatgattcgagttacttgagagggcccaattttccaacggatatatttgttcgcattcttgatgtctacaaaaggcattcctga

SEQ ID NO: 82503 - DNA, 306 bp, Saccharomyces pastorianus
atgcaaacactagacgagacttcaaatctactccctccacctgaggaagctgaagcccctcccttggaacaaaaatttcatgaatacaatttggctttacctaagtttcccattttgttttcgctatggttgggtagttttttgagttccttggatagcactattgtcgcaaatataatgaatagagttgctgaggaattctctgaatcaagtaaaaagcaatggattgcgacgagttttcttttgacaaatacggatttccaaccactatatgggaagctctctgatataacagggcggaagtca

SEQ ID NO: 82504 - DNA, 1716 bp, Saccharomyces pastorianus
atgaataaattctgtctactacctttccatggcaagaggataggcgtggccaatattccttttaccatattattcaaaaagggcccttgttttcttcatagtcacatcacagcagtttattactcgacaaagggcaaaaatgacagtcatgaacaaagtcgtgtatccaaaaagtctacttttacccctctggaaacaccttggtacctcaggattgttgacaatgaaaaggaactaatggaaggtaagaaaaataaccaccacacgatgaacaaagaattggagatacctaaaacctctccaaactcattaagaaaaatagcagacctcctaactggtaaacttggtctggatgacttcctggttttcgatttacggaagaaaagcccaaactctgtttcagccgttaataagttgggtgacttcatggtcatatgtacagcaagatctaccaaacattgtcataaaagtttcttagagttgaacaagtttttgaagcacgaattctgtagtagtgcatacgttgaaggaaactttaatgagcgacaagaaagtagaagaaaaagaagattagcaagaaaatccaaccttagtaaactattaggtagaagctctgaatgctctgcaaaagacttaaatagtgaggcttggtatatgattgattgtcgtgtcgatggtatttttgtaaatattttgacacagagaaggcgtaatgaattgaatttagaagagctgtatgcacctgaaaatgagaaatctaagttccaaaatatagattcaggtaatgtccctactatttcaggggtaaatgaaatttcaagcaacaataatattcttttaggcctaagaagactggcccagcaaaggagaaggtattcaactatcaacccaaacgggctaagtaatttaagatactttctacaaaaggaagacttcaaaggagccaataagataattcagagtagtagtggtactgaaactcacaatatacgtactttggagcatgttaaaaatactttaaaggatttggtaggacaagagaggaaagtagatgttgttcaatggaagtccttatttgacgaacattcaacttttttaaccataaatcaatcggctgcatattggccactacgactagaatatgcgatacttctaaacaaagcagacccacaattttattcagatcgtgttttcctcaaggattatctacttttaaaaaaatcgttggggcaagagttaataaaggaagatctaatcgctcttttagaaatggttttgaaaacgcagcattctagtcattcatactttaacctagtaaagcaaaatagggtgattatcagagctttgaacctatttaaaggtctacaaacagaggacgatggctcagttgtttacgatgaagaggtaatatcccttcttttaaattccatggtcgcggatgaacgggtaaaattgagatcactctacgagacaatagaccacattttccaaacatttggagataagttgacttcaggcatgattgtctcaatattgcaaaacttggccaaaatcaaagactggaataagctacttcaagtctgggaagctatcacaccaacggaaggggaaggtcaggacaaaaggccctggaatgaatttataaatgttatcaatcaaagcggtgatagtcacgttatatcgaaaatcgctaatcatggtcatttgctatggatc

SEQ ID NO: 82505 - DNA, 2931 bp, Saccharomyces pastorianus
atggctatcttaaaaagaggagctagaaaaaaggtacatcaggagccagctaaacgctctgcgaatatcaagaaagctacttttgattcctcgaagaagaaagaagttggtgtgtctgatctgacgcttctttctaaaatctccgacgaagccataaatgaaaacttaaagaagagatttttgaatgctacaatctacacttatataggtcatgtgttaattagtgtcaatccattccgagacctcggaatctatactgatgctgttatgaatgaatacaaaggtaagaatagattggaagttccaccccatgtatttgcaattgcagagtctatgtactacaacatgaaatcatataatgaaaatcagtgtgttattatttcaggtgaatcaggtgccggtaaaactgaagcagctaaaagaattatgcaatatattgcggctgcttctagcacacatacggagtcaattggaaagattaaagacatggttttagccactaatccattgttggaatcttttggctgtgcaaagactctaagaaataacaactcttctagacatgggaaatatctagaaataaaattcaacaaccagtttgaaccatgtgctggtaatatcacaaactatttattggagaagcagagagttgtgagtcaaattaagaatgaaagaaatttccatatattctatcagttcacgaaaggtgcttccgatgcttataggcaaacatttggggtccaaaaaccggaacaatatgtgtacacagctgctgcgggttgcatatctgctgagacaattgatgacttgcaagattatcaagagacattaaaagctatgagagttattggtctcggtcaagaagaacaagaccaaatttttaggatgttagctgcaattctttggattggtaatgtttcctttatagaaaatgaggaggggaatgcgcaagttagggacacctcagtaaccgattttgttgcttatttgttacaaatagatagccaattgctgattaagtcacttgtggaaagaattatggaaactaatcatggtatgaaaagagggtcagtgtatcatgttccattgaatattgtccaagcagatgcggttagagatgctttggcgaaggctatttacaataacttatttgactggattgtgagtagggttaacaaatctctgcaggcttttccaggcgctgaaaagtccattggtattcttgatatttacggctttgaaatctttgaacataactcttttgagcagatttgtatcaattatgttaatgaaaagttacaacaaatctttattcaattgacattgaaatctgagcaagaaacttacgagagagaaaaaatccaatggaccccaattaaatactttgataacaaggttgtgtgtgatttgattgaggcaagaagaccacctggtatatttgcagcaatgaatgattctgttgcaactgcacacgcggattcaaatgctgctgatcaggcttttgctcagcgtttgaacttgttcacaacaaatccacattttgacttgagatctaacaagtttgttattaagcattatgccggtgatgtcacatacgatattgacggtattacagataaaaataaggatcaattacaaaaggatctggtagaattaattggtaccactaccaatacatttttagccaccattttcccggatactgtagacagagaatcaaaaagaaggccacctacagcaggcgacaaaattataaagagtgcaaatgatttggttgaaactttatcaaaagcacaaccttcatatatcagaacaattaaaccaaacgaaaccaaatctcctaacgattatgacgatcggcaagttctacaccagattaagtatctaggtctgcaagaaaacgtgcgtatcagaagagcaggttttgcatatagacaagtgtttgagaagttcgtggaaagattttatttattatctccacactgttcttacgctggtgactatacatggcaaggtgataccttagatgctgttaagtatatattgcaagattcctctatcccacagcaggagtaccaattgggtgtcacaagtgttttcatcaaaacacctgaaacattatttgctttggagcatatgagagatagatactggcacaatatggctgccagaatccaacgtgcttggaggagatttttgcaaagaagaattgatgcggccactaagatccagcgcaccatcagggagaggaaggaaggtaataagtatgagaagctccgggattatggtacgaaggttttgggtggaagaaaagaaagaaggtctatgtccttattaggttacagagccttcatgggtgattatctatcatgcaacgagtccaaatcgaagggcgcttatatcaaaagacaagtgagcattaaagagaaggtcatcttttccatacatggtgaggccttgcatacaaaatttggccgttctgcacaaagattgaaaaaaactttcctattaactccaactacattgtacattgttggtcagactttggtccaaaatgctatgacctatactcaggattataaaatcgatgtgcgaaacattcaagcggttagtttaaccaatttacaggatgattgggtcgccattaagttggctagctcaggtcaacctgaccccttaatcaacacatatttcaaaacagaactcataacgcatctgaaaaggcttaacgacaaaattcaaattaaaataggctcggcgatagagtaccaaaagaaacctggaaagttgcattcagtgaaatgtcaaatcaatgaatctgcaccaaaatatggcgacatatataaatccagtacaatatcagttcgtcgtggtaacccacctaattctcaagtgcacaaaaaaccgagaaaaaagagttcaatctcttag

SEQ ID NO: 82506 - DNA, 339 bp, Saccharomyces pastorianus
atgaaattagcatactctaagatcgttaatggtcaaactttttcatatgtagactccagcttgcaaccagaatattttgagtctcctttgcagtcaagcaaatccaaacaaagttttactcaaggagaactaaacgatttgaaatggggaagaaaccaacctgttaatattaatttagactcttccattacccaggacggcaaatttgcatataaaattgataaaataactgatggtctgggaaatgtcgtggattttacatctctccctgaagaattaaaaaagcgctatgatctatcttataatttcaatgttcatgggttccacgtgcagcgctag

SEQ ID NO: 82507 - DNA, 342 bp, Saccharomyces pastorianus
atgtttaatcctcttcatgaatcatattgtttgcccatggataccaatctttttaaaattaactcaattgacgtacccatcagaataaactcaactgaagagattgaatatatcgagttggaatatagagatctttacacaaattcggtagagttacggtctttgagtaagaaagacttcaaaatcatcgataaccccaaatcctttttaaaaaaagatcagtcagttctaaagtcacattcaaacgattttgaagaaggcagtacaattcgttatttggctgtaactcttcaagatattggcttttatcaaatcaaaaaaattgttattccaaaaaactga

SEQ ID NO: 82508 - DNA, 165 bp, Saccharomyces pastorianus
atgctactattgaacattttcatatcaagcgatcacgagttcgttttgatttcattaattatgaccacatggagaaaactttatacgaaagaattaagtgtaacaggttcagccattaaccatcatcgtatttttgattcttccgctcatttaagggtgctctaa

SEQ ID NO: 82509 - DNA, 492 bp, Saccharomyces pastorianus
atggagcacagatataacgtgtttaatgatactccacgagggaaccattggatgggcagttctgtgtcaggatcaccacgtccatcttatagcagtcgtcctaatgtaaacacaacacgacgcttccaatatagtgacgatgagcccgctgagaaaatccgacctttacgctcgaggagctttaaaagtactgaaagtaacataagcgatgaaaaatcaaggatatctgaacgtgacagcaaagaccgctacattaatggtgataaaaaggtagacatttattcactgcctctaatatcaaccgatgttttagaaatttccaaacaaaggacatttgcggtgatattgtttttaataattcaatgttataaaatatatgacctggtaatacttaaatcggggttaccgatttcgggtttactgtttaagaactatcgatttaatttcatatccaagtatttcattatagattccttcttcctgtatgggtga

SEQ ID NO: 82510 - DNA, 1308 bp, Saccharomyces pastorianus
atgtacgagtactgctcagttgtaataaagaaatactccaagtatacaattccctccttcgctccaaatggttttcaatcaatgcttgagcctcctcagatagacaagtggcaacacctttccgctaactgcactctccaatttcgggttcttctaatggactctagacaaattctgatcaatgtggttctcaataattcaacacttctcgaaaatattcgcctgccgctgggagataatcaagatttaatacaattttcatgtaaaagccccataatctcttgtaaatatatctccgaagaattcggacccagaatgttaaggaggtttcagatgaatttgccaaatgacgttgagttcaacaggactgtagtttctttaaagaaccttaattttgttttaaggacagctaggacatcaatagcccagagtacaataacaagccaggtgcaaggcaataataacggtacaaaggtctgtttcacagaaggtccaaaagttagtagctacacaaatccgaacacgcaatttcaaactcaaaacatgattatggatttcagtcaacgttatcaggaagaatctgaaagagagtcaaataatcgttcaaatataactttaccacacgacagcattcaaatagctcaacaaatatggccaaacacggatttaaatgtagtacactcttcacaagacctcaacactccaatggctatgcaaactgttttgggtcgtcctgagtcgctaattgtacagccattggaggtttctcaatctctaccaaacactaccaactgccttcctaatgcagaaaacaaaaagaaaaaagtcgacaccacttctgattttacttcaagaaaggagattgctctgtgtaaaactggtttattagaaactattcatataccaaaggaaagggaaagtcagatgcaaagcgtcactggtttagatgcaacaccaacgattatatggagccccgggaaagacaacacggcgaagaaaaataccagtaataagaaaaatattgatgataaactaacaaacccccaaaaatctggaaatacacatacccctgatagaaataaagaagtgctacctaacggcacacttaatgaaacgaggaaagaagcatcgccaagcgaaggattaacgataagagttaaaaacgttaatcggaatgcgtcaagaaaaatatctaagcggctaatcaaggaaaagttgaaagacgaagaattcatgaaatgggtatgtatgcatttgcaagaaactgagctgtttccccctcttatccactcattttctctgacttga

SEQ ID NO: 82511 - DNA, 204 bp, Saccharomyces pastorianus
atggcagaatacttggccacctgctccttccattcttccttcgtgaagcacttctttccatacgtaaagtctttcccaccattcttgccttggccgctgcaagatccgctcttcgtggtctcgttactaagagtagatatagtcatttctatttgttaccacacacaaatatatcttaatccggctgatattcgtctctactga

SEQ ID NO: 82512 - DNA, 405 bp, Saccharomyces pastorianus
atgatttgcaatcaccagcacagccccagcaatcatctcaacagcagatccagcagcctcagcatcaaccccagcatcaaccgcaacagcaaccgcaacagcaacaagaacaacagcaacaacagcagcaacaacaacagcagcaacaacagcaacagcagcaacagcaacagacaccgtatcctattgtcaacccacaaatggtccctcatattccatcggaaaattctcattcaaccggacttatgccttcagtgcctcctacaaatcaacaatttaatgcacaaacccaatcttcaatgttttcagaccagcagcgcttctttcaatatcaattacaccaccaaaatcaaggacaggcgccatcttttcagcaaagccaatctggtaggtttgatgacatga

SEQ ID NO: 82513 - DNA, 2178 bp, Saccharomyces pastorianus
atgtctggaatgggtattgcgattctttgcatcgtacgtacaaagatttataggataaccatcagcttcgattattctacactgatgagccctttcttcttattcttaatgatgcccactacattaaaggatgggtacaggatgaatagtcaagtaaatgaagatgctataggtatcaatcttgacctctcactgcccactcacatttcgcctacgactggttcagagagcgccagtggcagtaacgccagtacacttcgcaacgatggaaatgcactagatggaggtcttttgaggacttcagcagcgatttcagcacccacaggtaccagtcaaccaacagaaactattggtgaaaaactgagtaatgaagagcgggtgaactcgaatgtttccgcttcgaactcgacaacggcgggtacagggcgtatgttaagccaatccttgactaatgattcaccgtcgaacgaaatatcgacggatcagttgaagatttttcaaagaatggacgaaatgagtgcccgaatgattgagatggaggaaagcttcaacaagttatctaataagatcgcggaacagaatacaatggttttaaacctaaaacaagataactataaagttctgaacaaattgaatatattacttaagttggttgcgcagccaagcgcgcgcccaagcacaaacaatgcccaaaataagtttgctatcgaattgctaaattcgatatcagccgttagtagtgcttacttgcagaaaatgcagaataatggctctggtagacagcatactgctgattcatgtacaggagattccaacacccattttggtatcaacaagcatcggactacgaatggaaccatagatgtgaatacgaatactgcacagctaaacaaccaattttctaacgcactgaatactatcttacctgatcagcagcataatcgaaataatgtttcccaaaatataaaccaatcgctccctaaccgacaacttggtcctgttataaacacacaagccaatcagaaccagtcgcaggttttaattcataacacaaatacacatcagcaggtaaatcgctcgcctattagtttcccgaacgcttcaactgacaagccattcaagttgaacccaaatgggattaaacggcgcagaagaaatacgcaaagtaacaacaatgcgagcacaaatgaccatgctagtgctgcacaaaagcccatatcagccctatctccattaacgaattctcataattctacaactagcatgaattataccaattcttccattcattcaggcgtcaccagtgcttcaaattcatttcatgacttaaattcattgaataactttggcacgacaacagctttaagtttgcccagcttagccctagataacgcttcttttcccccaaatcaaaatgttataccccctattataaataatacccagcagcctctatcattttcccaattgatcaatcaggatagcacgacatctgaattgttaccgagtggtaagtcaggggtgaacacgaatattgtaaatagaaacagagcttctactctaccgtcgtactcaaaaccaatgacagtgaaaagtaatgtcgacgatgatggctatctagaggatgatgatgatgacggtgatgacgaaggtgatggaagggataatgaagaagacagcactgctgaggaagatgaagtagatgatgaaatcgaaacagatatgaagaacgcttcgattaacaagcggaggaggagcttgcatcataaaaaaagtaactctttaaacggtagaagaaagcttcacggcgagtcggctactaagcccaacataaactctgatttacattataggatattgaaggctcccactgatgtaaagactatatgggaagagtatgatactggaataagaggaaagccatcgatcaagcatcttgaggccaagtatggtaacaagtggaggctcaataaaaataagaagaccttttcaaggcgaaaaagattgtacaagttcattctgaacggtatggagagagggaaaacggcacaagagatgatagaaaccttagagaacaaaaggctatataaagatgatgaggatggcgaaataaaagaaaagaaccattggctggttgcaagagaacctttctgggaaaaaggcccgtacgatagttaa

SEQ ID NO: 82514 - DNA, 939 bp, Saccharomyces pastorianus
atgagcaacgctaatccttatgagaataacaatccgtacgccgaaaactatgaaatgcaagaggacttgaacaatgctcctactggtcactcagatggtagcgacgatttcgtagcttttatgaacaagatcaactcaataaatgctaacttgtccaggtacgaaaacattatcaaccaaattgatgcgcaacacaaagacctacttactcaagtgagtgaggaacaggagatggaattgagacgttctttggacgattacatctctcaggccacagatttgcagtatcaattgaaagcggatatcaaagatgcccagagagacggattgcacgactctaataaacaggcacaagctgaaaattgcagacagaaattcttaaaattaattcaagactacagaattatcgattctaactacaaagaagaaagcaaagagcaggcgaagagacagtacacaattatccaaccggaagccactgacgaagaagtggaagccgccatcaacgatgtcaatggccagcagatcttttcccaagcgttgctaaacgccaatagacgtggtgaggccaagacagcattggccgaagtacaggctagacatcaagagttgttgaagttggaaaaaacaatggctgaacttacccaattgttcaatgacatggaagagttggtcatcgaacaacaagaaaatgtggatgtcattgacaaaaacgtcgaagacgctcagcaagatgtagagcaaggtgtgggtcacaccaacaaggccgttaagagtgccagaaaagcaagaaaaaacaaaataagatgtttgatcatctgctttattatctttgctattgttgttgtcgttgtggttgttccatccgttgtggaacaagaaagtaatagagcacatgcgcctccctcccgccagccccccaattcctattatgtgtaa

SEQ ID NO: 82515 - DNA, 300 bp, Saccharomyces pastorianus
atggctggtgaaacttttgaatttcaagctgaaatcactcagttgatgagtttgatcatcaacactgtctattctaacaaggaaattttcttgagagaactgatctctaacgcctccgatgctttagacaaaattagataccaagctttgtctgatccaaagcaattggaaaccgaaccagatttgttcattagaatcaccccaaaaccagaagaaaaagttttggaaatcagagattctggtattggtatgaccaaggctgaattgattaacaatttgggtaccattgctaagatctag

SEQ ID NO: 82516 - DNA, 162 bp, Saccharomyces pastorianus
atgacccaattggcagtacttgcgaagaaaagagaattcaagaagtcatcacgagaccattctgaattcgttgcttaccctatccaacttctagtcaccaaggaagttgaaaaggaagtaccaataccagaagaagaaaagaaagacgaggaaaagaaggat

SEQ ID NO: 82517 - DNA, 3516 bp, Saccharomyces pastorianus
atggtgacgaagccgtcacataacttaagaagggagcacaaatggttaaaggaaacggcgactttacaggaagacaaagatttcgtattccaggctatccaaaagcacatcgcgaacaaaaggcctaagacaaattcgccaccaacaacgccatccagagatgaatgtggaccaggaacaacaaactttataaccagcaatcctgcatctggaccaactaatactgctacgaaacaacatgaagtcatgcaaactttgtcgaacgatacagaatggctctcgtaccctgccacatcgaatcaatatgctgacgtacccatggttgatataccagccagcacaagtgttgtatcgaacccgaggacgcccaatggctcgaaaactcacaatttcaatacttttcgaccgcacatggctagttctcttgtcgaaaatgacagtagcagaaatctaggtagtagaaataacaataaaagcgtaatcgataattcaagtataggcaaacagctcgaaaatgatataaaattagaggtgatccgccttcaaggctccctaattatggcattgaaagagcaatcgaaattattgctacagaagtgtagtattatcgaatccacatcattgtcagaggacgctaaaaggctacagttaagtagggatatacggcctcagttatcaaatatgtcgatacgaatagatagtctggaaaaggagatcataaaagccaaaaaagatggaatgtcaaaagatcaaagtaaaggtcgcagtcaagtttcttcacaagatgataatatcatatcaagcattctgcccagccccttggaatacaatacatcttccaggaattcaaacctgacaagtactactgcgactaccgtcactaaggcattagccatcactggtgcgaagcaaaatattactaataacaccggtaagaatagcaataatgatagtaataacgatgatttgattcaagtcctggatgatgaggatgatatagactgtgaccctcctgtaatattgaaggagggggctccacattctcccgcattcccgcatctccacatgacgtcagaagaacaagatgaacttacaagaaggagaaatatgcgttcaagagaaccagtcaactacagaatacctgatagggatgatccttttgactatgttatgggtaaatctttgagggacgattatccggatgtcgaaagagaagaagatgagttaacaatggaggcagaagatgatgcccattccagctacatgactactagagatgaagaaaaagaagaaaacgaattactaaatcaaagcgattttgattttgtggtaaacgacgacctagacccaactcaagacacagattatcatgataatatggatgttagtgcaaatattcaggaaagtactcaagaaggtgacactaggtccacaattaccttgtcgcaaaataaaaatgttcaagttattttatcatctcccacagcacaaaccgttccctcaaatggccaaaatcaaataggcgtggagcatattgacttgttggaagatgatctggaaaaggacgcaattttggatgatagcatgagtttctcctttggtcgtcaacacatgcccatgtctcattctgatctagagttgatagacagcgaaaaagaaaatgaggattttgaagaagataataacaataacggtatcgagtacctatcagatagcgatttagaaagatttgacgaagaaagagagaatagaacccaagtagcagatatccaggaactagacaatgacctgaaaataataacagaaaggaagcttacaggtgacaatgaacacccaccaccatcttggtctcccaaaataaaaagggagaaaaccagtgttagtcaaaaggatgaggaagacgattttgatgacgatttttcattaagtgatatagtgagtaaatcccatttatcttctaagacgaatggtccaacctatccttggtctgatgaagttttatatcgtttacatgaagtctttaaactgcctggttttagacctaaccaactagaggctgtaaatgcaactttgcaaggtaaggatgtttttgttcttatgccaacagggggtggtaaatctctttgctatcaacttcctgcagtggtgaaatcgggtaaaacacatggtactactattgtcatctctccgctaatttccctgatgcaagatcaagtggaacatttattgaataaaaatattaaggcgagcatgttcagttcgaggggtactgccgagcaaagacgacaaactttcaatttatttattaatggattattggatttagtttacatatctcctgagatgatcagtgcctcagaacaatgcaagagagctatcagtagattatatgcagacggtaagttggctcgtattgttgtagatgaagcacattgtgtttctaactggggccacgatttcaggcctgattataaagaattaaaatttttcaaaagagaataccctgatattccaatgattgctttaactgcaactgcaagtgaacaagtcagaatggacatcattcacaatttagaactaaaggaacctgttttcctaaaacaaagttttaatagaacaaatttgtattacgaagtaaacaagaagaccaaaaataccatttttgaaatctgtgatgcggttaaatctaggttcaaaaatcaaacgggtataatatattgccactccaagaaatcatgcgagcaaacatcagcccaaatgcaaagaaatggcatcaagtgtgcatattaccatgcaggcatggagcctgatgaaagattaagtgtacagaaggcatggcaggcggatgagatacaagtcatttgtgctactgttgctttcggaatgggtattgataaacctgatgtgagatttgtttaccactttaccgttccccgaacattagaaggctattatcaagaaaccggccgtgctggaagagatgggaactattcatattgtattacctacttttcattcagggacattagaaccatgcagacaatgatccaaaaggataagaacttagacagagagaataaggaaaaacatctgaataaattacagcaagtaatggcatactgtgacaacgttactgactgcagaagaaagttagttttatcttatttcaatgaggattttgactccaaacagtgtcataaaaactgtgataattgtagaaatagcgccaacgtgataaacgaggaaagggatgttacagaacctgccaagaagattgtaaaattagtggaaagtatccaaaatgaaagagtcacaataatttattgccaagatgtctttaaaggttcgagaagctccaaaattgttcaggctaaccatgacaccttagaggagcatggtattggtaaatccatgcaaaaatcagaaatcgaaaggattttcttccatttgattacgatccgagttttacaagagtattcaataatgaacaatagcgttttgcttcaagctatgtga

SEQ ID NO: 82518 - DNA, 5547 bp, Saccharomyces pastorianus
atgagatctataagaaaatgggcgtacgagacgttcaatgatgaaaaaatcattcaattcgtggtaatggcgacacctgatgatttacacgcaaattcggagtatattagaatggcagaccaatatgtgcaggtaccagggggtaccaacaacaacaattacgccaacatagacttaatactggacgtggcggagcaaacggatgtggatgcggtctgggctggatggggtcatgcttctgaaaatccgtgtcttcctgagctgttagctagttcacaaaggaaaatactattcattggtcctcctggacgcgctatgagatcattgggtgacaagatttcttccactattgtagcacaaagcgctaaaatcccgtgtatcccttggtctggttcacatatagacactatccatatcgataacaagacgaactttgtatctgtgccggatgatgtatatgtaaggggatgttgttcctcacctgaagatgctttagaaaaggctaaattaataggatttcctgtaatgattaaggcatccgaaggtggtggaggtaagggcattaggcgagtagataatgaggatgattttattgcattatatcgccaagcagtgaatgagacacctgggtcgcctatgtttgttatgaaagttgtcactgatgctcgtcacttagaggtacagttattagctgaccaatatggcactaacattacattgtttgggagagactgttccatacaaaggcggcaccaaaagattatagaagaggcaccagtgacaataaccaagcctgaaacgtttcaaaggatggaacgcgcagcaattcgtctaggtgaattggtaggttatgtttctgcgggcactgtcgaatacttatattcaccaaaagatgataaattttactttttagaactgaatccaagactacaagtagagcatccaacgacagaaatgatatctggcgtaaaccttcctgccactcaactgcaaatcgccatgggtattcctatgcacatgataagtgatatcagaaaactttatggtttagatccaacgggaacttcgtatattgattttaaaaatttaaagagaccctcgccaaaaggccattgtatttcatgcaggatcacttcagaagatcctaatgaaggtttcaagccctccactgggaaaatacatgagctcaattttcgttcttcttccaatgtttggggttacttctcagtaggaaataatggtgctattcactcattttcagattcccaatttgggcacatttttgctgtaggaaacgataggcaagatgcaaagcaaaacatggttttagctctaaaagatttttccatccgaggagaattcaaaacccccatagagtacctgatagagctattagaaactcgggactttgagagtaataacatatcgactggttggttagatgatttgattttgaaaaatttatcttccgatagcaaactagatccaacgctcgctattatctgtggtgccgcaatgaaagcatacgttttcacagaaaaggtgaggaataagtatttggaattattgcggaggggccaagttccacctaaagattttcttaaaacgaagtttcctgttgacttcattttcgataataatagatacttgttcaatgttgctcaatcatctgaagaacaatttattctttctatcaataagtctcaatgtgaagttaatgttcaaaaattgtccagtgactgcttgttgatctccgttgacggtaaatgccatacagtttattggaaggacgatatcagaggtacaagactttcgatagactccaataccatatttttagaagctgaactcaatcccactcaagtgatctctccaactccggggaaattggtgaaatatttggtccgaagtggtgatcacgtttttgctggacagcaatatgcagaaatagaaataatgaaaatgcagatgccactagtagcgaaaagtgatggtgtaattgagttactaagacagcccggttccataattgaggctggtgatgtcatcgcaaaattgactttggattcgccgtccaaagctaacgaatcgtctttataccgcggagaattacctgttttaggtccaccgctaatagagggtagccgaccaaaccataagctcagagtcttaataaataggttagaaaatattctcaatggatatcatgaaaactctggaatagaaactactctaaaagagttgataaaaatattgagagatggtaggcttccttattcagaatgggattcccaaatttctacggtacgcaatagactaccaaggcaattgaatgaggggctgggaaatctagtcaagaaatctgtttcttttcctgcaaaggaactgcacaaattaatgaagcgctacttggaagaaaatacaaatgatcatgtagtttatgttgccttacagccacttcttaaaattagtgaaaggtatagcgaaggtttagctaatcacgaatgtgaaatttttttaaagttgattaaaaagtactatgctgttgagaaaatttttgaaaatcatgatatacatgaagaaagaaacttactaaatctgcggaggaaagaccttacaaacttcaaagaaattttgtgcataagtttatcgcatgctaacatagtcgcaaagaacaagttagtaactgcaatattgcatgaatacgagccattgtgccaggattcctctaagatgtctttaaaattcagggctgttatacatgatttggcaagtttggaatctaagtgggctaaggaggttgctgtaaaggcaagatcagtgctactcagagggattttccctcccataaagaaaagaaaagagcatattaaaactctcctgcaattgaacataaaggatactggtgccgaaaacattcacagcaggaacatatattcctgtatgagggattttggtaatttaatacattcaaatctgatacaacttcaggatttgttctttttttttggccatcaagatacggctctttccagtatagcatctgaaatttatgcaaggtatgcctacggcaattatcaattaaaaagtattaagattcataaaggagcgcctgatttactaatgtcatggcaattcagctcattaagaaattatttagtcaatcctgatggtgagagtgatgggtttacaaaactttctaaacctccctcaacatcaggtaagagctcagcaaatagttttggtcttcttgtcaacatgcgtgcgcttgaatctctggaaaagacattagacgaggtatacgaacaaattcatattcctgaggaaagactttccagcggagagaactctcttattgttaatattttatctcctattcgttacagaagtgaaaatgatctaattaaaactttaaaaattaaacttcatgaaaatgagagaggtctatccaagctcaaggttaatcgtattacatttgcatttatcgccgcgaatgcgcccgctgttaaattttactcctttgatggaactacgtacgatgaaatctctcaaataagaaatatggatccatcctatgaagcaccgttagagttaggaaaaatgtcgaactataaaatcagatcactacctacatacgatagtagtatacgcatttttgaaggtattagcaaatttacgccgctagataaaaggttctttgtcaggaaaatcataaattccttcatgtataatgatcaaaaaacaaccgaagaaaacttgaaagcggaaatcaatgctcaagtggtttatatgttagaacatctaggagcagttgacatctcaaattcagacttgaatcatatttttttaagtttcaatacagttcttaacataccagtacatcgtctcgaggaaattgtgagtacaattctaaagactcacgaaaccagattgtttcaagaaagaatcacagatgtagaaatttgcatctctgttgagtgcctagaaacaaagaagccagccccgcttagattacttatttctaataaatctgggtatgtggtaaaaattgagacatattacgaaaagatagggaaaaatgggaatctgattttggaaccgtgttgtgagcagagccattatagccagaaatctctctctcttccttactcggtcaaggattggctacaacctaaaaggtacaaagctcaattcatgggtacaacatatgtgtacgatttcccaggtctgtttcatcaagctgcaatccaacagtggaaaaggtattttccaaaacataagctgaatgacagtttttttagttgggttgaattgatagaacaaaacggtaatttaataaaagtaaacagggagccaggccttaataatatagggatggttgcttttgagattatggttcagacacctgaatatcctgaagggcgtaacatgatcgtgatttctaatgatattacctacaatattggatcttttggaccgagagaagatttgttttttgatagggtcacaaattatgcaagagagagagggatcccgaggatatacttggcggcgaattcaggagctaaattgggtatagccgaagagctgatccctctatttcgtgtagcatggaatgacccctctgatccaacaaagggtttccagtacttatacttagctccaaaagacatgcagctactgaaagattctgggaaaggaaattcggttgttgttgaacacaagatggtatacggtgaagagagatatattattaaagcaatagtcggattcgaagagggtttaggtgttgaatgtttacagggctcgggtttaattgctggtgccacttcgaaagcgtatagagacattttcactattactgctgttacttgtcggtccgttggtataggttcctatctggtcagactaggacaacgtactattcaggtggaggataagcctatcatactgacgggtgcatcggcgattaataaagttttgggtaccgatatctatacatctaacctacaaattggcggaacccaaatcatgtataaaaacggaatagcgcatttaacagccagtaatgatatgaaagccatcgaaaaaataatgacatggtcatcatatgtcccggcgaaaagagatatgagtcctccacttcttgaaactatcgatagatgggatagggatgtagacttcaaacctgccaagaaagtgccatatgaggcaaggtggttgatagagggtaaatgggactcaaataacaacttccagtcaggcctatttgataaggattcgttttttgagacattatctggatgggccaaaggtgtaatagttggaagagcacgtcttggaggtattcccgtaggtgttattgcggtagaaactaagactatcgaagaaataatccccgctgacccagctaatctggattcttcagagttttccgttaaagaagcgggacaggtgtggtatccaaattccgcgttcaaaacagctcaaactataaatgatattaatcatatgggagccaggggatcctctagagtcgacctgcag

SEQ ID NO: 82519 - DNA, 1161 bp, Saccharomyces pastorianus
atggcaaggcaagggaacttctacgcggttagtaaaggcagggaaactgggatctataatacatggaatgaatgtaaaaaccaagttgatggttatggtggtgcaatttataaaatatttaacagctacgagcaagcgaaatctttcctaggtcaaccaaatactacatcaaactatggaagttcaacgcatgctggagggcaagttagtaaacctcataccactcaaaagcgagttcatcgaaggaatcgcccacttcattattcctccttgacatcgtcatcagcatgttcatctttaagctctgctaatacaaacaccttttattcagtaaagagtagtgttccaaatatcgagagtaaaatctttaacaattggaaagactgtcaagcctatgtcaagcataaaaggggtataaccttcaagaagtttgaagaccaattagctgcggaaaacttcattagtggtatgagtgcgcatgattacaagctcatgaatatatccaaagaaagttttgaatctaagtataagctttctagcaataccatgtacgacaagtctatgaacgtttactgtgatggttcaagttttggaaacggcacgtcatcttcaagggcaggttatggtgcatattttgaaggagcgccagaggaaaatatttcagaacccttattatcgggagctcaaactaataatagagctgaaatcgaagcagtatcagaagctttgaagaaaatctgggaaaagttaactaatgaaaaggaaaaagtaaattatcaaatcaaaactgattcagagtacgtaaccaaattattaaatgacaggtatatgacgtatgataataaaaaacttgaagggctacctaattctgatttaattgttcctttggtgcagaggttcgttaaagtcaaaaagtactatgagttgaataaagagtgcttcaaaaataatggtaaatttcagattgaatgggtaaaaggacacgatggtgatccaggaaatgaaatggcagattttctggcgaagaaaggagcatctagaaggtactcaaatgcggttgtatacgcttggcttcttactggacctgttgtacctgtaatagaaatatatattttatatcttttgcatacatatacatacatcagctatttggttttttaa

SEQ ID NO: 82520 - DNA, 1032 bp, Saccharomyces pastorianus
atgttacacaggcacggttctaagcagaagaacttcgagaatatcgctggaaaagttgtccacgaccttgcaggtctgcaattgctttctaacgacgttcaaaaatccgctgtccaaagtggtcatcaaggatcgaacaatatgagagatacttcgtctcagggcatggctaataagtattcagttccaaaaaagggactacctgctgatttgtcttaccaactgattcataatgaattaacacttgatggtaatccacatttgaaccttgccagtttcgtgaacacttttaccactgatcaggcaagaaaattgattgatgaaaatttgaccaaaaatcttgctgacaatgatgaatatccgcaattaattgagctaactcagcgttgtatttctatgctagctcaattatggcacgccaatcccgatgaagaaccaataggctgtgccaccacaggctctagtgaggcaatcatgttgggtggactcgccatgaaaaaaagatgggaacacagaatgaagaatgctggtaaagatgcttccaagccgaacattataatgtcttctgcgtgccaagtggcattagagaaatttacgagatattttgaggtggaatgccgattggttccggtatcccacagaagccatcatatgcttgacccagagtcgttatgggattatgtagatgagaacactattggctgttttgtaattttaggaaccacctacactggccatttggaaaatgtagagaaggttgcagatgtcttgtcccaaattgaggccaagcatcctgattggagcaatactgatattccaatccatgcggacggcgcttcaggtgggtttattatcccatttggctttgaaaaagagcacatgaaagcttatggcatggaacgttgggggttcaaccatccgcgtgtggttagtatgaacaccagtggtcataagtttggcttaaccactcccggcctgggttgggtgctatggagggatgaatccttactggctgatgaattgagattctga

SEQ ID NO: 82521 - DNA, 198 bp, Saccharomyces pastorianus
atgaagttatctcaagttgttgttcccgccgtcgccttcactggtttagtaagtgctgctaacagttctaacagctcaagctcaaagaatgctgcccaacctattgccggtttaaacaacggtaaggttgcaggcgccgtctggtgttgctctaactggtgcttgggctttttgatttcacttagacttgtttggata

SEQ ID NO: 82522 - DNA, 117 bp, Saccharomyces pastorianus
atgcacgttttttatatgacgataatacttattttggtcaggaagcaaatgcagtccatacatgcgtttctgggtagtttatgcttaccctcccacgtgctagattttcgattgtaa

SEQ ID NO: 82523 - DNA, 792 bp, Saccharomyces pastorianus
  modified_base (781)..(782): a, c, g, t, unknown, or other
atgttacaacggagatttatatcctccagtggtataaagagattacttcacagagaatcaaacaaggttatgcacactgttttctttaaagtacgatattactcaactgagttgatcaaaaaaaagcataaggaagatattgaggattgggttaaagcgcaactaaaagattcttcaacaataagcggtgtgtatgagtctcggaataaactcgattggatggactccattaccaaaagccccagcagcttagatattcttaagaatcaatataatatagtgaaagacaaagattttggaatattgtggaagcaaaaattcgaaagtgcagatccagatattttgatgacaataattagcctttccactaaccaaaaggttttgttttcaatacagcaattactgatcttaataaattctcttcactttttgaaaagggactacgatattggacaaatatacacaacatatgagcaattcacgcccttattagcaagccacactgataaaggcacatatggtcagttcatcgaaattatgttggtagtacagcataatttacatcattttgatgtctgtgaaaccttatttgcagaatatatcaaatattgcaaagtaaagccacaaatgatatctttaggattaaactctttcataaggagtaataacactcaactagccgtggaattttacacgcaagcaattactaatcctgatacatttccaataactgaaaagcagctttttgagtttctccgatgtatggaaagatatctagatnnatgtccagta

SEQ ID NO: 82524 - DNA, 501 bp, Saccharomyces pastorianus
  modified_base (121)..(148): a, c, g, t, unknown, or other
atggctaggccagttaatacaaacgctgaaacggaatcgagaggcagacccactcagggtggtggttacgcaagtaacaacaatggcagctgtaacaacaacaatggcagcaataataacnnnnnnnnnnnnnnnnnnnnnnnnnnnnacagcaataacagcaataacaataacgggcctacctccagcgggagaaccaatgggaagcaaagactcacagctgcacaacagcagtacattaagaatctcatagagacacatatcaccgacaaccaccctgatctgcgccccaagagtcacccaatggatttcgaagagtatacggatgcgttcctgagaaggtataaagaccactttcaattggacgtaccggacaacctgacgctgcagggatacttattgggtccaaattgggcgcgaagacttattcatacaagaggaacacacaggggcagcacgataaaagtatacataagagagacctgccgggatcctctagag

SEQ ID NO: 82525 - DNA, 150 bp, Saccharomyces pastorianus
atggttcttgttagtcaacaatctcgctgcctcttcgtcagttgccaagtaaccaatcaaatattcgtcctcaaggatttcatacgcggagtcgcttgttcatgcacatctgagtctttcatgatctcagtaatgtccttaccagcatag

SEQ ID NO: 82526 - DNA, 309 bp, Saccharomyces pastorianus
atggcctttaaagttggctgtgataactttagttcttcgaacttttccacacaagtagtttgttctccctcaggtgcggtattgttttgttttgaagtgctcttttcatctactacaggttcttctgtagattcagaatctctagaacgtttattcgacggggtagccatacttctcctgttaatattgctcagcttaactaattattatagtatacagttatccaatagctatgtactcaagtaccgtgtatacactataaaatctcatctcatcgctaaagctaatattgaaaaaaaaaaaaaaaaa

SEQ ID NO: 82527 - DNA, 1011 bp, Saccharomyces pastorianus
atgtctacagacaagatcacatttttgttgaactggcaaccaaccccataccatattccaattttcttggctcaaaccaaaggttacttcaaggagcaaggtctagacatggccatcctagaaccaaccaatccttccgatgtcactgagttaattggatctggtaaggtcgacatgggtttgaaagccatgatccacaccttggctgccaaggcccgtggtttcccagtgacctctgttgcctctttgttggacgaaccatttaccggtgtcttgtacttaaagggcagtggtatcactgaagacttccagtccctaaagggtaagaagatcggttacgttggtgaattcggtaagatccaaatcgatgaattgaccaagcactacggtatgaagccagaagactacaccgcagtcagatgtggtatgaatgtcgccaagtacatcatcgaaggtaagattgatgctggtattggtatcgaatgtatgcaacaagtcgaattggaagagtacttggctaagcaaggcagaccagcttctgatgctaagatgttgagaattgacaagttggcttgcttgggttgctgttgcttctgtaccgttctttacatctgcaacgatgaatttttgaagaagaaccctgaaaaggtcagaaagttcttgaaagccatcaagaaggcaaccgactacgttctagccgaccctgtgaaggcttggaaagaatacatcgacttcaagcctcaattgaacaacgatctatcctacaagcaataccaaagatgttacgcttacttctcttcatctttgtacaatgttcaccgtgactggaagaaggttaccggttacggtaagagattagccattctgccaccagactatgtctcgaactacactaatgaatacctgtcctggccagaaccagaagaggtttctgatcctttggaagcccaaagattgatggctattcatcaagcaagaatcagacaggaaggtactttcaggggatcctct

SEQ ID NO: 82528 - DNA, 303 bp, Saccharomyces pastorianus
atgatgcgtcgcacgctattacattcattcgctacgctgctactttctttgtcgttgtggtcagctgcggtcatggcagctgtgacaactcaggttacagtggtaacaaatgtcgcaggggccctggttacggagaccacaatatgggaccctgccaccgctgctgctgctgctacaactaccgctcaaacaggtttcttcactacggtattcactaccactaacgatgtcggaaccaccgtcactcttactcagacagtcaacagagccactatgctaccaaccacgacgacttctacctca

SEQ ID NO: 82529 - DNA, 153 bp, Saccharomyces pastorianus
atgggactttctgagaatgatcaagaatccgatcaagatcaaaaaggaagagataccccttcgggacaagatgagaaatcaccactggaaactaagacagtagatgctcaaacgagaagggactactggctctctaaaggccaggctctttaa

SEQ ID NO: 82530 - DNA, 147 bp, Saccharomyces pastorianus
acattcaaagaccgcgttgttaaaagtatactcggaaacgtgatcatataccgtgggcttaagagagatttcaacgacgaaagagatttagtgcagaataaagccatcattgaaacgagcgctaccacaagaggcgcacgaggatag

SEQ ID NO: 82531 - DNA, 1395 bp, Saccharomyces pastorianus
atgacaaggctcaaagcaaaatattcacctacaaaaggtaaaagaaaagaagataaacatacaaaacgtatgcgtaaatcatccttcacaagaacgcaaaaaatgcttgaagtatttaacgataatcgctcgcatttcaacaagtacgagagcctcgctatcgacgttgaagacgatgacactttcggaaacctagtcttaatggaaaatgataaaagtgatgtcgacatacctgtaatagaagaagtcacatcaagtgaagatgaacaaagggcagaatctagcaaaagaaacaattctctcgaagataatcaagattttattgctttttcggacagctctgaagatgaaacagaacaaataaaggaagatgatgatgaaagaagcagttttctgttgaccgatgaacatgaagtttctaagcttacttcacagcaatctctgaacactgaaagcacttgcaatgtggagtatccttggataagaaatcattgtcattcgaaacaaaggagaatagcagattggctaacttcagaaatcaaagatttcgttcattatatctctccaagcaagaacgaaatcaagtgcagaaatagaacgatcgataaactacgccgggcggtcaaggaactgtggtcggatgcagatttgcatgtgtttggttcttttgccaccgatttatatttgccgggttctgacattgactgtgtcgtaaacagccggaatcgcgataaagaggacagaaattacatttatgaattggcgagacatttgaaaaacaaagggctagctataagaatggaggttattgttaaaacgcgagtgcctattatcaaattcatagagccccaatcacagttacatattgacgtttcatttgaaagaacgaacgggttagaggctgcaaaactcatcagggaatggctaagagactctccagggttacgtgaactggtactgataataaaacaatttttgcattcaagacgattgaacaatgtgcacacaggaggattgggaggtttcacagtaatctgtttggtttattcttttttaaatatgcatccgcgaataaaatcaaacgatatcgacgttctagataacctgggtgttctactgattgacttcttcgaactttacggaaaaaaatttggttatgatgacgttgctataagcatatctgatggttacgcctcttatattcctaaatcgtgttggagaactttggaaccttcaaggagtaaattctcgctagctattcaagatcctggtgatcctaacaataatataagcagaggctcctttaatatgaaggatataaaaaaggcctttgctggtgccttcgaactgttggtcaataaatgctgggaattgattctgctggggatcctctag

SEQ ID NO: 82532 - DNA, 906 bp, Saccharomyces pastorianus
atggaacaccaagcacttcgaaggcttgtactgtactgccccaatttcatccgacgtggtgctcttaggcataatatgactagagtgagctgtagacatatgtcaggcaagggtggagggagagatgagaacggtgattgcaatgaagaaaaggattcttccaaagatttggggagggtaccgtcgaagatgaaacgagcatatgatggtgaaacagttattaaagagggagactcacacgctgagtcgctagcgcagcagggaaagcagcccacagacctcgcatataacagcagatcgaagatatctggttctaatttgcatttactggttcctagagttgcgtctacagactatattccgaataaagaggttcacacggagggcctgtttgccggctatcgacccttgtttctggggaactcaggttttccgtctgatgcaagaaagggtaaaaactttcatgagttagacgacgttcttcccaatatacaggtagtggacgcttccgagaaagatggcaaacttaatgtgcaggagattattgaggacttacaaagaacaagtttgagagaaagcattcatagtatggaacagctaccatcttcgcacaaacgtaaacccgtaataccgtgggacgcatctataagtggcatggtttataatgacatgcctttcaaatatgtgcccaaaaatattattctgaaaatgaagccatttaaacttttgcgtattgagagaaaaagtcaagcgaagaatgcaagaaagcctactatgataaaacttcagtttcacaatcgaagaatcaatgacaccccagagttagtgaatttataccataataaatcccgtttgcacgagtcactttacaatacaaaaccccttcaagaatctggatattcaagt

SEQ ID NO: 82533 - DNA, 1206 bp, Saccharomyces pastorianus
atgagcggttttaaatgctatttgcaattgggtgacaggctctctcaaatatggctaaataagtatactttggttttgctgctagcaatgctgaagcttctgtttttctccaaatccatacaacatgcgatagaagtctcggaaacgtatattttgtccaattgttacagtattgattcactatactccaagatgacagacaacacgccgcactatttaggtatcatggggaattatcttatcgagaaggatatggaggagactgttaaagctacgctagagacgttatcacttatagtatatgcgagcgaggggctggtaaactttgccattgacctgtatttgggcacttatgcctgtttgattgttagtgccgttgatggtaccgtggacgttgctactaacactacagaaaaactgattagcttagtcaatgatacagtttcaagtgtggctaatgaattggatacgggcttgaatgacatctccaaaataatcaataaagtgatcaaggccgcatccaaagtagagaattttttcacaggtgatgacgatgacagtaacatgacgtcgtcaatcaaaagcgtcaacttaaccatatctgcgcttcacaatttatacattccttcctcaatcaacgataagcttgaagagttatcggcaaagacgccggactttgcccaggttaagaatacaaccaagaacctgatctcggttcccttcaatgaagttcggaagaatatcaaggccgtgaatgccagcaatataatcggagatacctccgttttgtacgtacctcccgtgtcccttgacaacagtactgggatttgctcatccaatcaatcagaaattttggccttttattccatcttgggacatgtcctgaaaatagccaccgtagtgtgcattaccgtattgatatgcttcgctgttggtgcgatggcgcccgttgcatggaatgaaatcaagctctggaggcgcctttgcggaatgagagaccattacatgctgagcaggcaagattcgtatacgtccttttccagtgtaaacacgcacgaattgaaagatccatttagagatcctcctatacaaaatggccaatatgatgtcattgcaagctatcagcagtgctttcacacatggaacacaagaatagcaggctggatgacaaatcttgttacctttggaaaatcaccagagaacatt

SEQ ID NO: 82534 - DNA, 3042 bp, Saccharomyces pastorianus
atgcgaattttttcaggtgacaacaaggtagttgattccctcgcctctaaccctggattaatgagtccatcgaattttggcggtgacttcggttcacgactaaaagtaaatgtaacatcaaaaaagaaacttaacgactcatcatcaacttctcccatggaaagttcaccagtttcacctgagttggtgcctattctaacactgctaaatgcacatacacatagaagatatcatgaaggcgtgtttttgattttacaagaccttaacaacaatggcactcatgcagcaaggaaatggaaggacgtatatggggtactgttgggtactcaactagccctttgggacgccaaggaactagcagaattcactgatccgtcttgtccggtctctgaaaagaaactgaaggaagttgcttccaaacccacttatatcaatttgacagatgctacactaagaactttggataactccgataatatcgtaatggagtgtggaaaaaacctcactaatgcattggtggtttctactacgctgaaaaaccgatatttcttacaattcggtaacaaagagtctttcaacgcatggaattctgctatacgattatgtttatacgaatgttcttcgttacaagaggcttacacaggcgcatttatttcaagtagaggcgcaaaattaggtgatatcagaattctccttacgaatagaaaatatgattacaaggattgggtcagcgtcagattcggagcaggtatgccgtggaagcgctgctatgcggtaatctctcaatctagcagtaagaaaaagggtcattttggtgaaataaatctttatgaaaatgacaagaaagtgaagaaaaaccatgcaatggctactattgtagaggcaaaggcgctttatgctgtttacccgtcctcccctaaactaatagattcctctacaatcattaaagtcgtaggttctgtgaaatttgaaaaaaaggagtctgctcaggaaaaggatgtctttattatgcccgagaagcatcaagctgtaccaagttatgacactataataaggtttttaataccggctatggatacttttaaactatatggaagaccagagaaattattgtcaagcaagaacgacccacattcacttttgtttggtttgccagttttgccacatatatactacttggaagtggaggatttacttccattgactaattctgtatcaagcttacactggtcgaataacgaatggaaggaacatatcagtgatattttacaaaggaaaatagcacaaggctactgtgggtgtaattctacttccaatattacttctcctctaccttctcctttccttggttcagcagacttatttgaaagggccgatggtgttttatcaccgaaactttcttacgggtctaaatcttcttcgaataacagctcgaagaacagtttgccaaagagagagcgtgtaaaattgtcatcttcttctgaacaggaccttaataactctgatagtccatctattaaacgtaaaagtcctccactagtgatatctgaaagtccacacaaagtccacacacctactgatgcatccttcagaacaagagtgacagaaggttcaccttatgcgaagcaaagacatcccaagccgtttgcgtcatctgtaaacgattcaccatcagacagagccaagtcgaggacagttccttacaataataacgacaggaaagcgaccactcctgagaaatttgaaagaggagaaacctcttgtggtaagaacgtggacgaaagtttggaaaaggtccggaatatgaagttagaaattcccgagtccaattttgacaagttcatgacagacaaaaatctgttgtctgtggattctaaatgctctaatgagaagaagctctctgtggaatcagatttgtctgcaatctacgaaaaatactccaatggtccctttggtcacactgagggtcttaacggatcttctgatgaaacttaccttcgttttcaacgggcgtcagttcattcagagagcaactacaattcaagaaaatcctttacaccaagtgacttttctaatggtaatgaggaagaacatgccgttttacaagaattaaatagtttaacccaaagaattaatgaactaggcatggaaagtataaattcaaactccgattcggacagaataaacgggtcatattcacaagtggattttggtaacaataacgacgaggacgatatgaacctgttcgacccagattttatggcacaagaccaattgcgtgctgaagaaagagactacaataaggatgatagaacacccttagctaaggtccctgcggcctttcaatcaactggattgggcataactcccgatgacgatatcgagagacaatacataacggaacacagatcacgacatgaagtgccaaagcggtctcccgagaaaccctccaacccgctggaaataggtaacccatacgcgaaacctggcacaaggttgaataccactcacacccacagcaaaactgatcgtagcattacccctcagaggggccagccagtcccatcaggccagcagatttcctcctacgtgcagccagcaaacattaatagtcctaacaaaatgtatggtgcaaacaactcggcaatgggttcgcccaggaatccaaagacgagagcgccaccaggtccatacaatcagggatggaataaccgcccctcgccttcaaatatttaccaacgtcctcatccctcagatacacaaccacaagcatatcatctccccggaaacccatactcaacggggaacaggccaaacatgcaagcgcaatatcacccgcagcaggtgcccatgcctatcccgcagcagcccaatcgcccgtaccaaccttatgcgatgaatacgcacatgggctctcctggcggatatgctgggcagcaccaccatttcagccagctaacgtcaactacaatactaggcctcagcagccatggcctacacctaactcaccatccgcacactaccgtccgccccctaacctga

SEQ ID NO: 82535 - DNA, 660 bp, Saccharomyces pastorianus
atgtcgcatactttaaaatcgaaaacgctccaagagctggacattgaggagattaaggaaactaacccattgctcaaactagttcaagggcagaggattgttcaagttccggaactagtgcttgagtctggcgtggtcataaataatttccctattgcttataagacgtggggtacactgaatgaagctggtgataatgttctggtaatttgtcatgccttgactgggtccgcagatgttgctgactggtggggccctcttctgggtaacgacttagcattcgacccatcaaggttttttatcatatgtttaaactctatgggctctccatatgggtctttttcgccattaacgataaatgaggagacgggcgttagatatggacccgaattcccattatgtactgtgcgcgatgacgttagagctcacagaattgttctggattctctgggagtaaagtcaatagcctgtgttattggtggctctatgggagggatgctgagtttggaatgggctgccatgtatggtaaggaatatgtgaagaatatggttgctctgaccacatcagcaagacattctgcctggtgcatatcgtgttctgaggcccacagacaatcgattactcagatcccaactacttggacgggtactatccggtag

SEQ ID NO: 82536 - DNA, 567 bp, Saccharomyces pastorianus
atgtctgcattgttgacgtacaggacaagaaacagtttcgagaacaaattctccagaagatctccttcaatagcacaacaacaaaaagctcaaagggaggagacacgcaaaccatctactgtcagcgaacactccctacaaatccacaatgatgggtataaaacaaaagccagcactgccattgctggtatttctgggcaaaaacgtcaaagcgtggtgtccaccgcatcttcttcggattcattgaattcttcaacatcgatgacttcggtaagttctgtaacgggtgaagtgaaggacataaagcctgcgcagacgtatttttctgcacaaagttacttgaggtaccagggcacaaagttcatcaataggttcgacgccaattgttacattgccatcacacgtaaactggatacgcacgatttggcaagagacagagtagatgacatcactgaggtcctttctaccatccaacaaccatccctgatcatcggtatccaatctgatggactgttcacatattcagaacaagatttttggctgagcacataccgaagtcgcacttag

SEQ ID NO: 82537 - DNA, 996 bp, Saccharomyces pastorianus
atgagtaagaaaccaattgttttgaaattaggaaaggatgcctttggtgaccaagcctggggggaattggaaaagattgcggatgtaattaccatccctgaatccaccactagagaacagtttttgcgggaggtaaaagacccacaaaataagctctcccaagtacaagtcattactagaacagcaaggagtgtgaaaaacaccggtagatttgatgaagagcttgctcttgctttgccctcctccgtagtggctgtatgtcatactggtgctggttatgaccaaattgatgttgagccattcaagaaaaggcacatccaggttgccaatgttcctgatttagttagcaatgctaccgctgatacgcatgtatttttgctattgggtgccctaagaaacttcggtattggtaacagaaggttgatcgagggaaagtggccggaggcaggacccgcatgtggttctccctttggatacgaccctgaagggaaaacagttggtatactgggtctaggtaggattggtcgttgtattttagagagattgaagccgtttgggttcgagaatttcatatatcataacagacaccagcttccttccgaagaagagcatggttgtgaatatgtaggattcgaggagtttttgaagcgttctgatatagtatctgtaaacgtcccactgaaccacaatactcaccatctaatcaatgcagagactattgaaaaaatgaaagatggtgtagttattgttaacacagcgcgtggtgccgtgatagacgaacaagccatgactgatgctttgcgttctggaaagattagaagtgctggtttggacgttttcgaatatgagccaaaaatatccaaagagttattatcgatgtcccaagtcttaggactgcctcatatgggcacacatagtgtagaaacaagaaagaaaatggaagaactggtcgttgaaaatgcaaagaaatgtgatattgaccgggaacagtcttga

SEQ ID NO: 82538 - DNA, 195 bp, Saccharomyces pastorianus
atggttacaaaaaagacgacattcgcccaacttatcactcgcttgaaccactttttatgccaagcccttaaacgccgcgactcaaaaacatacatactgtgccgcacggcagtttttgacgctatgacacccttttccccaagaaaatcgcatattaacaacaaattacccatgcaacccaggaaaaaaaaatag

SEQ ID NO: 82539 - DNA, 2805 bp, Saccharomyces pastorianus
atgatgtttggcaagaaaaaaaacaacggaggatcttccactgcaagatattcagctggcaacaagtacaacacactctcaaataattatgcgcttagcgcgcaacagctcttaaatgccagtaagatcgatgacatcgattcgatgatgggatttgaaagatacgtaccgccgcaatacaatggcaggtttgatgcgaaggatatagatcagattccaggccgcgtagggtggctgacgaacatgcacgcaacgctggtctctcaggaaaccttatccagtggtagtaatggcggcggcaattcgaatgacggagaacgtgtaacgaccaaccaaggtatttccggagttgacttctactttttagatgaagagggtgggagcttcaagtcgacagttgtctatgacccatacttctttattgcgtgtaacgatgaatcaagagtaaatgatgtggaggaactagtgaaaaaatatctggaatcttgtctcaaaagcttacaaatcattagaaaggaagatcttaccatggacaatcaccttttagggctgcagaagacacttattaagttatcatttgtaaattccaatcagttattcgaggccaggaagctcctgaggccaatcttgcaggataatgccaataataatgtgcaaagaaatatatataacgttgctgcaaatggctcggaaaaagttgacgccaaacatctgatcgaagatatcagggaatatgatgtgccgtatcatgtccgagtatctatagacaaggacattagagtcggtaaatggtataaggtaactcaacaggggttcattgaagatactaggaaaattgcattcgccgaccctgtggtaatggcatttgatatagaaaccacgaagccgcctttaaaattcccggattccgccgtagatcaaataatgatgatttcgtatatgatcgatggggaaggttttttgataacaaatagggagataatctctgaggatattgaagactttgagtatacaccgaaaccggtgtatcctggttttttcaccatatttaacgaaaacgatgaagtggcgcttctacaaaggttttttgaacatataagagatgtacgacccactgttatatccaccttcaatggtgactttttcgattggccttttatacataacagaagtaagattcacggcttggacatgttcgatgaaattggtttcgctccagatgctgaaggtgagtacaagtcctcatactgctctcacatggattgtttccgttgggtgaagcgtgattcttatttaccacaaggttcccagggtttaaaagctgttactcaatctaagctaggttataacccaattgaactggatcccgaattaatgacgccgtatgcatttgaaaagccacagcacctttccgaatattctgtttccgatgcagtcgctacgtattacctttacatgaaatatgttcatccttttatcttttccctttgtactattattcctttgaacccggatgaaacattgagaaagggtaccggtactttgtgtgaaatgttgttgatggttcaagcttatcaacataatattcttctaccaaataagcatacagatcccattgagaggttctatgatggacatcttctagaatccgagacttacgtgggtggacatgtggagtcattagaagctggtgtttttaggagtgatttgaagaatgaattcaagatagatccttctgccattgatgaattattacaagaattaccagaagctttgaaatttagtgtggaagttgaaaataagtccagtgtagataaagtaacgaattttgaggaaataaaaaaccagataacgcagaaattattagagttgaaggaaaacaatataagaaacgaactacctttgatctatcatgtagatgtcgcctctatgtacccaaacatcatgactacaaatagactacaaccagatagtatcaaagcagagcgcgattgtgctagttgcgattttaatagacccggaaaaacctgtgcaagaaagttaaaatgggcttggagaggagaattctttcccagtaagatggatgagtataacatgatcaagcgtgcattacaaaatgagacttttcccaacaaaaacaagttttctaaaaagaaagttttgacatttgatgaactaagttacgcagaccaagttatccacataaaaaaacgtttaactgaatattcaaggaaagtttatcatagggttaaagtatcagaaattgtcgaacgagaagccattgtctgccaaagagaaaatccattctacgtcgataccgtgaaatcctttcgtgataggcgttacgaattcaaaggtttagccaagacttggaagggaaatctgtccaaaattgacccatctgataagcatgcgagagacgaggccaaaaagatgattgtgctttatgactcattacaattagctcacaaagttattttgaattcgttttatgggtatgttgtgaggaaaggctctcgttggtattccatggaaatggcggggattacgtgtttaacaggtgccacaatcattcaaatggcgagagctttagtagaaagggtaggaagaccattagaattagatactgatggtatttggtgtatcttaccaaaatctttccctgaaacttacttttttacattagaaaatggtaaaaagctttatctctcctacccatgttccatgctgaattacagagttcaccaaaagtttacagaatcaccaataccaagaattaaaagacccattgaactatatatatga
